United States Patent Application Publication US 2015/0315605 A1 - sequence listing, part 16

SEQ ID NO: 25101 - DNA, 4515 bp, Zea Mays
tagcctgctagtctctccttgggtgattgggtccttcagtccttgcaatttcctcccgcactcccggttctcccgcacgctcccctctgcctgtccgtgtcgcttgcttcgcttctgcaaacccctgcccggcggccggggcgagggggcgtgatggtgttcaaggggcgcttcttctcgtcgcgacacaagtcatcggagtcatcttccagcccagacggcagcaacagcccacgcacgcctacctcggccccggcctcggcatccgcggcgtcgccggcgtcgtcgtcgtcgtctagatccgacaagaagaagactaaatcggagactcctaagaagcgcgacaagctcttcggttccgcggccaccgcacccaagagcgccgcatcgtcggcctcgtcaagcccggcgggtgatgggaggaaggggtccgtgccgcatcatagggatgcgggcgtcgggggcgggggtggcgcgtcggcggccgcgctgtcgccgatcctggcgtcctcgctggggctcaaccggatcaagacgagatccgggccgctgccgcaggagggccaacgcatggctgccgtgatcgggagcagcaacctctcgcgcgggcagggccaagcggaaccgtcggctgcctcagccggcgtcggcggtagaaagggcgtcacctcctgggcggatactagtagtagcagccgcggaaaagggaagacgaccgagctgccgatgcgaagtacagctgggacgagcttgggaccagtagggaagagcgctgtaaaagctaaacctagtgcacagcggaaccattctggagatttgaggacacctactcacatacctgaggctgcgtgtgcatatgatccgtgtgagacaccaaaggaatccgagtccccacgctttaaagccattatgcaggctactagtgcaccgaggaagagactccctgcagatataaaaagtttttcacacgagctgaactccaaaggggtgcgcccatttccttttttgaaacctcggggcatttacaacttaaaggaggtaataaaagttatccatgtgagatttgagaaggcaaaggaagaggtaaattcagatttggcagtttttgcaggagacttggttagcgtaatggaaaagtatgcagactctcatcctgagtggaaagatgccctggaggacttgctaatacttgcacgtacctgctgtgtcatgacacctggggaattctggcttcagtgtgaaggtatagtgcaagatttggatgaccatcgtcaggaactctcaatgggtgtgctgaagaaactatacacccggatgctttttatccttacaagatgcacaaggctgctccagttccacaaagaaagtggttttgctgaggatgaagttgttattgatcagcgtgataagattatacaatctgcagataggcagattttaactcaatcaggtgtgggtgacacaacatccagagccagtaaaagtgaggcaagaaaatcatacagtcaggagcagcataatttgaaatggaagcgtagccaggagataaagcctgttaaccttcttccaccacttgatacggatgttaagaaagtggctgattctccaaccaaagaacgaatatcttcctggaaaccttttccatctcctgttacgaaggtcccaaaagaatctactcctactaaattggaatcacctaataagaaaacagatgcacactctacagttagtagccatgttgaattaagcagtccagttgaatctttaccacaacaacagcttcctgtcaagcatcaacataaaacttcatggggccactggtctgaccagccaaatatttctgaagagggttcaataatgtgtcgcatatgtgaagagtatgttccaacacagtatgtagaagaccattcaagggtctgtgcaattgctgacaggtgcgataaaaaaggtgttagtgttgatgaacgcttaatcagagttgcggaaatgctagaaaagatggtagaatcttattcaccgaaagacctgccaaatgctgcagtcagcccagatgttgcaaaagtttcaagttcaagcatcaatgaagaatctgatggtccctctcctaaactctctgattggtctagaagaggatctgctgatatgcttgactatctccaagagactgataacactatttcattggatgacattaaaaatcttccttcaatgacatgtaagactcgttttggaccaaaatctgatcatggaatggccacatcatccgctggaagtatgactcctaggtctccattaactccaagatcaaatcatatagacatgcttttagctggtaaaaatgcaattaatgagagtggtgatcttccgcagattgtcgaacttgctgatattgcacgatgcatagcaaatacccctctggatgaagaaagcgcattatcccaaatggttacctgcatagaagatcttcaagaaattgtcaaccgcaggaagcatgaggccctcacagtccagacatttggaacacgcatagaaaaactacacagggagaagtatctgcagctctgtgactcagttgatatggacaaggttgattcagcaagcaccataatggatgaagaagatgatgttgttcgtagcttgcgcgcaagtcctgtccatccagtcaaggatcgcacttcaattgatgactttgaaatcatgaaacctattagccgtggagcatttggacgtgttttcttggccaagaaaagaactacaggagatctttttgctataaaggttcttaggaaggcagatatgattcggaaaaatgctgtcgagagtatattggctgaacgtgatatcttgattacagtcaggaacccttttgtgttgacagattttgggttgtccaaggttggtttgatcaacagcacagatctgtctggtcctgctgttagtggggcttcactgtatggagatgatgagcctcagatgaatgagctcgaacaaatggatcaccgagcacggagacaaaatcgttctgctgttggaactcctgattatttagcaccagaaatccttttggggacaggacatggttgcagtgcagattggtggtctgttggtgtcattctgtttgagctcattgttggcatacctccattcaatgcagaacaccccgaggcaatttttgaaaatattatgaatcgcaaaataccttggccacatgtcccagaagagatgagttttgatgcacaagatttaattgacagattattgacagaagatcctcatcaacgactaggagcaaatggtgcctcagaggttaaacaacatccatttttcaaagacattagctgggatacccttgctaggcagaaggctgcctttgttccttcctccgatagtgcatttgatactagctacttcaccagtcgctattcttggaatcaatcagatgaaaacatatatgaagcatatgagttagaggactccagtgataatggaagccttagtggaagcagtagttgtgtgagtaaccaagatgacatgggggaggacagcactggcctcaatgagtttgaatctagtgcaaatgtcaattattctttcagcaacttctcgttcaagaatctatcacaacttgcttccatcaactacgatctgctcaccaaaggattgaaggatgatccaccgccaagaacagaaatgtagcagttaatctaaatttggatggactcatttgagtactcagacagtctacaaggtgctcgtgggatgtaggtcttgtacatatcaaagtgtgaggcatggtctgttcctattgaggctgttcctacatctcgcggatccgagtacagttttggtgttgccttgttttcatgactattgccatgccatcatcagtgaaatcacccttgaccaaatttggcattcgacctaggagcgctgtctttttggttcgtctttcctttttttttagtcctattatgagccttgggtttacggagattggtcaaggttactgtattcagaatacagctcctgaagacgtaggcgggtttcagagaattgccattctggcatacagttgactctggttcgttaagctggtagcccgctggacttcctgcggccagaactgtccacaacattttgatggccgtggaatataacattttgcttaatgtgtccagtgtccaacagaatcagggacattttaagaagaatattaaccgattgacattataaggatatcaaatggaagcggcgttttatgcaattcaaaattcgatgggcatcgcccagtagtcatattgtgagtatctgtaggctagtcggaatcgtaacggtttgtccgatgtcatgtcgcttgcaaaatgctgtagtagcactacctgctgtttattaaactcagaactcgaactcttttaatagccctcgtagactatttttaacatcgccaagagcactgccatgtcacggatgagatatttaatccagctacctttggcttggatattttagaaattg

SEQ ID NO: 25102 - DNA, 778 bp, Zea Mays
ggatgatgcataatgaacgtctatgatttataatgggggtgcatggcctagggggaggatggcgactaggttcatcgatggcggcaagcagctcgtgttcgaccacgcgacacagttcttcactgcgagcatccgcaccgctgcaggtgctgcatatcatcggcagagaggatcgagttcagatcgatgatgcaaggcggctgcatcgtcgagctgtaacacctgcagcgatgatgcctccttatgggacaccaccaccatatgcagcaatgtatgcacaaggtacaccataacagcaggcaccaatgccaccgggttcacacccatacagttcttatcctatgcagtcaccaaacggacagttcaaactccaataagaatctcttggctgctcacctgtcgcatcttccccgattcaaaatcgtcctggtcgcatcttccccgattcaaaatcgcccaattttggagatatgtgacaaacgccatgccctgtgcattagagaagatacagaatcgccatgccctgtacaagacagtgagccaaattcttgttcattttgcactatgatacatattgattcattaggccctaggttggaggttgtgactgatgagttgggaagggattacttgattggtggtgtacaattcttggactggatacatgttccagtttttggtccattagttcaggaattgtttcatttacatgtatattcagtacactcgtataatggaaacaggcaaatctctatctcattctttggttattgtgtta

SEQ ID NO: 25103 - DNA, 1432 bp, Zea Mays
tgtatacctataaatagctcgctttgataacatgatctgctgccttatacgaaacatagctacctactactcaagtatccatccttatttgttgatccatggactcggaaggagttgtagcagcaaaggtggcagatgagactactaaaccggcaatccaagaagacggcgccgagagcaaggccgggatgactgatctgctgatgctgaccgacaagtcgcagctgcaggcgctggcgatgctgctgcggaacaacgaggagctcatgatgagccaggcgatcaagtcggagacggagcgcattgagtacctcaagacggtgagcgactgctacacgcggacgatgaagctcctcgacgattccatggcggccaggaccacgtacgagcgttcgggcggaacgaggagcctcgtcgcccgggacatggacgactacgtcgtctacggcctcaacgcgtgcttgcagaacgtccgcaactgctgcgtgcgcctggacgccatcgacaagctgcgggcgcactacgacgccctcgccgacgccgtcgccgacccggccgccaacgtcgagggcctcgccgcggaggcgtccgagtacaaggccgccatgtggcagtactgctacaaccagcggagcgcctccgcgcgggcgcactcccgcgcctactcccaggcgctcaagctggagggcatcgacttcgccgagctggtgcggaggcaccagctccggctcgggtacggcagcaagggcgaggagttcgaggacctggacgacacccagaagctggaggtgtacaaacagcatcatcgtcgagtcggggcggggcgggggctaccggtgcggatgttctcgtcgggccgctctgccggtggccctaagattgcagccacgacgtgggcggaggcggtgagcgtcttcatcatggcggcgggcaacctggcgtgggacgtgttcaccacggagcacgaggtggaggccatcctcaagggcagcctcaacctcctggcggggctagggggcttcgccgtggaggccgtcgtcggcgcggctgtcaccaaggcggtcgcaaacgtcggcgccggcgtctttgcttgctctctcgccggcttcgtcgtgggcgccatcgccgggctgatcttcgtcggcgtcagcggcctcctcattaacctcatcatcggctccccaaggaaggtgcctgacatgagcaagctcatgttccacaccgccgtcatgcccgatggaatggcccttgcgtatgcggtatctcattaattacttaatatcatcgcagtgactaccaatgcaactgcttcagctcctactgttgcaacgcgcgtgtggaaataagaagggaataataataattattattattgtaataaaaaataattatcatatattgataatgattatatatcaaatatcttttctcg

SEQ ID NO: 25104 - DNA, 3917 bp, Zea Mays
cgatagtgatttcatcttcctctaccaggcggctccgtggtccgtgctgatcaactgcatcaaggatcgtcgccggcggcgcgctggcagcagttcgcacggcgagatcggattgatcgagatcttctaggcctggacctgcgctagacctcgaagcctcgatcgcaccgcatcttctctctctgctgctggtccgctccgtcgccgccgaccccgccgccagcttccccttccacctaaaaggacgacctctggccgcccttgtcccgccccgacgcctcggtttccactgcataggcgtggtgcggcgatccgtccgggcctagggttgcgagagacactatagggtacgaccctaggagcatccgcctccacgtgggtgaggcggaagagggaggatgacatcgctcagccgtgagctggtcttcctcatcctgcagttcctcgatgaggaaaaattcaaagagacagtccacaagctcgagcaggagtccggattctatttcaacataaagtactttgaggacgaagtcctcaatgggaattgggatgaggtggagcgctaccttggtggattcaccaaggttgacgataaccgctactccatgaagatattctttgagatccggaagcagaagtatctggaggctcttgataagcatgatcggtcaaaggctgttgaaatcttggtcaaggaccttaaggtctttgcatccttcaatgaggagttgttcaaggagatcacacagcttctaaccttggagaattttagggaaaatgagcagctctcgaagtatggtgatacaaaatctgcaagacaaataatgcttgctgagctgaagaagctgattgaagctaatcccttgttccgtgacaaactacaatttcccagcctgaagacttctaggttgcggacacttattaaccagagcttaaactggcagcaccagctttgcaagaaccctagacctaatcctgacatcaagaccctttttgttgatcattcatgtggacaaccgaatggtgcacgtgctccatcaccagcaaacagtccgttacttggatctatgcccaaacctggaggtttccctccattgggtgctcatggaatgaatcttccggtgaacatgctgcctgtgacttatccacagagccataattaccaacaagatgatttccacaaagctgttgcacggaccttgagccaaggatcagcacctatgagcatggatttccatccacttcaacaaactcttcttcttgttggtaccaatgttggcgacattggattgtgggatgttggtaccaaagagagactcgttgtaagaaacttcaaagtctgggaccttggtaaatgtacaatgaccctacaggcagcactggttaaggacccagctgtgtcagttaatcgcataatatggagtcctgatggaaccttgtttggtgttgcttattcaaggcatattgtacagatttattcctataacggtggcgatgatattagacaacacttggagattgatgcacatgttggtggtgtaaatgacatagcatttgctcatccaaataagcagctatgtataattacatgtggagatgataagacaattaaggtatgggaggccactagtggagctaagcaatttacctttgaaggacatgaagctcctgtttattctgtgtgtccacattacaaggaaaatattcagttcatcttctcaactgctttagatgggaagatcaaggcatggctatatgataatttgggatctagagttgactatgatgcaccaggtcattggtgcactacaatggcatatagtgcagatggttcaaggttattttcatgtgggactagcaaggatggtgaatcacatctagtagaatggaatgaaagtgaaggagcagtgaagagaacatatcagggattccgtaagcgatctatgggtgttgtgcaattcgataccacccggaacaggtttttggccgcgggggacgaattcatgattaagatatgggacatggacagcacgggtcttctgactaccattgatgctgatggtggcttaactgcaagtccacggatacgcttcaacaaggagggaactctattggctgtctccactgctgacaatggtatcaagatcttagcaaatgctgatggacttcggttgctgcgcacactggaaaatcgttcttttgatgcttctcgtaatgcatctgaggctgtaacaaagcctctaataaatcccttgactgctgcggcaaatgcagctgcagcaagcagttcaggagctggtgctccgtcagctataactgcaatgaatggtgatagcagaagtttggttgatgtaaaacctagaatagctgatgagtcacttgacaagtcaaaggtatggaagcttatggagataactgagtcaagtcagtgcagatcaatcaaactggcggataacatgagaacaagcaagatttcgagattgatttacacaaactctggtcttgctatcttggctttaacttcaagcgctgttcatctactctggaaatggccacgcagtgatcggaattctggaaaggcaaccgcaagtgtatctcccactctatggcaaccaccaagtggcatcttgatgactaatgacacgactgacaataatcctgaagaagctgttcactgctttgctttgtcgaagaatgattcatatgtcatgtctgcttctggaggaaaaatctctctgttcaacatgatgactttcaagacaatgacaacgtttatgcctgcaccgccggcagcaacttttcttgcatttcatccccaagataacaacataattgcaattggaatggatgactcaaccatccaaatctataatgtccgaattgatgaggtcaaaagcaagctcagaggtcactctaagagaatcacaggtcttgccttttcaaatgtgctaaatgttttagtctcgtcaggagctgatgcccagttatgtgtttggaacacggatggatgggagaagcaaaagaacagatttttgcagataccatcaggtcgccaatccaatatcttggacactcgtgttcagttccaccaagatcaaatgcactttcttgttgtgcatgaaacccagattgccatctatgaaactacaaaactagaaccagtgaagcagtggcctgttcgagagaattcacctccaatcacacatgccacattctcgtgtgatagtcaactgatctatgcaagctttatggatgccactgttggcatatttaatgggtcgagtttgagacttcaatgtcggattcttccagcttcgtatcttcctccaaatatcagtccgagcgttcatcctgttgtggttgcggcacacccttcggaagcaagccagtttgctctagggctgactgatggtggtgtttttgtgttggaacctttggaatcggagagaaaatggggaaatcctccaccagtagagaatgggtctgctagcaacttgtccacaccgcctcctaatggagcttcaagttctgaccaaccagaaagatgattaagaagttggaactggtagatttttcgtggcacgagtctaaccaagaagggcttcaaagggtggtgcgactaaccttggcagataggttccaagggagccggacaatgcgctcaataaaaataagttcaacagaagtttgtccgttgcttgtataaatatttgtattgactatcgagtgaggagtcctagtatttcatttttgctttgtttgcggtgctgtgaaaaggatcagtagataagctgtagtacaacaactatcagactggctgtacttacctatatttatgactattagttaatgtatgttgtttcatttgcctttttggctccgttcagccgtttttgctatcataaagtgctgtttct

SEQ ID NO: 25105 - DNA, 4854 bp, Zea Mays
cttctatcctcctcgtcttcctcgtgacttctccaaggtgaaaccctagctgctgcttccgccactcacgccgctcgccgccgacgccgactatcgccggaaacaggtcaacaggagagcccgttcaagtccgggacccctcaattgtccttttctctctctccccgcccaacttcccctgctctgccgccgcctccccagtccggcgtgcatcagcagcgacatcagagtcggcgatgggaggcgtcaccgacgttctcgtccccttatgttgatgaagtggcgtgccgtggagattcctttttgaccgatttcttgccggttttttccttttctccgtcgtgcaagatcagtcctttctttttttctccgtccacggttcgatcaggttttaccttctcttcgtcgtgcaagatcaatccttcattttctccgtcgtgcaagggggtcagttgaatcagatgctccacgttacgtccacccttgagctcgatggcagaaggaagcagtagccataggaggagtgcattctcccctgggctggctgtgttattatctggcgatgaagctaagattagctcccagaagtcgcacctggtgtcctatcatgacgaaattgggcaccaggctgttgagaggacgatagagcacatctttgatctccctcacaagtcagtggtccggcctcctggaccagttgacacaggcttcgtgcactcagtggtgaggaatcaagctagaaaatttgatcttgactgggaaaactgcattcggggataccatcgcagcgtcttcattgtggacaaaggtgctgggcagaggaaggtggttcttgatgattcgagcatttgtggtagcttcaggaatgtccggggaccttcacttgttgagagttccgcccctttcagcagtgccagggctaatgcttgtgtgtggaaaggcaaatggatgtatgaggtgacccttgagacgtctggagttcagcagcttggatgggctactctctcttgtcctttcactgatcagaaaggtgttggtgatgctgatgattcatattcctttgatggccggagggtgactaagtggaacaatgacccaaagccatatggccagccatgggcagtaggtgatgtcatcggttgctgcatcaacttggatgcaggagaaatttccttttacaggaacgggacttctcttggtgttgcatttgatggaattcgcagcgtggaacctaagaagggatattatgctgcagtatccctctcggaaggagagcgttgtcatcttaatttcggctcacatccattcaggtatcctgttgatgggtttgatccattagaggcgccaccacgctcttggtcgtttgtcacataccttcttagatgcctgttccggttgctagaagttcacaacctggagaaatctgaatcagcatacttcgagaaactgaggagggtgaaaaaatttgcaccactacaagaactctttggacccatttcagaagggatctgtgcagaaattttcagtgctattgaagcaagccaggggtgccttgagtatattgcctggggctcgttgatcactctactcttagatgttttcagaactcgtgagccgcatgatttctcatgccttgatcaggttcttgaccttttcctccggttcccaggttgcacttcattatttcaggagctcattgtggccctttcttgcatgtgcaaagttgcaccacttgtgttgacagaatgcccatattctgggtcatatccatttttagcgctggtttgccaccttcttaggcataaggatgtaatgtgtttatggtggaaagcagaagatttcgttttctcgtttgaaggcttccttacaaggaagattccaaataagcaggatctacagtgccttgtgccatctgtttggtggcctggttcttctgaggatgaagttagcatgacactgacgatgacaacactctcagatgcaataaaaaagattgaggagatgcatcgtgaactttgcagcttggtaatatgctttattccaccaatgtctacgcctcagcctccaggctctgtatttaggtcctttgtacaaagtttggtgctcaaagctagaggtggagatcataggatggttgtcaatgggactttcaacaacactgtgcttgtttcattgtacacagtaatcctgcatttgttgtctgaaggattttctatggattctgctggatctgcatcatcctctaaagcgaactttgggaatggtgttggatttcttcacaaaggtggaaaacgcaagtttccgacacaattatttttcaggaatgatgcctatcacagtgtaattcctagaatcggtggaccaccaagtattttgatgcatcaccaatttgatgctgtggaaaatgaagtgcagtgggatgaaggctgcatgaatgatgaagagacacgtgttacacacactacagcacagaagccttgttgctgctcagtgacagatgttgctgttggcctaagatacaaagaaactgctaagtatgtgccatcaacttcaaaaggctcatgtaagcctatgcctgaaagatctcctcatgttgctgctgagtgcaatggtagaggtctgagtgatgagatcgaagacaaacctagcacaagtgctcaatcagaaattgaatatggataccaatcactgcatagtcttgaaaacatgccaatggcaactcaatcttcgtcggaaacacttaaagaagaagagctgcttgatgttatgttgttgttatatcatctcggcatctcaccaaattttaggcaggcagatacgagaaaaatcatgctcagagcaagtaaggcgtttgaaagaagcccggaatagctatcacgaggatttggtagattgtgtacggcattgtgtttggtaccgggccacccttttctcccagtggaagcaaaggggaatgtacgcaacttgcatgtgggtcgtggagcttcttttggtccttagtaactcaaatagcatgttccactatgttcctgagttctatgtggaatcactggtggattgtttccatgcactgcgaaggagcgatcctccttttgtttcccctgcattatttctcatgcaagggttggcctcgtttgtcactttggttgtcaagcacttcgatgatacaaggatagtgaaccctgacttgaaagatcttcttcttcaatcaatatcagttctcgtacagtataaagaattcatgcttgttttcgagaacaatcgggaggctataaataaaatgcctagatcactgttatcagcttttgacaacagatcatggattcctgttacaaacatactttcccggttctgcaaaggctcaggatttgcttcctataagaatggtgaatccgcatcatctgcaacttttcaggttctactgagggagacatgtattcatgaacaagagctgttcttttcctttcttaatcgacttttcaatacactcagctggacaatgaccgagttctctatgtccatccgggagatgcaagataaaaaccaggttgctgatttgcagcagaggaagtgcagtgtaatttttgatatctcatgtagccttgcgagaatcttggaattctgtacccgagagattccttgtgcttttctcatgggaccagatatgaatttgcggaggttgactgaattggttgtctttattctcaaccacatcatatcagtagctgatgcagagttctttgacatgacactaagacggccagggcagcatcaagagaaaacaaatcgtactatgatcttggctcctcttgtgggcattatcctcagtcttatggaatgtagcagcacatcagaacgaagggagctaaatgatgtgattgcagtgttcgccagcatggattgccctgccacaatccattttgggctgcagtacctactgagctacaactggagcaatgttcttcgaggggattcatcccttgcaaagctagcgcagcttaaagagttctcccattacttccgacgcattacagcgtccgtggatggtgaagaagaagaccatagcctaaacgcgggcgatgaagacgacgaccacacttgttgcatttgctacaactgtgattccgatgcaacattccagccatgccatcaccggtcctgctttggctgcataagcaggcatctcctgaacaaccagaggtgtttcttctgcaatgcagtggtaacatcggttactagatagccgattcgcgagcgatgcgctgctctactcattgcctctttcggtatcgtgatccgaaggaagatggtgccactgatttgtcttatctattttgcttgacctgagggctggggcgctggcgtcccagagatctttccattgcttttccaggaagaacgcgttacctttgtgcacgagggtcagaagcggttcttcgttttccttgctgtatatgtaaaggccaggtaatagtagaaaggattcaataacattgccgcagaaggaggtttctgtacacggtgggaagccagtaccaccgaaaggaatttcatggaatcgcaatttttgtagggtgtagggggagattccacgactgtaaatatgatgagatatgaaacagaaaagggggtggcagatcaacatcgaccttctgtaattagccagaataaaagaactagatgctttatattgagcagagctctcgtctttttgatcctccccacggtgtagtatcaagaatgaataaatcttctgtttcttgtctggttgtagcatgccagcatctgtaagttgtaacaattcagtgaatttatttaccttcagcaaaaagggtaaaaaggttgcctcttcaa

SEQ ID NO: 25106 - DNA, 1953 bp, Zea Mays
atgttactgctaaaaaaacagcaaatcttatttttagcatgcgcaggatgtcacagagagattggtcacgggcgttttctcagttgcatgggagctgtttggcatccggaatgttttcgttgccatgcatgtagtcaacctatatatgactatgagttctccatgtccgggaatcatccataccataaaacttgctacaaggagcagtttcacccgaaatgtgatgtctgcaagcagttcattcctacaaatatgaatggccttattgaatatagggcacatcctttctgggtacaaaaatactgtccttcacatgaaatggatggtactccgaggtgctgtagttgtgaaagaatggagccaagggaatcaaaatatgtattactggatgatggtcgtaagctctgcctggagtgccttgattccgcagtgatggatacaaacgactgccagcctttgtatcttgaaattcaggaattttacgaaggactgaatatgaaagtggaacagcaggttcctctgcttctggtcgagcgacaagctttgaatgaagccatggaaggagagaaggctggtcaccaccatcttcctgaaacaagaggactatgcttatcagaagaacagactgttagcacgatactgagaccaagaatggctggaaacaaaattatgggaatgataacagagccatataggctgacacggcgatgtgaagtgactgcaattcttattctgtatggtctcccaagattgttgacaggttcaattttagctcatgagatgatgcatgcatggttgcggcttaaaggataccggacactgagcccagacgtagaagagggcatttgccaagttcttgctcacatgtggatcgagtcagagatcatggccggatcaggcagtagtgccgcatcgtcatcctcaggatcttcgtcatccacatcatcgaaaaagggcgggcggtcccagtttgagcacaggcttggggactttttcaagcatcagatcgagacggatacttccatggcctacggagatggtttcagaactgggaatcgagccgttcttcattacggcttgaagcgcacccttgagcatatccggctaactgggacctttccattttgaagtagcatggattcatattttgggaaagcttatattatatacatgattttcttccagagttccattacaaccaaagagataaattgtaaaaaaacattctttccagaatccagagatataatatctatgaaggccaaaatgaagtattaaatgattgagatcgatggtcagtctgcccaatcattttgtattctgatcaaactctggaatgaaacaatggcaatctttttatatggtgtcagtttcaataaataccagtaccattttacagtatatatacagttgctttcatgtgtgagcttatctcaaactacttcgtccgttccaaattataaggtgttttaggttgtgtttgttttccttttagattatataagttggattatagtcaaagtgtaggaggataaatatatcaatttgagatcacaaattgtaacacacaaaatcctaattttgggatttaaaaattaaaaaaatattatcctgaaatctaaataagagtattttcttataaaagattaaagtaaaagtatctcataaaagatattatatattagaaagtatttcctcgtaaaacaaaataagtagtaaatattgaagtttttgaatgaacttttaatttgactacatattcaaaatactttcgcagaatgaatatgatgtgtgttgcatattgaacattacctaaataaataaggtaataaataaatgaataaacttaagacatatattttgcatttatgttggagatttttttgtgcaaattagaattctatttgaatttaaacctaattggaattggaaaatatgaaataaaaaggaaaa

SEQ ID NO: 25107 - DNA, 249 bp, Zea Mays
attttggtatatggacttttagctaaatccttctagatcttgaattccccttttgggctagttttagggtttcgaatgagtttcatttgtatttcagcttcttccagggattcatccctttgatccctccacctagagaaaagttactctctagctcaagatccaatctttgatacacatagctcatatccaaaatgtcctggtttagaatttcctttacttaatcatctattccaagcagagctcaag

SEQ ID NO: 25108 - DNA, 490 bp, Zea Mays
gctctcttcccacccgttcttcctccttctcgatcgatcgcgtcctcctccttcgttccgttcctagctcgctcgcgtctctctctctctctccgagctccgagctccgaatgttgattggttggtgtgtcctctagtagctgaagctgccagcatgatctgaggtgtccacagcatatatatggaagcagctagcgatcagatcatgctgtgcagtttcatctgctcgtggacgcacacgagatgctgtgcctagctgggacgtggttgattagttcaaggggttttgcatgcggtggtcgatctgatttgatacaaagctgctgggaggatatatattcagtcgacaagagtggatacctctgaccatgcattatattgggcagcaacaatggattaattcaaggagttttttctttctttctttccaacaatctcaccatgaattgaagaaattcaatacagttatacaccacacatacacttccaa

SEQ ID NO: 25109 - DNA, 1427 bp, Zea Mays
aacagtgtcgccactcgccacagagcgctccatcaacacgaccgccggtataaacgcagcccccctccggcctccaccaaggccaacattgctcaggctgctcccaactcccatcctccccctcccggagtacgaagtactagaaagagagcggctttcctctaagaatggcgggtggcggcgccggcgacgacgacgtggtggtggtgagctgcggcggcagaggcggcggcgaccccggcgcatacgccgcggtgctcaagaggaagctcgacctgtactgcgccgccgtcgccaaatccatggtgacatagatggggcaagcctagttacaaactctaatgtcatagaagatgatgattttcaaggcaagccaaccaacagtggcacatcaaaggaactgtcagacgatgatggtgaccttgaagagaatactgaccccgctaacgccaagaagatgaggagaatggtgtcaaaccgggaatcggctaggcgatcaagaaagaggaagcaagcacacttgaccgatcttgaatcacaggtttccaggttaacgtctgagaatgcatctttgctgaagcgactggctgatatgactcagaaatacaaggacgcttccgttgacaataaaaatctaacagttgatgttgagactatgaggagaaaggtgtgaggagttgtaaaacgaaacaaaacattaaaagcgcacataccatgccgcaatgcgccaagtgtgtgtcccattaagcctgtggggtgttgcccttgccttgccttgtggatgggctgctctatctcaaatgataccgagaggagtccaaacagaatactaccatacaaacatttcttaatgcttgtgtgtgaacatagccgaggaagctgtcaggaggctaactgggatcaccctcatgctaccgaccgcttttgagaagcccacgagcagcgcgcccctgtcatcatgtccatctgatgcagcttctgcttctgcttctgccgccattgaagacagcgtgaagcatttcctccaggcgccacttgaaaacagtgggatcatcccaaacgcagcagtttttcagaccaagccagcttctctgcaccgtgttgctagcctggagaacctgcagaagaggatcgtcggggatgcaatgtattccgagaccgcgtcaacgacattctcagatcctgaagctcttgccgataggtaaaggttgctcctgtcctgtgatgaacagccgtgtgatgctctagcggcctaagtgcttctggtaatggaagttgtagcacccatgcgcctgggtggggtctacacagtgatttgtacactattttgaaggttaataataattgttgagaaatgatctcatccctttgtacctatataagtaaagtattccattaataaagagaatagagttttcactcttcat

SEQ ID NO: 25110 - DNA, 788 bp, Zea Mays
tgaattctgagccttctttttttacccttcgcaacgaggatggcaatggccacatcagcatcgtaccctccacctcctccattttaccgattgtacaaaaattttgagcaagatccctcatctgcaccagaacctccaccaccaattgacgaaccattcaaagccttgggtgttgattacacaacttcaagaaggagcttaggaccctcaacagagagcttcaattgcatattttggagctggcagatatattagttgagagaccatctcaatatgctcgtagggtagaagatattacgctcatattcaagaacttacatcatcttctcaattccttacgacctcatcaggcaagggccacattgattcacatgcttgagagccaaattcggcaccgcaaggaagcaattgaagatataaagcagaggagggaggaagcgcaaaaggtgcttggggaatcactgcttatcttggatggaagtcaaactaactaggctgacgccgtcaaggtagttggttcaagaccgattcttctatgagttagtgtgttagtagaatagaagacaagatgtgtctggattgttgtggtatcatctgttgtggcttgtggtatttccagctttgataactgaattttcttacttctatggtctatgttagcaaagttggattactttcttacttccattggtactcaactgcatcatgggttactttcttgtggaagtgtatattgtgagattgatgcctcgtggccagcttaattgaaaggttgttatatgctaata

SEQ ID NO: 25111 - DNA, 3757 bp, Zea Mays
actttccaggccatcgtctccttccccttctttcaccggcctcgagtcacacgcgtgagatctgtgccttccgccgcggccacatgccacacaacgacgcccggcgagcttcaccgcgatagaggagctccaggaggacggccgctccgcgcacgccctccgcctccgcgctttcttctccgacccagcgcttttcccgcccgatctcgtcgcccgctcatcctctgcgccgcccggtgctgatccacagattttgctagaagagaaaatagcagcagaagaaaagttggcactcacggagtatgatctgcgcctagccaaagaagacctttcacagttgaagcttgaattacaaaaacaaaaagaatcatctcctgatgattcaaatgggctccttttgggtgcttctatacgcgaaggatatactaggcaacaagaaaattgggatgtgaaaatttcagcattaggccctctaaaggataatgaacgaaaagatcttaattgcgctgtaaaagaatacttgcttttggcagggtatcgacttgctgttatgacattcattgaggaggttcctgatcaagaccttgatgtttggccaaacagttcagcttgtgttcctgatgcccttcgtcgttattactatcagtatctttcttctactgcagaggctgcagaggaaaaaatatccatacttcaggaaaatgaaacattactcaaggacaatgaacgactcaatgctgaaaatgattccttgatgaagagcagggaaggagctaatagtcaggttgccgctttaaggaagtctttggaagctgcacacaaggatataaaagacaaggaaaaaatgattcaagacttgaggcagtcactggatgtccagaggaaggagctgaatgactgcagagctgaaatcacagccctgaagatgtacatcgaagggactcaatcaatcaaacaattgtttgttggaactagtgatggtgtaaagtcgcattcctttgctaattctgtgggagcatcatcattgaataatgaagatgaagattcaaaaggatctgaagccataacaaataagctagcatcagcagtaaatattactgatgatacgcagaaagatcgccaagttctagaaagtagcgctgaaggttcctcagtttcagaaactccagtgtctttcacagctgttgagaatgacagctatggtacatcaaaagaagataaatctgtgtcaaatatctcatcgaataatgctttggagactataaagatagtttcagatgcacttccaaagattgttccttatgtgctcataaaccatcgaacttcttccattgatcatatgtgctatagaaaagcatccagatagcgatgtacgggattccttgactcatacattgtttaacctgataaaacggcctgatggagaacagagacgcatcataatggatgcttgtgtagaattagcaaagagcgttggtgagatgaggacagaaactgagttacttccacaatgttgggagcagataaaccaccaatatgaggagcgcagattgcttgttgctcagtcgtgcggtgaacttgccgtttatgtccgtccagagatacgagattccctcattttatccattgtgcaacaacttgtcgaagatgctgcaacagttgtaagggaagctgcaacacataacctggcattgcttcttcctatgtttccaaatctggacaaatattataaggttgaggagctaatgttccaattggtctgtgacccgtctggggcggttgtggaagttgcactcaaggaacttgttcctgctgtagtaagatggggagataaattggatcagatatcaagagtactattggctcatatcctggcatctgctcagcgatgtccacctatttcaggtgttgaaggtacaatagactctcatcttcgtgttttaggagaacaagagcgctggaatattggtgtccttcttcggatgttgactgagttgcttccatttattcatcagaaagctatacaaacttgcccctttgcatcagctgatccaacaagctctacaccagagaacttctcagcatcctgcctaaaatcatatgcaacaggtgactctgagtggtcagcatttgagtggatgcacactgattgcctgccagatttgatcaagcttgcctgcttgttgcctgtgaaagaagataacttaagaaccatcatcacaaagtacctcttggaagtatctggactctacggtaaagattatctggagcacattatgctacctgtatttcttgtagctgctggtgacattgatagtggcgattttacctattttcctctatcaatccagccaaaagtccgtggcttgcgtccgaaaacttcaactgctgaaaaacttgccatcatgtgtgtcttcccattattgttatctggtattttgggttctccttccagtcgtcaacagttggaagagtatctgagaaaagtacttatccaaaacaccaaggatggttcattttctatgcatcatactactgagatcattaacgcagttcggtttctttgcttatttgtggagcaccatagtgtcatctttaacattttgtgggagatggttgcgagctcggataccagcctgaaaataaatgctgcggctctactgagagcacttgtaccctacacggatgtgaaaatagcatcaactcatattttgccagcacttgttacccttggctctgatcaaaacttgaaagtaaaatatgccagtatagatgcatttggagctgttgctcagcatttcaaaaatgacatggttgttgacaaaatacgcattcaaatggatgcttttcttgaagatggatcacatgaagcttctgtttctgttattcgtgcacttgcagtagctgtacctcattcaacagataggctacgtgaatatcttttaaccaagatatttaagatgacatgcatcacacctgtcggcaatgatattgaacggcgtcgtgaaagagcaaatgtactctgtgaagcgctccgggctctggatgctacagatcttcctgctatgggtatacgtgatttgcttctgccatcaatacaaaatctgttaaaagatctggatgctctagaccctgcgcacaaggaggctttagaaatcataagccgggaaaggtcagggggtacgctggaaagcattagcaaggtaatgggggcgcatcttgggattgcatcatctgtcagcagtttctttggtgagaacagtctcctcacaaagaaagaaggtggcgaggaacatgatcctgctggccccaccgctcctgagcaaaacctgcaggctcagccagagagcacgaggtttggtcgcataatgaggagcggctttggagacatattgcgaggtcaaagcaaaggacagtgatgcacttagattgaaatgatcaattacatacatagctgccgataccacattctttgtttgtaagttgacagaatatacctcaagggttgtatgttatttgccgagataaaaaaaaaggatttgacgttgcaaatctagcatcaaacttcctgtatgtaagttgcctgtagttagctgctcatttataagatgctaataattgtgtctttgtttcatttgtttttataaataaaatatataactagatatgagacactttgcccatcttttctgaaatttggatgttatagttggctgacatcatgtaattgatctgctttggttgaaggaacggtggg

SEQ ID NO: 25112 - DNA, 164 bp, Zea Mays
ccgtgttcttgatccctttgttcccgttgatttcatctccgctcactttctttctattcgattttggcgcctgcagattgcaagaacgggactgctaagcaagctaagatttcattttttttctggatcaatctcaaattaggatttaggaggaggaaataaag

SEQ ID NO: 25113 - DNA, 3945 bp, Zea Mays
cgcagcgtgcactctgtcgcacaacttccctttgtggccttctcccgccgtgcgccaccggagattttactccaatagatccactgagacgtgcgtgcggccatgtgaagagccgtcgcattaaccgtcgcgttgccactgtcgtcagatcgcaagggcgaaacgcatccaaccccagaacccctacgacaccactgtccagtgtccactccactcgcttcgcttgcagttgcagatccgccagtagtgaattgcatgccggtcgtgtgggctttggcgctggtgggtccatcagttgaaagttgaaacgccggggtgcgtcgcactgtcgcttcgcttgcgctcttcgcgtccgttcccccccaaagccacgataaatatgcgctcgagaccgaccctttcggccgtaatctcctccgctcaagccgtagtagggtttccgtagcccagcccatgtcgacgcgcgacggcggaggcggccggcgtggcggcaatgcagcagcaggccgtggaggtgacggccaagggcggggccgtggagggggcggccgaggtggcgccggcggccgtggcggtggcggccaatggcgggcccaaggcggcgcggagcttggcggtggccgaggtggagccgtcggcgcagcgcgtggcggccgcggaggtgtcgagagagggggtcaccagtccttccacggcgccaggccggtcggtggggaccgaggcggacgcggacactaccaccatggcgtgcctgctcaggtccagccgcagtggcaagtggccgcgccgccttcgacgtcgaggccgacacccgcggaagtcgaggagctgagaggcgaggtggagaggaaggcggcggtggcggtgccagacgcagaggcgcacgaggggccgtcgtcgggcaccgcgcatgagccttccgccgcgccggcgcgggtcgaagcggagcaagggacgtcgctggtggtggaggcagaccaggccgctcaggggaggctgcctccgtcgtcgagcaaggcgctggttttccccgcgcggccggggtacggcacgctcggccggaggtgccgcgtgcgcgccaaccatttcttcgttcaggtggcggacaaggagatctaccactacgacgtcgtgattagtccagaatcgcagtcaaggaaaagaaatcgttggattcttaacgaactcgttaaattgcacaagaattacttgaatgggcgactgcctgtttatgatggtagaaagggccttttcactgctggtccgctaccgttcaaaaccaaagaatttgttctggaactaaccaatcctgagagagcaaaccagggggcgaaagagtacagcgtgaccataaaagatgctgccaaattagatctttacagccttaggcagttcttggctggtaggcagagggaactgccacaggatactgtccaagccctcgatattgctatgcgagaatgcccaactgaaaagtatgtatccatctcaaggtcatttttctctcagtcatttggacatggtggtgatattggcagtggtgtggaatgctggagggggtactaccaaagtctacgtgctacacaaatgggattgtctttaaatattgatatttcagcaactgcattttacaaggctcaaccgattttggagtttgcattggagtacctcaacatacgtgacacctcaaggcgtttgtctgaccaggatcgcttaaaactgaagaaagtcctcaaaggagtacgtgttgtggcaacacatcgtcgtgatatagccatacattacaagattactgggataacctcacttcccttgaatagtttaacgtttaatcaagatggggcaagtgtttcagttgtccaatactttaaacaccaatataattacagtttgaaacacattcactggccatgccttcaatctggcaatgatagtaggccgacttatttaccaatggaggtttgcagtatacttggcggtcaacgctattctaggaagctaaatgagtaccaagtcacaagcatcctgaagaaggcatgtgagcgaccacctcaaagggagggcagcattttagaggtagttaataggaacgactatggtaatgatcattgtgccaaagaatttggtattaaggtgacaaatgaacttgccttggttgatgcacgggtgctgccagctccgacgcttaagtaccatgactctggacgagaaaaggtgtgtagtccttccgttggtcagtggaacatgaacaacaagagattgatcgatggagtatccattcagtattgggcttgtgtgacttttgcttctcggttgcatccaaatgatgtccgcatgttttgcaacaacttggttggggcgtgcaatgatatgggcatgcaaataaatgggagaccttgtgttgatgttgggcaagcacgcccagataacttagaagctgcactcagaaatactcatagacaatctgcacaaatgcttgcccaacaaggcgtgactagacagcttgatttactaattgttgtattaccagatgcaaatgcaagtgtcttttatggtaggataaagcgtctttgtgaaactgaacttggtttagtaactcaatgttgtcaaccaaagaatgtttttaaaggtggccgacaatatctccaaaacctggctcttaaaattaatgttaaggttggtggccgtaatacagttctcgaagatgctttaaataggagaatacatttgttaacagatttacctacaattatctttggagctgatgttacccacccagctccaggggaagatgcatccccgtctattgcagcggttgttgcatcaatggattggccacaagttgcaaagtacaggtgcttggtgtcttctcaaggtcatagggaagagatcataactgatcttttcacacaagtgaaggatccacaaaagggacttattaacggtggaatgatcagggaactactcgtgtcattctataaggcaaacgggagccgcaaaccaagcaggataattttctatcgagatggtgtcagtgaggggcagtttagccaggtcttgctttatgaagtggatgcaattcgaaaggcgtgtgccagcttggaagagggctaccttcctccaattacattcattgtggtgcaaaagcgccatcacacacggcttttccctgaagatcatcatgcacacggacagatggatcgaagtggaaacattttgccaggaactgttgttgacacgaagatatgccatccaagtgaattcgacttctacctttgtagccactctggcatacagggaacgagccggccagcacactaccatgttctgtttgacgaaaacaaattcactgccgatgcactgcaaacgttgacctacaaactgtgctacacgtatgcgcgatgcactcgatcagtctctatagttcccccggcgtactacgcacacctggcggccttccgtgcgcgccactacatggacgatgacctctccgaccaggggtcgtcttcagtggcgagttctcgcatgaaagatggcgctgttccggtgaagcagctgccgaaagtgatggagagcgtcaaacagttcatgttctactgctgaaggtggcctttgcaggaaggaccttcatcgacacttttgttgccatgaaatgaaacgagtaattctgggttggtgtaattatggtgaagtaaccctgaagggtgggccgcacgacctccaaatcatattttgggtctggcgagtcttctatccaaaactcgtcagaaaacgccttttatttttggtggacttcgtataagtccaaggcattgcctgtgattttggggtttcttttaggttgcaaccttgttttgtttttgaaattttctgctttgaattgatgcattatatatgaagaaatgagcctctcacgctagctccagcaagtgacccaagtatgac

SEQ ID NO: 25114 - DNA, 1446 bp, Zea Mays
ggcctcggcgcaacggcccttcccgcgcgactgcacttgcacacgcggcggagaaatgaaagcgccagcggctagtggataagctaagctctccctctcgctgagccggctgttgctctccccacaaccccgcgcgcgggggagcgataaaccctagtcttcgccgtcgtcgcaggaggacccgcgatgtcgcacttcgggaggcaccacggccgacgacctcttcccgctcttcgagcgctacggcaaggtcgtcgacgtcttcatcccgagggaccggaggaccggggactcgaggggtttcgcgttcgtgcggtacaagtacgccgacgaggcgcagaaggctatagatcggctcgatggccgtgatgtggatgggagaaacatcatggtgcagtttgcaaagtacggccccaatgctgagccaatccgcaaaggaagggttaaagagggggttgagaaatcacaagacagatcaagaagccgcagtccaaggccaaggcacagagatagagatcatagaagccaaagtcgcagcaggagcagagaaaggcatgtccgtgatagagacaggggctatcgtcgtcggagcagaagtagaagccgaagtcttagttcaagccctgacaacagaagtcatcatagagcaagagatgatgataagcgcaagagcatgagtaagagcaggagcaggagcaggagcacaagtagaagccgctcatactatagtgcttcacctgcccggcacagtgctagccctcgcaagagcccaccgccacagaggagccccactcctgcaaagcatgccaatggaaaagtagcacctctgtcacgctgtgtttctccattaccgaagcgtgcaacctcccgcagcccaggcagtgatggcaagaaaacagccttctcacggagtcacgggattgcagaaccttgagaaggttgattgagcacaatggaagtagcagtctgcaatcaaccgcgatccaagttatctgttcgtgagatgggttgctgtttactggtagaacggtattgcacgggaccaactatggtggatgatgtcttgctgtcattggtgttgatatggcaatggtgcagctgatgtgacgatgcagatgccgatgctgctgacagtgaccatcttgtttgcacaatgatcccttacaagttatgttggttcttatccccccttctcgcagatgcttttgcatcagtgctagttggaacatggtgttgaggggttaattatgacgggcatgggtcctgtttatcatgtggtggtgttgagtgactccttttgctatctgtggccctagctttattcattatttgaagcaaccattaataaaatccatgaactcaattattaatttgttagccgaaacgctatatacaggtgacgttgtagtcgtaagcatgtagcaatgtattgactttttggtgatt

SEQ ID NO: 25115 - DNA, 384 bp, Zea Mays
accggaattcgtgcacgcggaggtggtcgaccacagcacttggcggacagacggcggcgctagctccacggcgagaaattgcagcgtcgctggtccgcaatcacccacggaaagagcacgcgcaccacccgaaacacccaggcccaaacccgagaccccgccggtgctggtaacccgagtcaacggcggcggcgatgaacctgtttcgcggcgcggccaggtggtaacgcggatggcacagaccaaggctaggtaggtgggggaggtgaagaagggcgtagaggttccgatttaattcccagggactcggcacgggtgggaggaagccatccacgcccaccggcaatggcggcgagtccagcgcgaggtaggcgaggtccgcgc

SEQ ID NO: 25116 - DNA, 2194 bp, Zea Mays
acgatccatccgtctcgcccgcgcgctccgcagccacaagcgcaaaggcagagcacacagttctgtgtgcttggcagtgcccaccacccgacgacgtccccgtcgtccaccgggccaggacgcggacggctcgcggtctcgcccggccggcccggcccttccgatccctcgcgccacgcccatctataaatacatagctgcgcgctgcggagctgagagcaggcaaacaccgagcgcagctagcatcatcgtcctgagctgcttgcatctcccagcggccaatcgagctgatagcctatccatcatatggctgcctctaccacgtcgaggacgaactcgcgggtgaactactcgaacgagatccacgacctttccaccgtgcagggcggctccgcggccgccgccgccgccgccttgttctacccggacagcaaatccatcgccgacatcttcccgccgcaccttgggaagaaggtgatctcggaggtggtggcgacgttcctgctggtgttcgtgacctgcggggcggcgtccatctacggcgaggacaacgcgcgcatctcgcagctggggcagtcggtggcgggcggcctcatcgtcaccgtcatgatctacgccaccggccacatctccggcgcgcacatgaaccccgccgtcacgctctccttcgcgtgcttccgccatttcccctggatccaggtgcccttctactgggcggcgcagttcacgggggccatgtgcgcggcgttcgtgctgaaggcggtgctccagcccatcgccgtgatcggcaccaccacgccgtcggggccgcactggcacgcgctcgccatcgagatcgtcgtcaccttcaacatgatgttcgtcacctgcgccgtcgccaccgactccagggcggtgggtgagttggccgggttagcagtcggttccgcggtttgcattacgtccatcttcgctgggtaatatgagcaccaacaaccacgaatcacgccacgtcacactaacctaattacgacgaccctcattagcaaggacgacattactgtagcactgatcgcgacgagttaattcaaacatggtagactttcgacaaagggctactagctagctagctagctagtactagtagagtagtggtgtcacactgaagacatcgtacgtctgcatagagaggtcctcgcgcggtagctaggacgaaagcaagcgcgcgaagcgactttataagctgaaatgacgttgttcttcggtatatatgacccagcggcatttttctcctttttttttaaagaaaaaggctttacaactatccatatagaattttaaaaattctctgaccctagtactagtgttgatagaatacatgcatggaacaaacccgggattgctggctctagcagtctagctaggcggatcactgcagactgcacacacatgcatgcactgagcagccactcacacacacacacgtgtacgtttaagctaattaagacgtacgtgtgggggaaacgagtggcatttgcaggcccgtgtccggcggatcgatgaacccggcgaggacgctggcgcccgccgtggccagcaacgtcttcacgggcctctggatctacttcctcggccccgtcgtcggcacgctctccggagcctgggtctacacctacatccgcttcgaggaggcccccgcagccgccaagcccgacacccagaggctctcctccttcaagctccgacgcatgcagagccagtccgccctcgccgccgacgagttcgacaccgtctgacgcccgcccgcccgcccgcccgaagagatcgagtactactgtgtgtgctccctcgctctgttcaagatctcaggtgggagagagctatagctagctgcgcgcgcgcgtgtgtgctggtaggtacatagtccgtgtacgcgtacctacctacgtgtttgtgttttttgtgtcccgtcggccgtcgcctacaccacgtagcagcggatcggagcagtgtcacatgtttttatgtatcttcggctttgtgccacgtcagagttgcaaaggttaattgatgcagccgattatgcttgcccgtgttggtttttgtctattgtacttgatatacatgttctttttgtcatgtacacaacttcgaccatctaatgtgttcttttgagagatctctaaggggttaaataaaaaaatcaagggacgtc

SEQ ID NO: 25117 - DNA, 205 bp, Zea Mays
tttagaaatgtccaccaatagagacgatatctgccagaggaacacataaggttccatgtgtgcaaattgctttttctgatgacactgtactatctgagtctgttgagcgagtagtagatatgcaacttcatccaaacagaatcagatgcaccatcttgggtaaaacacacagaaagaggtttaccaacaagtggttacaggaaat

SEQ ID NO: 25118 - DNA, 1589 bp, Zea Mays
  misc_feature (1589)..(1589): n is a, c, g, or t
tagatcaccacaagggcagacgcgcaacgcctcccccctgtctgtgtgtctcgactagcttcccgagctgcactgctctgtttcgctgactgctgcagctgacgagccgagctgagctcagcctgctcccacgacgtacacgcaggctcaccacaccacaccacaccacaggccagccatggtggcgatcacggcgccgagctcgatcgagcagatcccgctgatgcggtgccccagggccaatgcggtgcagcaggcgggcgcggccgtcccgtgcgtggacctgtcggcgccgggcgcgggcgcggcggtggccgacgcgtgccgcagcgtgggcttcttcagggcgacgaaccacggcgtgccggcgcgcgtggccgacgcgctggaggcccgcgcgatggccttcttcgcgctgcccgcgcaggagaagctggacatgtccggcgccgcccggcccctggggtacggcagcaagagcatcggcgccaacggcgacgtcgggtggctggagtacctcctcctgtccgtcagcgccaacaccgtgaagatctcgtcgctgccgccctcgctccgggcggcattggaggagtacacggcggcgttgagggaggtgtgcgggcggggtgctggagctgatagcggaggggctgggcgtggagcggtccctgctgcgcgcgatggtggtggggcgggaaggcagcgacgaggtggtgcgggtgaaccactacccgccctgcccgctgctgccgccggtggactgcggcgtgacggggttcggggagcacacggacccgcagatcatctccgtgctctggtccaaccgcactgcgggcctgcagatcaagctccgggacggcaggtgggtccccgtgccccccacaccggaatccctcttcgtcaacgtcggagactcgctgcaggttctgacgaacgggcggttaaggagcgtgaagcaccgggtggtggcgccggcgccgcggatcgcgccgctgccgcaggtgatgcgggacggggagcagagcctgtaccgggagttcacgtgggccgagtacaagcgcgccatgtacaagacccgcctcgccgaccaccgcctcgggcccttcgagctgcgcgccagcaccaacggcggcaacaggcccggcgagcccgcggcgggcagcgcggacccggcgcactgcagcggcggcagcgcctgcggcatgccgcagccgcagcaggtggcgcgggtgcactagactacgctggctttggcttggacatggttagcagtgccaaggctagctcgcctcctaggctgagctgctgctgctccctggtccatgccccatggagccgaagtgcacctggctctctatctcgctcctccgatccgtcgcttttgtttaacccatatcgggtaactgaaatgtagcagtaatatccggtgggctggccggtccacgacaggaagcctgtgacctgcctgctgcttctggctgcaggctctctgtgcgccgccagagactgaccgctgccctgcagcagcctgcatgcgtgtactacatggccgtccttgtaaaaacctccctccctcccttcccgtagtn

SEQ ID NO: 25119 - DNA, 835 bp, Zea Mays
gctgcagggatgctgcgtgttcttgcaagaggaagcagttcatacgaacatagtatgtttatgactgcttgggggaagtagtcagcgaagttccagacatcggtgcatctgatgttattgctgatgataagcttggcaaagggaagcagaaaccatataagcaatgaagaggccgtgcgaggggttgtgtgagaggctgccgcagtggactgtggaacttggcggaggttgtcacaactcatgaacatttcgtcgagaaccaatctagcaagctagccggcctagaagtggagatagctgatgaggtctccggtgcaactgaagcaaaagaggttactacaccaatgagcagtgccagggcttttccctaagaaacattgacatgaatgtagatccaactgatgaagaggatgagattacagtgccacccccaagccccagtcatcaggtccagcaactaagttagctgcagccagtttaggactaactgctccagcgactagttccattgcaggcattgcaggactatctgtcccactttctgggtgcttgggaactgcctgacatgaacgatatggagatgtgccatgtccagtttgctttgtcaaaaaaaaaatattggagaggatggggattttgacaatcaagacttgttccacctctatagcttcagaggggataagtaggatagctccagtttgttttgtcagccttgcggctgaactgtggaaagctgagcaccgtggtgttcgatgttcttagcaggttctccttatgggttagccaatttcaactgtgtcttgaagcctgaatgtacctttcatttcaattgctc

SEQ ID NO: 25120 - DNA, 1191 bp, Zea Mays
gtccgcgaacgtcgccgtccgggacggagagcctcgctcgcaacccacccctcctctctcggcgactcggttctccctcccgcgggacgccaccggaactgactgccgctgctggggcctggccgttctctcatggtcatggagacgccttcgcaggatcgtcgtattggagcaattgatgggtcagatataagagcatctatggagactgcctttcgtcgtaggaagttatttgcatcccaaaatgtgttggcagctacaaatttttattttcattctaccagaggacaattggacaccaaaggccaaagccacggaggacagcacgataacaagcaaataaccatacgctaatgatagagaagagaaatgatttctgagagaatgtgggcagattgttaaaaccaccgcgacaactaaaatatgtagtgctttatgtaatagtgaactagcaatggcatggactttgccctgcttgttttctttatgtgatatactagtgatgttgtggacaaatcttcagtattctcattgaagtaattgaccctgtttaggggagcttttggcagcttttgcttctccagaaagctcgaagctctctcaaactggatagcttctccaagctgacaaaagctgcactttgtagtaaaagcagagaagctccctcaaagcagcttcccgagctttatccagaaagcttctcttggaggcgcttttggaaaagctacagctcccccagacaaggaaatttatcttggtgttcattgtcattttttataacttacacaggagatggacccagagcaacatggggacaacatggcaggcaagggtggagctggacaggtctattggtccaacgcaatgtctagtttcgtgctcaaatatttgtccgacctagttgcgagtggaactaaaaccacgagcggcttcaagcaagctcatcttaacagctgtggtagagctttgtatgagaagctaggtgtccagtgttggggacttgttctcaaatgctaagaattaagaacaaggcaacataaaaagtgttaagtgttaaagtccttcgtccttcgaagcattatgtcccttcgggaaataatgagtttcggacgaaggtcataagagacataccttcgtaaacataacaagtaatgacgaaggattcatataaagcatgaaatataatataag

SEQ ID NO: 25121 - DNA, 2461 bp, Zea Mays
ggctataaataacccttaaacattattttataagcctcttgattacataatttgattatgaactcactaatgaaagtttttaacatgcaatacgccaccagcacagaactcaaagcatcctggatacattattgaatcgtgtgatgaacaaaagatgttagaaataaaaaattaaaaagaaaaaaaggcccatctaaaagtccattacttgagaaacccaatttccaccagaccctaacctttccattgttccagcgaacgcacacagccgccgctgtttcttcatcttcctcgcagcgccggcgctgaggctcgggctctcagcgacggcggcagcggcagcggcttcccctcccgcctctcgccagtcgcctcgcgccctcgcctccggtcctccgcacaccggtcggtgaccctgcgtgcgtgcctctctagtggctcctggttcagatggcgggctgctgacacggccgcgccgcccgcggcctgagggcagcgggagccaccagctgctgctccaccaaggcggtctcgccgctttgaggagcgcttatgcccaaagcgaagcgttagcgcttcagcgcgctgaagcgtgcgcttagtgctgttttttagaaccctgatctttttcatcattccctaccattttttgtattttcaggataatggctcatcgtggacatctagatggactgactggccaagctcctgctcttatgcgccatggttccttcgctgcaggcagcctctctagccgctcacctttgcagtcttcatccacactggagatgctggagaacaagcttgccatgcaaactacagaagtggaaaagcttatcacggagaatcagcggttagcatcaagccatgtggtcttgaggcaggacattgttgatacggagaaagagatgcaaatgatccgcacccacctaggtgaagttcagacagagactgatttgcagattagagatttgttggagagaatcagattaatggaggtagatatacatagtggtaatgtagtgaacaaggagcttcaccaaatgcatatggaggcaaagagacttattactgaaaggcagatgctaacccttgagatagaggatgtgactaaagaattacagaaactctctgcctctggggacaataaaagccttcctgaattgctttctgagctagataggctacggaaagagcatcataatttacgatctcagtttgaatttgagaaaaatacaaacgtcaagcaagttgagcagatgcggacaatggaaatgaacttgataaccatgaccaaacaagctgagaagttacgtgttgatgtggcaaatgctgaaagacgggcacaagcagctgcggctcaagcagcagcacatgcagctggtgcacaggtgacagcttcgcagcctgggacagctcaagctaccacggtttcagcagcagcagccacagactcatatgcaggtgcatataccagctacccccctgcatatcagcagggagcccaggctggggcatatcagcagggtgctcaggctggggtatatcagcagggagcccaggctggggcatatcagcagggagcccaggctggggcatatcagcaggggggccaggatggggcatatcagcagggggctcaggctggggcatatcagcagggtgctcaggctggggcatatcagcagggagcccaggctggggcatatcagcagggggcccagtctggggcatatcagcagggggcccaggctggggcatatcagcagggagcccaggatggggcatatcagcagggagcccaggatggggcatatcagcagggtgctcaggctggagcatacaactatgcttatgatgctggcacggcttatgcatatgcaggttactctggctatccagttgcaggctacgcgcaaagtgcagtgcccaactattcctatgctgcacctccgcagccaacaagcagcggtgcagctacgaacgccgcaggaggccagtatggggcagttggtagtgctggatatcctactgggcaagttcagccgagcagtggcactgcaaatgcagcgcaagcacctcctcctccaccaccaccggcagcaccatatccccccagcacatatgaccaaaccagaggagcccagagataaaatctgggatgtaaaccagatggatgtttgccatgcacatttgttgagcagacaaatatggtgaaatctgggatgtaaaaccagatggctgtctgtgcctccatcccattgactagggcgtattttcaccaatattgtgcctccagtgcaatttcttctgtgttatatatcaccaccatttgttgagcaccgtagaaatgagttccagacggccgggacagcaacaccacatgtgtctttacatcaccaccatttatccacagcgcgtaatgtaatggcatcaacatcaatatatatggttcctggct

SEQ ID NO: 25122 - DNA, 8956 bp, Zea Mays
gcaaccaggccgcagggcgcaaggctcaagcctcaagccaacaaccgaatagagagagcagaggacgcactacaaggccgcacagacggagcagagcagctagaggagagaggcggcgtcgcggcgaggtggaagagagagagagagagagagtggtgaaggtgcgtgggttaaaaagaggaaacaaaaaagaaaacgagcgaggcagaaaacacaagcaaagagacgacagcaaaaataggaggccggaggcgggcgaggaacgtgaataaaatatcattcggagaaacaagagaggccggggaatcgcgtcggaattccggcgaatcggcgggatccggccgggatctgcgcgccggatgaggggtcggcaccatgaaatggtccacattactcagtaaggtcgtcttcgccggcggccagcagcagcagccgccacctccgccgtcgccgccgccggagtctccgttccacggccagcaggcggtccaggacctcgccaccccgaggctcagctccgcctccaccggcggggacgagggcggcttcgacgcggcggccgggagctcgccctctgccgctgcgtcctctgccagggggagaaatgaattggagtcggactttaggagattatgggaagaatttcgctcttccagctctgaaaaggagaaagaaagggccttaaatttggctgtagatgtcttctgtaggctagtgaagcagtattctagtgtagctcaattagttacaaagttagtagaaggacatattttttcttttgttattggaagagcttttgttactgatgtggagaaactaagaatccacagcaaaggaagaccgctgcgtgtggctgatgttattggcttcttttcggataccacagagcttggtatatgtccaggatcaaatttgttgtacgcagtcgaagtgcttgtgactgagacaaatgataggcaacctctgttggactctggtattttgtgctgccttatatatatcctcaattctctattgagccccaatgagaactccacagataccttgcctgttcaccaagaaggatccagaaatgagaaaaacaaaaatttggatcctatgcaatcacgacggcttgagattgagggaagtgtaatacatattatgaaagcactggcgagccatcaatctgctgcaccaagtttaattgaagatgatgccttacaagttcttttccacatggttgcaaatggttcactatctgtgttgtcacagttcagggatggtattgttccccttcacacaattcagctccatcgccatgcaatgcaggtccttggtcttcttcttgcaaatgacaatgggacttctgcaaaatacatcaggaagcaccagctgattaaagtacttcttatggctgtgaaagatttcaatcctcaaagcggtgatgctgcttacactatgggcattgtggatttattactggaatgtgttgagctgtcttacaggcctgagtctggggccataaggctcagggaagacatacataatgctcatggttaccagttccttgttcagtttgctcttacactttgtagcttacacaaaaatcagactctccaatcctcatccaagttagcatccgaagcggatgcatctgttccttctcacagattagaacaagatatattctcatgtgacctttcacctcagttgtctaggttgcttgatgttcttgtaaatttgtcacaaattggcccctcagaaaatggtggtgttagtagccctaaggccttgaggggttatcatcttcttgcactttttcttcataggagaatgtcactatttgatatgcaatctcttgatatcttctttcgtattgctgcctgtgaggcttcctttcctgagccacagaaatcaaagataaatcgaacagcaggctatgcgtctggaatgtccccagaggccagccttgatgatctcaccttacccaggtttgccgatgatatgtcttctgggggatcacatggggatctagatgacttttcagctcaaaaggattcatttagccacttgtctgagctggagaatgctgacttagctggtgagacttctgaattcatagtcttgtcaaatgctgatatggttgaacacattcttttggactggactatatgggttgctgctcctatatcagtgcaaataactcttcttgggtttcttgagaggatggtgtccatgcattggttcagaaatcacaaccttacaatgctgcggcgaattaatcttgttcaacatcttcttgttacgttacaacgtggtgatgttgaaattcccgtgttggagaagctagttgtgcttctaggtgtcatcctggaggatggttttctagcttctgagctggagcttgttgtaagattcataataatgacatttgatcctccagagcttacaccgaaccgccagattgtgcgggaggctatgggaaagcatgttattgtgaggaacatgttattggaaatgcttattgatctacaagtaaccataaatgctgaagagttgctggagcaatggcataaagttgtttcatccagattggtcacatatttccttgatgaagcggtacatccaactagtatgagatggatcacgactcttttaggagtttgccttacgtcatcaactacatttgcattgaagttccgtacaagtggaggttttcaaggattgaatcatgtgcttccaagctttcacgattctccagaaatatactatatattgttctgtttggtgtttgggaagcctgtttatcctcgagtgccagaggtccgcatgcttgatttccatgctctcatgcctagcgatggaaactatggagaattgaagtttgtggatctcttggatactataattgcaatggcaaaagctacatttgattccttgattatgaaatctatgcttgcacatgagaataacaatctttcacatcttaatggcaccttggtcgcggatcttgttgaggcgacatcggacatgggaggtgatcttcaaggagaagctctgatgcataagacatacgcagcaaggttaatgggtggtgaagcagcagcacctgctgttgctacttcaatattgaggttcatggttgatctggcaaagatgtgcccaccattctctgccgtttgcaggcggcatgatttcctagagagctgcattgatctctatttctcttgtgtgagatccgattttgccctgaggatggcaaaagatcttacaactgttgcaactggcgagatgaatgaacatgatgatgataatggaagtttaaaggatgccctttcaagtttaccacatgatcaggatcaatctaccaaaacattgagtgccacaagttttcctcaggagcagaaaagttccagttcagaaagtactggcatgccaaacccttttgaaactgctgaagccaaagcagatgattcttcgaatcaggagttcagcaataaaattttaaatggagaagcaaatcaaatatttaataatgctcgtgatcaagggcggatcacagcttccggtgcaaatggcatttctgaattccaccatgtaactgattcacccaactcagttgctatgaataatgttggatctcctgttttatccgagaggtcaacccacagagcagctagtacccctactgcatctccaatggccccattcacatcttggcctggcagtgcaggatcgtatactgatggtagacacctgacagcttctccatccatggcttcatctatatctgggatagacctggactcgtcccctgatctgaggacaaatattcagggaccatctgccgcaaatacccttttcccaatcaattccaagcttttgcttgacatagatgatttaggttatgggggtggcccatgctctgcaggagctacagctgttctagattttgttgctcaaattcttgctgacactatctcagatcagcttaaagcagcactctttattgagaacattttggagtccgtgcctttgtttgttgatattgactctgctctagtttttcaaggcttgtgtctaagcagattgatgaacttccttgaaagaaagctcttgcttgatgatgaagaagatgggaagaaacttgacaagagccgctggtcggtcaatttggacccactttgctggatgattgttgatcgtgtgtacatgggctgctttccaaccccactcagggtactacaaacactagaattcttaatgtcaatgttacagcttgctagtaaagatggccgtgttgaagatgccgtgcctccagggaaaggtattttgtccattgctcgaggaagcaggcaacttgatccatacatccacgcgatattgaagaacacaaaccgaatgataatgtactgtttcctcccaatattccttaaaagtatgggggaagatgatctacttgcaaatcttgcattcctgacggaaactgggaggagtttagcttctaaacgttatcaggaagatttttctattgatatttgtacagttcttcagctactagttgccaacaagagattggtgctctgcccaagcaatgttgatacagatctaatgtgttgtttctgcataaatttaatgtcacttctccatgacaagagagtaactgctcaaaacttggcagttgatttacttaaatacttggtagtgcatcgtcgtcaatctcttgaggaccttctagtttgcaagcctaaccaaggacaacaactggacatcctgcatggaggacttgataaattggtcactggaagtacatcaacgttttttgaatggctgcaaagttctcagcaaacaataagtaaagtgttggaccagtgtgctttaataatgtgggttcaatatattaccggctcagcaaaatttcctggcgtgagaataaaaggaatggaggtcaggcgcaagaaagagatgggacggaaatttcgcgaatctgcaaaagtagatgccaggcactgggagcagataaatgagcggcggtataatcttgatttggttcgtgatgtgatgtctacagagctaagagcaattcgtcaagacaaatacggttggatattgcacggagaaagtgagtggcaaagccagctccaagaacttgtccatgagagaggtatttttcctatgcggcaaccatccacagaacctgagtggcagctgtgtggtgttgaaggaccatatagaatgaggaagaaacttgagcactccaaatttaagatagatactattcagaatgttctaaccagcaaccttggatcaaatggtggtaagattatcaataaagaggatggagaattgttgttgacatctgggtcagacacaatgtcaggcttgaatcttttgacctatgacactgagcagagggatcttgatgctgtcgagttttcgtcattcaaagatgatgatgacatattcaaaggaggaagcacaatttcaggtccaattggctggactgatgataaaagcagcgttaatgagcagagccttcattctgcgacggaatttggagcaaaatcaagttccctttcttttcacatgactgagagtcaccagggtaaatctgaacttagttcaccaaggagggcaccttcagtcaaaggtactgatgcaagaacctcagaggataaatcagaaaaggagttgcttgacaatggtgagtatcttatcaggccttatctggagccctatgagaaaataaggcataaatacaactgtgaacgggttgctggtcttgataagcacgatggaatatttttaattggagaactttgcttatacattattgagaacttctacattgatgattccaattgcatttgcgaaaagggcagtgaagatgagctctctgtcattgatcaagctttaggtgtgaacaaggatataatgggaggcagtgaatctcagttaaaatcacctaccacttggggtgggacagcaaaggtcttgcttggtggcagatcatgggcatataatggaggtgcttggggtaaggagaagctttgcaacagtagcaacctgcctcatccatggcatatgtggaagcttgatagtgtccatgagttgttgaaacgtgattaccagctccgccctgttgcaattgaaattttcagcatggatggttgcaatgagcttctagttttccacaaaaaggagagagaggaagttttcaaaaatttgattgccatgaatctcccacggaatagcatgttggacacaaccatatcagcatcctctaaacaggagagtggtgaggggagccgtctttttaaagtcatggcaaaatcattttctaaaagatggcaaagtggagaaattacgaacttccaatatctcatgcatctaaatacacttgctggtcgagggtatagtgatctcacacagtacccagtatttccatgggttctcgcagattatgagagcgatgttttagatctgaggaatccacagacatttcgcaggcttgataaacccatgggatgccaaacggaggaaggtgaagaggaattctgcaagagatatgatagctgggatgaccctgatgtaccaaagttccattatggctctcattattcaagtgctggaattgtccttttctatctcttaaggttgcctccttttagcacagaaaatcagaaattgcagggtggacaatttgaccatgcagaccggttattcaacagtgtgaaggatacatgggtaagtgctgcaggcaaaagtaacacatcagatgtgaaagaactaattcctgagttctattatttgcctgaatttttggagaaccgttttaatctggatctgggcgagaaacaatcaggagagaaggttggtgatgttgttttaccaccttgggctaaaggcagcgccagagagttcatcaggaagcatcgggaagcactggaatcggattatgtatctgagaatctgcatcattggattgatcttatttttggatataagcagagaggaaagctgaagatgccgtcaatgtcttctatcactacacatatgaaggcaatgttgacatagacgcagtatcagatcctaccatgaaggcttcaatactagcacaaatcaaccattttggtcagacccccaaacagttattccagaaaccacatccacagaggcggactgacaggaaagtccctcctcatcctctacggtactgtgcctatctaacacagcaggagattcgcaagacagcatcttcggtgtcccagattgtctcctacaatgataagatcctaattgctgcagttaactgcttgctcaagccgctaacttataatgaatacatttcctggggattccctgaccgaagcttgagaatattaacatatgatcaggatagacttttgtctactcatgaaaaccttcatggtggtagtcaaattcagtgcactggagtgagccatgatggcaacattctcatcactggtggtgatgatggagttgttgcagtgtggagatttgtgaaggatggcatccgccgtctcctgagaatggagaaggctttgtgtgctcacacaggaaagataacttgcgtctctgtcagccaaccttactcattaattgtctcaggctctgatgactgttctgttatcttatgggacctgacaagcctagtctttgtgaagcagctaccaaggttcccggcatcagtatccgcgctacatgtgaacagcctcactggtgagattctgactggtgctggtgttctttttgctgtttggagcatcaatggggactgccttgctgtggtgaacacctcccagcttccttctgacctcatcttgtctgtgacaagcgcgacacactcagactggcaggacacaaactggtacgtgacaggccatcaaagcggcgcggttaaggtatggaagatgttgcactgctcgtctgatgaagcagtaaatagcaagagcaaatcacctgcggtatcgtctggtgggcttagcctgaacggccaagcaccagagtataggctacttctgcagaaggtgctcaagtcacacaaacaccctgtcactgccctttgtataccaccggacttgaagcagcttctgagtggggatggcagcggtcacttgctctcatggtcattgaaagacgacagtttcaagggttcatagctcagagaaatatagggattcagctgcacatatagagaaacactggttaaatcttaccactgatttcttcctcgtccagaactgagcattggcgtgcattgacaaaagagctcggatcagcaagcttctacatggtatatgaaatgttcccttgatgtcccatgcctgggccatacagcagtccgggcaggagagagaatacaacagacacaattggaaggatgaagtggacgtggatgcgctgctgcgctgacatcataatcttatactgtgaattatgagatggttgtaccttctcttgtttttttgaggagaaaaggattcatgtgggctgtaggtgccattgtttgtaaagtctatacagggtaattttggtggtgccggttgaggtggctgatggtgtagtgtctcgatgttttgttcggggttgtgggagcaaggaaagaggtattagtttcattttctccccccacctctggaggctagtttgggagccacaaaaccgaaagtgattggatggactaaaagcttctacatattcaaaattgaataagaacgagattttaatcacttcaatcctcttcgattttgtggcttccaaactagccccagaagtgttgattctttgactgggtgtaatttgagcacccttgtgttcagtaagtctatttgcgtatacatgcaagagttttgctgaacaaagcgacgagccccttccatggttcgattggaagtgaagtgtagtgtcgcagatattttctccgccctaaattataagtagtttgattttt

SEQ ID NO: 25123 - DNA, 2482 bp, Zea Mays
cttatcctcgacgccgcgcgccacgacgcagcacgcccaagaaaccccgtgtcctcacaaaaaccctgcctgccggagatggccagcggcgaccttctcctccgcgcccacgccggcgccccggtcctagcgagggccttctcctgccgcctcctagtcccggcgaggcgccgcagcggactaatctcacctctggccgcttccaaggtcggcatcgccgacgtcgttgggcgggtcaggtcgggcggcgccgaccagaagaggcgacgcagggatgcgaaggagggatttgggttctccggggtggccacgaggagagaacttatcgacgacgagaaggtggagcaggacgaggaagatgaagctctcaagttgggagtggagaagaatggtggcgagacgggaggtgtggatggctcgtacctcagtgagacacggtttgatcaatgtgctatttcccctttatcgatgaaagccgtcaaagatgctggatatgaaaggatgactgaggtgcaggaggcaactctgcccataattcttcaaggcaaggatgttcttgcaaaggcaaagacaggaactgggaaaacagttgcctttttgcttccagcgattgaggttctctccactctacctcatcagcggggtcagttacggccacctataaatttgctggtgatgtgccctactagggagcttgcaaaccaagtggctgttgaggccaggaagcttctcaggtatcatcgcacgttgggtgtgcaggttgtaattggtggcacaagattaactcaagagcaacgaagcatgcaagctaacccatgtcagattcttgttgctacaccaggaaggcttaaggatcatcttgagaacacacctgggttttctaccaggctcaagggtgtgaaggttcttgttcttgatgaagctgaccgcctgttggatatgggatttagaagagatattgagaaaataattgcttcaattcctagagaacggcaaacactgttattttctgctactgttccagaagaggtccgccaaatttctcatgtggcaatgaagaaagattataggttcattaacactgttaaagagggtgatgaggagacacatgcacaggtgagccagatgtacatggttgcaccactagacttgcatttttctatcctatatgatgtattgaagaaacatgtcgcagaagatgcagactacaaagttattatattctgtactactgcaatggtcaccaaacttgtggctgaagttctctcccagctgaaactgaatataagagagattcattccagaaagtcgcagtctgcaagaactaaggtctcagacgaattcaggaaatcaaaaggtttgatactggtcagttcagacgtatctgcccggggcgttgactatcctgatgtcactcttgtaatacaggttggagttcctgcagatagagagcagtacatacatagactaggccggaccggacggaaaggcaaggaagggcaaggactcctactattggcaccttgggaaaaatattttcttggtgctgttaaggatttgtcaatagcagagtctgctgtaccaccagttgattcaagtgttgagacagaaaaatgcggtcagaaaagtagagatgaagagcaaagaatgtgcctatcaagcatggttagggtactacaactcgaacaagaccattggtcgagataagtccagacttgttcaccttgcagaagagttcagccaaagcatgggtcttgcagttcctccagccataccgagaaacattcttcgcaagatgggccttaacaatgtccctgggcttcgttcatcataatctcgatgtcacgatatcaagcagaagacgtgtgctacagcacagtacatgcatttgaccagccataatgctgttaacttcgtaaacaacacttgttgctggacttaagtaccgcagttaacataagcagattggtttgctgatgacctgaagtttctacaagcatcctcatttccaacccgtacacaagtcctcgggtgtagccagaatatgcattcattttgaagccaaattttgttcggtcgagacatcaacacttcacagagaatgctcaaacagacaaggtgattctacgtatacaaggatttgtcaaaagcatagtgatgtgtatgaagtattaaaagttcgggaagaaaaatgcgctttcctgatttatcgtcatataggggaatgcatgtgttcagtttcaaattctgacgttgtttgtacgcgaatgaaaagaaaggtatagggttgtgtaggggcaacaactactatacaaacaaccgttagatataaacatgcaagcaggtcactcggtctgttagatctagatccaatcatatgttatactaggtgagtgcccgtgcgttgcaacgggatcatataataccaataaaaatatatatataacacggaatgataggagcgttaataagtagtagagat

SEQ ID NO: 25124 - DNA, 1205 bp, Zea Mays
gtttactgcccccgaattcctcccccaccggcccaccgtgcccacagcgggagcaccatgcccccgcctctgtgaccaccacgcctcgcccacacccgtcgcgcgatgcacgccgccgatttcgccccgtcccccagatgcgtgtgctgccccaaccccaccccgtcgtccctgcctctgtgaccccccacacacactcgtcgcatgatgcagcgccggtccacgctgcctccaaccccacctgccacctcgcgtgcccccacgcgatgacccgagtggccgacgccggatgcttcgtttaccttgacggcggacgcgaggggattaagcatgtttggcgcttcgtcctcgctcctctccctcatcccacgcacttgtagatggcaccgtccctcgccgagttcgtcgttgacctatgccatgtctccgccgccgcactcagggaccacggcgccgacccgccggagccggactaccttgtccgctccctccacaccgacatcactgcgcttccctgcctcccatggtgcaggtgcccgggggcgtgtggacaaggcgcggggggagggtcacccgagtgggcgacgtcggatgctttgtttgcctcgacggtggacgcaagggactcgtgcacgtctcccagatgctcggtcgacgccgcgctggcgccaccttcacgctcgggcaggtgtccttcaaggtcgtcttggtggacggcgccaagctagggctgtcaatggtagacgtcgatcaggatatagggaagggtcttcagtcgatgcgacgtcggcaccctgtggaggaggacgcgctgagggcaaatccgccaactaatcgctccagactcaccgggaggaggatggcggcagatcgatgagcgcacgcagctcgccaggaactgcagacatgccaaatggaaatactcaggattatcaagctggacattcttctattcatgggccactgcctcatttctgctagaatcctttgcatagtatgcaagcacctcaaatacaagtgccctattaagagttcatcggtaacaatgtggtaaatgtggtgcatggtttaaatccttctgccataggtcttcctttacatccaagaatgttggctctcccattcaatgttgaacacacttttgggcatctaatgcacccagctctgatgaactaagctaacaatggggctttaagaattcttcc

SEQ ID NO: 25125 - DNA, 258 bp, Zea Mays
gtcggattatatcctagggtccgatgatacacaataacatctgctatactactatgtaagaactagttgtttgactacaatgagtatatgatctgatgcccactgccaagccagtatggaatacaccaaaacctctctagtcacttaatagagatcgtcgaacccatccaccttggtacgatggtgccaatgttcatcgtatctgatgaccccgtagaagaaaccctagcacaaacaatggtgtcatatggtttgatg

SEQ ID NO: 25126 - DNA, 3486 bp, Zea Mays
cactttcaccagctctcactcttatccacccgcgcgcccaccgccgcgcgcagcaccgcgccgcccacccgcggccaccccagcgccccaaatgccgctccaaccctagcctctcgccatgcctttcgatctcgggcggccatgggaaactgatgccgctcgccggtcgccgtcgcgcgggaggacgtcagctcctcgcacttccccgcatccacctcgtcatggagctctgcgagggcggcgagttcttcgaccgcatcgtcgcgcgggggcactacaccgagcgcgccgccaccaatgtcactcgcaccatcgtcgaggtcgtccatttctgccatcggcacgacgtcatccaccgtgacctcaagccggagaacttccttttcgccaataagaaggagaactcgccgccgcgcagcgcccctctcgatatgccgccctgcttcctcctctcctcttgatccatctgccatcccatccccgctctgccagttgcccctcgcttcctcttcggctcttcatccccctcgatccgtcgcccgtgcttcctcctcactatgtcccgtcccctctccatcttgtcgccctgcctccccgcgtctgcgtctgcgcctgccttcggcgtccagagccatatccgcgttggcctccacctacgcacccgcctctagccataagagctcctcccgtgtctgcctttagagatctgctacctccacatcggtgtctagggctcctccattgcctagatctactagagaggcagatgaaagtatttccgtctcatcaactgtgctgaagaggaggaaaacacctcacttgttgaagggagcagtggagacccggaggaagatcatttggagtctgcagctactaatcttcagcctggcagtgacacttgcattgcaagggaagagttgccagatcagaaggatctggtgaaactgcaagctgttatccgtggacatctagaggcggcccatgcctcacggccaaagcagatcagttaggaggataaaagaagacactaccttggcacatgcctgttgtcacaatggacaaaagaagattagtgttgtgtgagatttttttcattcctttgatctattgcatgctatttgtaccctaatcgacaaaatagatgagactcaattcaggagcaaatcaccagtcctgttcacagtccaattcactatggctaaaatatcaaacttatgctccttgaggtttgttttttccttatcttcctttaatatctgatgactgatggactggtgagttcatgatctgcttcatgcttttccttttatatatggtcactacctcactggttagttcatggtgctttttgtctacttctttgcccaaaaaaaatcccggggcgaatttcagcatgcttttcctgcttccgctgtgcaaattcacaggatgcgtgggaaatgtgttcttgtttcgtcgggtggtgttcttgccattcgttttagctcaacacaaaacaaatgcttcttgttcttcaggtcgccctgtgtttctttctcgccagtttgggccatggattctggtgtgcatttgttcaatatatcttagtatcttatttaacaatcagtacttctctgatgctcaagagatcaatttactcaaagtagcaaactgtatcatagttgtatactttatcaaacgaggaacctgatgcttgtagtataagcctcattttgttccaaacaagacaggcttcggatacaatcacctggaaatcaatcagtaaacttttgctattcagttttttaaataaaaaatttaggccttacgactttcctcgcaatgtgttcacatgtagattaccttattgcattgcctacttttgtccgttgtgtaaaccaatcttttatcatttatcaaatgattttgctcttaacattaacaaattatcgtttggtcatatgcaactaatgacatcacattaccaagattctggggacccatcgctaccttgtgtcaacagtagactgaccagatcagggaaacgctcggcggcgaagctaaagcagagcttgcgctacacgcgctgcgagcagtttctgtctaaagggcaaggtctgatctcatatttgagctccccgtggcactgctcgcccggccagccaccatcccggtcttgcgctcggcggcgtgcatggtgtgctcgtccctgacagtggctagcttctgttttcttaattgatggctagcttctgttttcttaattgatgatttgttttttccttttctgatcgtcaatagggaagagacgacgataacatggacactgttttctaaatggatcagtatttttggtatatacacatgcttttactagtagaggagtatttattttcatttgtagcagccaaggaacttgtgcattccttatgaatcatgagaagaccatgaagatgcacacaaatttgcttgacttctgaccagtaataattagcgaaagaaagaaaatccagaaccatgaatcagcttgatagcagtaacaaatttgcttgacttctgacgagtaagaaattggcagcaagttcagcaggggccagactaataaatcagcttgatagcatccttgcagcggtgccttggactttggcggttagaagagttgcggctctggataaactcgaagctgacctatccaagttcgacgacgggcccttcttcctaggccaattcagcttggcggatgtagcgtacattacgattctggaaagggttcagatatactattcccatcttaggaactacgacatcgccgaaggcaggcccaacctccaggaattcatcgaggagatgaacaagattgaagcgtatgcgcagaccaagaacgatcctctgttcttgcttgatcttgccaagaaccatcttaagattgcctgaagatgtgacaaagcagcattagtccgttgatcggtggaagaccactcgtcagtgttgagttgaatgtttgatcaataaaatacggcatgttgttgctgactttggacttgcaaagttcactactgataataacacccatgtttcaacaagagtaatgggtacttttgggtatttggcacctgagtatgcagcatctggcaagctcacagaaaaatccgatgtattttctttcggagtcatgcttcttgagcttattactgggcggcgaccaattgacacaacccaattggcactgcttgttataagcacatatgtacttccatttgcatgttgtataatactaataccaattgcaaaattatagttattttttctacccttgttagttaataagcatatttgtggtcaataggttgtattcttattcttgtaaccgtgttaattaatgttatggacttgtagtcttgtattaccttgtgaatatatctgtccctgcctgccatgtgaacgtgcttagcctggaatttgtgatatgtacatatatccatgtgtttgaaatctgtattgtatgtg

SEQ ID NO: 25127 - DNA, 764 bp, Zea Mays
atattttgcttaatctgctggacatggttccatgtattttcggtgtcaaattgactgggaaagatctcatggagtttatttggcagcttgacgagactgatggatcgtcagatatgcccccagcagttctccgtattctgaacttcaaagcatgcagaggagcgatcatgtttggcgaccccttgctaccatctgagtgctgtctgattattgaagaactgaaagcaacatctctatgcttccagtgtgctcatggtcgcccaaccactgtccccatcttgaacatcgcatccctccacgatgagctggcgaggctccaaatgctgagtggaaggaaggcagagacctggcacggcttggggcaccatgagcccagccttgagcgtgctcacatgcgcctcgaacgactgagaaagctacgccgaggcctgtagccatagtggtttgaatcagataaaagggtgtgtgtttcgtatagtttgtagagaagcgagtgaaatctcagtgtgctctataattgtacatatactagatattcattcatgacaaagaggtaaaacggcgcccatcaccgtcacctgacaggcgagcggggttttccacggcatgttgtaaagtttgtacattctggttgccatgaaaatctatgtaaaattcaattcaaccgtgccaatgtgattagctgaagttgagatgggtgtgatacattcgagcaagtttaagcaggctttatgatgttgctatgtcacataactgactagaaa

SEQ ID NO: 25128 - DNA, 2375 bp, Zea Mays
aaaccaccgtcgtcgttgctgatggggaggccggtggtcaccatgaccgcagggccggtgctggggagggcagggccacaacggggcctgtgggtccgacgaagaaggcctactggggacgttgttactgttgaatccccccgttccccaggccaggccacatggtgatgtgactgatctaggggttgtaggagggccaggcgggagcgggtgcctgttcggcttgggtgcgctgcgtctagagggaagcatcgccaaggttgaccatggagcagattagagctgctagggggcctggcggctatgctaggaaggaaaacgaaaacgatagggaaaatctaggtctctagatacataccatgacagaatgagctgccagatattggattaatggtagaggtacaagggggtataatatataggcatggattgtctaaggtttatagaaagcatgcaatcaatagaaatccttgcataatctaaagcacccaatcaatgaagatctttgtgtaatctatgatttgttctcgaaagcgtaggagagctacacatcatatatataaagaagaaaaaggtctaaaataggccaatacaaaaaactggaaaaaaaacagtggccaagaccagctcatggcggccgaaagcaacaaaacataaaaacatccaacattacagctaggagagactaaatccgcggcaactaccataaacatcaaggcacatatggcagacatgatcaatctaattacatagtctaacactactatgtactaattattgctcaaaagataacatacgatatacacatttttgttcttttcttctcatctttgtttgtttgggattcctacggaagggcctctagctgtgttggttaggtggtccgagtagcactcctcagatcctgggttggactccccgtggaagcgaattttaggctgtggttaaaaaatgtcctcgtttgtcccatgccaaagcacaggtctaaggcccagctccggccgtggtcgttctcacatggactacggtgccgctgtgtacgcgtggggcttatggcgtagctttagcgtcgctaaagcgataaggcgagcgtggaggcataaggcgtcttgtcgccttgcctgcgagagtaagggcggcagcgcgtgtcgcatatctcccgccggcggcgcgcagggaggagagctatggagagggagaagctgctgctatcggctaagggacaatctgctgctagcagctgagaaggtgctagagatgttgacaaagaagatgatatgtttgtcctcattgctccacaaaatgctgttggaaactgcataattgatgatatgagagctatgactgatgctgctggtgatagacctgtgattcttgtaaatcctcgcctaaaggatatgcctgcatcaagtggtgttatgcaaacaatgggaagggatattaggctgaagtatgctgcatcatttgagacatgctattcattccgtcttctctactacgctggttcattctatcctattatgggagctttaaggatggcttatccaaataaatatgagatttatcgaagggttgacactctcaatggaaaagagaactatattcttatagctgaattcacgaacaagccaactcctgatgagatcaccagtgctttcaaaggacaaaaaagggaagaaaaggcatcttctggattctggggtttcttaagtggtttattttaagtcaagcgatctgctgtacggcgatgcaatcctccttgtatatttttatctgataatggatgtaatatggttcggaaaatatccgttcggatcaggattcgaagatggtgaacactggttcagatggaattttcggatatccggacttttttcggataacggatacgaatacgaatattttgttcggatatcgaattcgaatacaatatgtctgatattcgtcggatatcgaatatctggatattttctcggataaatcttctcggatatccggatatcttatctggatagctgtgtgcattttgttgattgtttgtagaaagaaattaataatacacaaatagcctcaaaaattcatgaaaatttatggaggcataccatatgtccacatataatcctccaaaatatttggaccataaaatccacaatattgtagtgtttctttcatttcactttcacttgtgtgaattacatgagaaatcactctaattatccaagttcactttatcattttcatatggagacttgaggttatattcttatagaatgtttattagttttggtaacttatttgcattttaatgattttatacaaaataaattaataacacgcatataggctaaaaattcatgttttttacaaaaaaaaaa

SEQ ID NO: 25129 - DNA, 1348 bp, Zea Mays
gtttcaggtctgggactaaggtgccaggccgcggaggaggcaccaccgccggcgcggggtaagacttcgctcaaggtgatgatttcgggagctcccgcctcgggaaaaggaacgcaatgccgcatgatcgtcgagaagtatggtttagttcacatatcaactggtgatcttctgcgagctgaagtatcttctggcacagaaattggcaagaaagcaaaagaatacatggacaatggaaagcttgtgccggaccaagttgtgacagatatggtggtatcacgactgtcacaaccggatatacaagaaagagggtggcttcttgatggttacccaaggagcttcagtcaagcacaacaccttgaaaatttgaaaataagaccgaatatattcattgtgctagaagttcctgatgatgttctaatcgacagatgtgttggaagacggctggatcctgtgactggcaagatttaccatttaaaaaactaccccccggagaatgaggagatttctgcccgacttattacacgttctgatgacacatttgagaaggttaaatcacgtcttgatacgtacaagcaaaattctgaagctattcttcctacatactctgatttgcttaataaggttcttgtgtattcctagtcatcaccagagcaacccaaagtatagattgaaagtaattctatgttgctatattgtgcaagaatatagattgatggaaactgcccagccgaagttgtttttcaggcgatagatttcctgttacagaagatctgtgagaacacttcagcgagcaagttgaccaaaacaaatggaaaacgaccagattctgcggatacaggttcaaaaaatgagtggcgtggaattccaacgaggttgaataacattccacattctagggaaattagggaatacttctacaacgacgtgttaaaagctacaaaacttgctattgaagataaaaagactcggttgcagatagatatcaatattcctgaacttaaccctgaaatggatgtttaccgcataggaaccctcatggaacttgtaagagaactttctctatcctttgcagatgatgggaaacgtgtcaaggtctgtgttcaaggctccatggggcaaggtgcatttgctggcatcccacttcaactggcaggaaccagaaaaattttggaattcatggactggggtgactatggggcgaagggcaccttcattaatattggagcagtaggtgtgtatgtgttgcccacttattctatacttcagacaatatcaattatcaaatgaaacgaagcatcgtagctttaggttgaatcatcatgcttgtgtacctaggtcgcctcca

SEQ ID NO: 25130 - DNA, 732 bp, Zea Mays
tttcgattcaactgaaccggtttaatttgatggggttgtagtacctttttttttcttatcacaagagacagagcatgcatgcggcatgcctccatggccgtggctttttttcctgctttacacactgccgcctccttatctcctagatcttcacacccatggttttttttccctattttgttctgtggtcttttcagtcatgctggctgggactgctaccgatgctgctgctggtcatgagaagctagctattggccttgtagtaccggagtaaatgattggcgctactagttttttcccctatccccaaatttttcatcttgcagtggtacccttcgccttgggagctgaaagcatggggagatgctgccggccggccggccagtacactgcaacactgagaggtcatggacgaggacgactcatggtggtgggtggggtcgatcaagttcttgttgttgggtcgaaaatggagcacggagacgagccatatttagcaaggaaggtagtgtcctcacttcgccccggccccctgcgtgccatgccagctgataagcttgcatctaggtttaagtccatacccaagattgggcaaggtggcctatcatgaaaatgatgatgatggccgcaaaggtcaataagtactatgaaaggagaaaagcataatacgaaggcacgatgcaaaggtataagctaaggctagtacagacaagcaagatgtgtagaataagc

SEQ ID NO: 25131 - DNA, 3972 bp, Zea Mays
tggttagccaccataagtgctgatcagggatgtcctgttggagctccaggttatcaacgaggttccagagctgtaaatattccacaagcacttgcactgacaaggcaccccttaaatcagagacccaactatggttttgcaacccttgtgccactgttctttgcctcttagcccttttgggcatcaacaggaacaaattgggggcccagtccgaaacagattttccttgcagccatcggtccaagatttagttgattctccattgcccacaacagtaacaacaacaatgtcaaacaaagcttgcgcatgaggaggtagtttgaaggggaggccagcccaagggcgagatgcatccgtcttctgcaaccacaaccaacgaatacgcaaggccccactgaacagctccatgttaagtatacctaggcggctaggcctccaaacagcaaaggtcgttgaacacactcccaggaaacaagacagctacccccatttgctttttcctgccctttccacatgaacccacttcttttatcgatttatttgagcacccatttagggaggtgctagcatagagtacatagggatgaaagataaaaccactctcatcatcacagggcggcctgcttgactcatgagcgatgttttctagcccgacaatcggacaatttattggataccttatcgacaaggggctgcaactcggcatttgttggttttcgaattgacaggggaagtcccaggtaattacatggaaactcctttaactcacaaggcaacaactcagagataatgaccagctcttcatccccacactggataggtgtgactgaacttttggaaatgtttgtcttgaggcctgtagaatgccccgaaatatcaaggagccgagtgaccataaggagatcagattttagtggccggaggaacaatactacgccatccgcataaaaagaaatgcgatgtttggcctgctgatgagcaatgggctgcaagagatgctcttgagttgcaaaagtaaaaatggaattcaggacttccatgaccagaataaatagcatgggtgatagggggttcccttgatgaaggcctcgatggtgggagatgcaattcctaggttcaccattgattaaaattctggtagaggatgtgaacaacaacaaactgatcagattacaccatctgcgaccaaaaccaaggatgctggagatttttctcagcgccactgtcaccacggcgtactctggtgcgctgcgggccttcccgcgtgccgcaccagcgcctgcgacttgtgcggcttgtcttctatgatgtcctcgacagcttcctcgaccacagcaaccctacgcatggcacctcgacgacggctcgacgcccttgcacttagctacctcaacattatcggcacaaagggctatcatctgcatgggctactccagtagcagcattcgcaccggcattctgactatggggggatatctccattattctccagtctgtccgttcgttttgctaacgctacgagtgcggggggatgttagagtatattaggtatgttagagtatattaggcaactcctgatatggttggtttaggattgattgtaatctcgagataaccttccttatatctaggataacctttcttatctctagaatacgcttcttgccctccaagtcatgtactcctatatattctccctagaggctcaatgcaatacatcccacacattataccaattctctcattccttcaacaaggacagttgtactgatccaatatatcaacaaaataaaagatcacaagtatagcaataaatttggctcgaactaccctggacttgctccaatttttttgttaacaaaataaagaatcacaaacaaattgaccacctcctacactgcacatgaagctacaacacagaaaactacagcagcacatcagactgccatgaacccatgtccgaccactgaaacagaatgcaacgaatccgtagcaggcagagaactaacctgtagctccacagcgttgtgttaccccgaacgggacaatgggagcagaagcggtgtcttgactcacgtaccgatagctccaagatcttcaagaaacaatggaaatctgggtgaaaccctagcgtatcgagaaattactgttggggaagggaatgcaggcggaggaggattgacctccagagacggatggtgaagcgatgacagtggaggagcaaggtggcagtggtcggggtgagttgcctatgtgatttctagagatcgacatggagcagtggatttcgggagcaacgtgatcgccgagcgctgggagatgtgtcaccgaccgtcgggaaaggcgcgccgctagtcaccagccactgggtatgcgctgaccacaggatactagggtgacagcggcagcagccttgcgattcacaagctgcatgagcatgaacaagccgagcgctaggactaggagatgtgtcacctaccataggaaaaggtgcgccgctagtcaccagccactgggtatgcgctgaccacgggatactagggtgacagtggcagcagccttgcgactcacatgccgtgtgagcatgaacaagtcgacgggggttagggaagccctcccgcctcttgactcgcagttttcttccgcgtggaaaaggaatggaagcgagtttcgatccctgagtttgtgggcttccgtccaaatggcacaaaaaattggcccatgggagattggcaccgggtttcttggcccagggaatttgcgggccccccagggatctgggctcccaaagtagccctaaggcacatgcgtatctactaacgctgtaccggtcgtcttgtttcttcttctctacaaaattaagtcacagcttctacagctaaggatctgcgatcagcatgctcgtgctttatgtggccattctgccgaaatcctgtttcaggagcatgaggtctcaaatgcaattgatgaactcttgtcaaagattcccgctggtctaactgaggatgggcttcaacttgtgaaaactagggtgctggagagtgccgggggcttcttcgatacaacatttacttccagcaaagtcaaagtatataaatgccctgagctggttgcggagcttcatatgccaatgggttgtcgagttcgccaatggatctttagaaataccacatctgtggcaatcttttgtatcctgtttgcagcactgctttggatactgtggatcatttacaagaggcggacattatctaatagagctgagcaaatatacgagcaggtatgtgaaatccttgaagataatgctgtaaacgccgagattgacaactccaattctgaggtttgggtggttacctcctggctcagggatcacctgttggttcctcaagagagaaagaatgctttcctgtggaagaaggtcgaagaactcatacgagaagattctcgaatagatcaatatccaaaggtgattaaaggggagtcgaaagttgtttacgagtggcaagcaagtggctcgcttagtgcaaagattaaaaaggtgcaaggtgcaagggccaagtcaaggactggtgtaggtgtcataaaatttggggaagaaatgagtgcttcctccttgggtgaggtgagggagcagggctcgtgtgatttaacacgcgaagaaagaagtaaggacaaggtcacgtgcagtgattaggttatcaatcaatctatctacatgtatgcctctggtctttagaggaaccagcacgtgagcttggcaagagttactgatcttttgtaaattttgatgataggagccgagccgtcacagtgtgttgttgctgttacagttgagtttgttggcatgtcatgagattgtctggtacagtttcaacaactgatgaatgaacatggtcactggaagatgctgctgacggagcagtcgtcgtgcacacgccagatggtctcaccgaggaggttagcgacggagagcac

SEQ ID NO: 25132 - DNA, 779 bp, Zea Mays
tttttgcataatattattgatgtatagttcatattttcatgaagttgagggttcctattttggaaagttctataagcaaacagctgatatggatccagtccagcgtgctgccttccttgaggaagatgatgagatggaggatgcacattctattgctgcatctgctggtgacactaatgtgaactttacgagcttgatggactaaaatcacaacccacaccccatggcccatcatcacctgaaaccttgttgcaggatgctgcagaagtcatcaaagctagaattgcggagaaccctaactcgatgaacttcaatgtcatggccctttcaaagaagtgaagtatactgtgatgggtggatttcatttggcagaatacgggtcccttttcttttcagttctgctgagtactgcaccgagtggaaggtttgcacagggaaacaaagatagggaaaaatgttgactcgatgtattatcgtgccttcttgatggatagagaaatggtggttcacgatttcacctttttcctgcttacttatagctattcaccatgctaagtttcatgatggtttcatgcacatttaataatgtgttatatcatcattttagacgacatggcatagtatttaagataaataagtttcatagataaaattagttttatagggatgaaatcatgtcaactcgtttaaaggtattgaaaatcgtgtgtaatctccattgagattgatttgttttatctttacatattttactttttctattgattatttagttgcag

SEQ ID NO: 25133 - DNA, 1794 bp, Zea Mays
gtcccgtactcgtccaaattctcctcgtctcgtctcccatgtgacccatccaaccgccctctcctctcttcctcttcctcgcaccacctccaccaccaccctcctctcttctcgcctccaccaccaaaaggggtgagaggcacggggaccgcccgcctcgctcgctggcctgcacactggattcggcgccgcggcggtagttgcagcggcggcctggcagggagatgtcttcacgctcggggtactacaagctgaaggttcaatttaccatttatcctctgatcatcgatttgatgcaagtaaagaggaggttgatcgtgtaacaaaatgtggaggtgatgttggaaggctaaatgttgttggtggcgctgagattggtcctcttaggtgttggcctggaggtttgtgcctatctaggtcaataggagatcaagatgttggtgaatttattgttccagttcctcttgtgaagcaagtaaagctgtctactgcgggaggccgacttattattgcaagtgatggtgtttgggatgcattatctccagaagtagcttttaactgttcacgtgaacttcctccagtgcctgcagctgagcaaatcgttaaagtaacttgcttttgatgtgcagcctaaatcctgaatgatacagttatttacatatctgaaaccttctgcagactgctgtgcaatcaaaaggactgagggatgataccacctgtattgttgttgatataatagcagagaaaaccaacccttccatgccacttcctagaaggcaaccgggaattggtgtcttcaaaaatatgtttggcaagaaaaaatcatcggattcatcatcacattcccatgcagatagagaatatatggatccagatatcttggaggaaatatttgaggatgggtgtgcgcttctttctagacggctggattctgaataccctgttcgaaatatgttcaaactcttcatatgtgccgtttgtcaaatagagttaaagccaaaccaagggatatctgtacatgaagattcatcagaacctgggagcttgcgtcgctgggatggtccattcctttgccagagctgtcaggaaaagaaagaagcaatggagggaaagcgtcgttcacgaggttcatcaagaaacagtgggtcaagtgaatagctgccgtgtgtagagtgatcaggtaattactgatcaacaacaccccagcaccaccattttgcagcatttcttctgttgtgacactttcttgatcacatgtaatgtctgggagttctgatctagaactagattgaagtattgaaattgccattgtagaggtggctgctgcttatagctctcatcccaagcgaggagcatgtcttgtcctcagcaaggttcttgctgaggaatgtaggcagctctgctcagcccttgaccttgatggcacatacaggtttaaagattaacatgccaaaatgatatggcttgtctattctaaggtcaactgttgcaacacaaattactcttggtatagacttctgacaaatagcttggcactgtttctgaattaggcctaggtgcttacatcaattttctcttgttgaatccggctttaattcatgactagagactttagagtattatcagtccttgttgaggttcagcctttgctgacaccaatgtaattaacatctaaaaatattctttgaatcagcttgtgattcatcagcaagacgttagttgtcatgtacaatgtacaaaatcttgctaacaggacagtgattgtgtttgtagttcataggttgcgaagaggat

SEQ ID NO: 25134 - DNA, 832 bp, Zea Mays
cgattttcttgccttatgaatacccccagcatgagtatcggagtttcctgtagtgctgctgttgatggagtcaatggatgcctcacctacagtacatgtcgttcaagaaactactactatcagtattctcataccactaacttgcaaatttcaccagtagaccagatgcctttgcctcggaaattaaagaaatcaattcagcgaaacgcttactttttaacccagaagaggaagctcgtaccacactgttcatcagaccttagtacctcctgcagaggagtgcccaactatttatcaatcaatgttttgcaagaccaatcaaatacaaaacagggagctattcgtaaagcgcttgtcattttgaatcctaattctggattccgcagctctcgggatgttttctaccagaaagtgcaatcaacattgaaggcttcaagatggaagtcattgaaacagcatatgccgggcatgcaaaggttctttcttctactgttgacctcaaaaaattccctgatggtattatatgtgttggtggcgatgggatcgtcaatgaggttttgaatggattacttagtagagacgattttgacgtggcaattcgatttcccattgggataatacctgctggttctgataattcattggtgtggactgttcttggcatcagggatcctgtttctgcggcaatcgctttagctaagggggatttcacaccaatagatgtgtttgccgtaaagtggatccaagctggagtgactcattttggtttgacagcttcctactatggtttcgtagctgatgtaataaaggaagggcttaatatgggtttgaa

SEQ ID NO: 25135 - DNA, 499 bp, Zea Mays
ttgatttcttgcatgcactacacaccaccaccaccacttgtcgaccttgctcctctccaagctcgccttctgactctgaaatcaacacaggcgatgggtgaagccatgaagtgtgtgacgaaagccatgtggcagatgactagacagatgaatcttcttgccttgtagaagataatgcgagagttttgagatgcaaaacgagaagatggagatggttagtgaactgatgaacgatgccttcgatgatgccttggagggtgacgaggaggaaaagatggaatagaactcaaattttggtgaccgcacaagtgtggagacttgaattcatatatatttagttaggctcaatgttaacgcaaacaatcgatgatcaagtttttcaattagtattttagtctggattttaaagtacacttatgtatgagttatttgataatgcttatttattataaattgaatgatacttatttatattatattaattacaatgttattaaat

SEQ ID NO: 25136 - DNA, 1285 bp, Zea Mays
atcacaggttcaacaatattcaacattaaatggcaatatcatgccttcaaatcacacaaaacatagcattgattctacccgtgccctaatagagtttttacccatcgggagcaaattcattttatatgagacataaatctggacccacatgtcatatattagcgggttccctatcgggtagcgggtatggggcaacagagaacatacccacgcccaccatacccgatgggcataacaaatgacccaataaaatacccatgggtatcaaaatccgacatacccgtgccctaatagggtttttacctatcgggtttcgggtacccattgccatccctaatctcagcccgcccgcccgccccactctggagataaggctctccgcctccgcctcgcagcctcccttctatcctctccggcacgagccgtccagttcagttcacctcggtccgggaccgcgactacaccgacggcggcgcgtccgagcccagccgacgccgagccaatggtgactccagcgacattctccctccgccccagcgcgccccccgcgccgcctcgtgccgggctgccccgcgctcgggcctgtttcgcgcccgccatccgcacctccccttccgtcgccttttcctaccagcctcggcgcttcagtggcatccgccgcgccgtggccgtcgactccgagcagggctcccccgagtctccagagcaggagaagaagcccaagacgtactacttcctggtggcaaacgccaagttcatgctggacgaggaggagcatttccaggagcaactcgccgagaagctgcgcaactacgccgagcgcgacaaggagcaggacttctggctcgtcgtggagcccaagttcctcgacaggttccccaacatcaccaagcgcctcaagcgccccgccgtcgcgcttgtctccaccgacggcaactggatcacattcatgaagttaaggctagacagggtcttacaagaccagttcgacgcagaatcagttgaagaggcattggcttctaaccctgttgagttgaaatttgagaagcctgagaaatggacagctccgtaccctaaatatgggtttggatggtgggaacccttcttgcctccaaagttcagcaatggtacggcatagagataagcagcaatccctatgaggcatgttataacacgaggcactactacttgctcagtctaccagaccagaataaagacctctgtgccacgaagcacgaacaaatggacaatgccaatcacaataattctcaagactacaagcaga

SEQ ID NO: 25137 - DNA, 709 bp, Zea Mays
ggttcttcgtctttgctcgctcgtttctaacttagcctgtcgccaccaagtcgatcgtcgcgccaccgtgcacagcgctgccagcacgcctgtcgttctcctccttgtgtcgtactcctcccttcactcgtttctaatccataccaccggtgccaagcatgtcgggagcgccaccgtgcatagcgctgccagcacgcctgttgttctcctccctgtgtcgtactcctcccttcactcatttctaattcataccatcggcaccaagcatgtcgggagcgccaccgtgctccacccagtgccgctgtggtcctttgcaggcttctcgagatggtgtcagccttcggttgttaaagtttgtatcaagaggcataaaggttcaaatccatatcaccaggagattctgtgcggcgagaatgcggcagaaaagttgctggtgaaggtgtgccacatgggaggatgatgatgctgaagaaaaatgagtcgaagcttgacaggtgatccgaagctgactgatgtcaaaagctgaagaccttgctggaaaaattttagagaaaaatcttgtaatatcattgtaaaaaatatttgtaatttaagaatcagatactaattctgtaatttgtgtatactttgtaatatatctttacctttttgtccatgtattgaactgctttgctgtggacgaaactagcattttttgagtcgaaggcga

SEQ ID NO: 25138 - DNA, 1289 bp, Zea Mays
gtccgtccacgtgtgcttggccctgtgcgctgttctcctggtggacggaggcgggcggtgcaacgtctgcgccgcgcccgagtgagcggtgcacggtgcttcagttgccgccccgcgaagctttaaaagcaaaccgagagcgcacgtagagacatcccagcagcaggtagcagcagcgcatgactttgtatctgcaactcgtttcgactagcctgcacgccgggagccctcgtctcgcccttctccacctccgaagatcctgcgagttcaacccgcgagtgagcatgtcgtcctactccccgccgccgccgccgccgcgggaccagtccatggacaccgaggcacccaacgcgcccatcaccagggagcggaggctcaaccccgatctgcaggagcagctccccaagccatatctcgcgagagctctcgaggcggtggacccgagccacccgcaggggaccaaggggcgcgacccccgcggcatgagcgtgcttcagcagcacgccgccttcttcgaccgcaatggcgacggcgtcatctacccctgggagacgtttcaaggactgcgagcgataggatgtggactcactgtatcattcgcgttctccatactgatcaacctcttcctcagttatcccactcagccggttggccgctgccggtgaatggctcttactctacagcttggcgaaagacaaggatggcctcttgcagcgcgaaactgtccgtggtctatttgatgggagcctatttgagcgactggaagacgacaacaacaagaagaaatcgtcctgaatgctgagcagccttgtacagctcagggaagtgctgtcagtacaaaactaccagatataccattggtcgtgttcaaataacaaatgcttcggctttgttcatccgtcattaactatgagtgctgggatttgtttgtatgtgtgtcgtgctaccagtttcttctcctgtcgtctcacacaggtactgtattacgcatgtgttttctagtgtccgtgcggaagctgtattataagctgaaatatgtgcgtttgaaatttactagttaggcctagtttgggtactcttgattgaagtggtttggagggattgaagagtgtttaaatcctcaatagatcaaaaactctcccaatacatctcaatccacttcaatctgtctcattcctagagtatccaaaccaagccttaagggtgcgcgccctgcgcgcgtgtattgtatgcttaaaatatattgacagatgtgtgcgtttgaaatttactagccctttaggtttcac

SEQ ID NO: 25139 - DNA, 1107 bp, Zea Mays
taaaaaggtaaaacaaattttaatttgggacggagggagtatatattttgaaacgagatacctctgcttatattgaaatgagatacctctgcttatattaaaacgagataccatcttaataaattgtattatttattgagtctatgtggctgtatctagggtgcttccagaagatgattctcccaatttatagtactggactactggagctcgctggctatattattaatgtttgggcatgaatatgtcgcagcatgtaatgaagcaagtaaatttttgcttgttcagttttatgatccgctgcttgtgtacttactctattcaggagaagtacgagggagctatggcttcacttgctcaaatggagaacagagcagttatggcagaaactatgttagaggcaaccattcagtaccaatctagtcagcagaaagcacagcttccatcgccctctccttctccaaggaccccaactcgagatgcatcaccaggccaagggaaccaagattcatcgcaggagttccagcctagaagaataagcttgcttgccccattttcttccctcggatggcgagacaagaacaagggcaagcagaacggctctgatgagtcaacaaacggtaagctcaataatagcaccgatcaaggggttgaaacacccaaaaaggacgacgaaaagaaggccgactcgccaaaagagagtgaacagattgtccgaacaccggaaagagacaatgaactgagactagggacacccaagatggatagtgaggtaccaagtgtggaaatggcggcaaacagtacgaatgggctggaggaccagttggaggagataaaattggattgatatcctttggctggtcgctaagccgcaacataaggtgccattaaattatgtattggtgtatccatcttccacctctattcttttaggtttatagattcttgtataacttgaggagagagaatgaataaactatgtttgccctcttataggtctgttgatcgcctgtaagctatcataagtacacatgaaaaagacgtaccaaatagaagattaccacgaaagcaatttttggaacagatcgcgccctaccgttgtcctgg

SEQ ID NO: 25140 - DNA, 2377 bp, Zea Mays
ccaccacattctcccccctcctctcttcttctccaatccatctctctgtttgtctcctatcctttcctctctcccacttatcgacggacttcctgcgaggaacacagagggccatccaggcccagcagcaacaggtccaccagctggatgaaacgcgagagccggcgggcagcagctacgaagcgtcagagatcgccggccgcttcaacgaggccatcgatcccaaggccggcatcgacgctgcggcgcccatcgtcgattccgtcaagggcgccgtcagcaaattcggagctgtaggggttgttgattggagagagaaacgcaagcatgtccaggatgagctcgacaaggtgcgggaagaggtcacggagtaccagaagagagcacaggaggcggaggccggcagagcgcaagctctgcgggagctgggaaccgtcgtgaccgctgccgacgagctgggcctgggcctggagatggcgcgggccgagcaagcccaggcgcggcggcaggtggagctcgccgagctgcagctcgaggaggtgcggcgcggcgcaaaggcggagctcgacaccgtcagggaacgccgcacggccgcgctcgctgacctgcgggcggcgcgagcggaggtggagtcgctggagaaggtgcgcgcgcgcgccgcggccgaagcaggcgcggcggtggcgcgggagcgggaggccgccgcggcgtcgcgggaggctgggaaggccgtcgaggacctcaccgccgagctcgtcgcgctgaaaggggagctggagtcctcgcacgccgcccatgtcgcggcggagcagaagaggatgggcctggcggtcgcgtgggaggaagacaaggcgcggtggcagatggagctggaggaagccgagcaggaggccaaggggctgcgagagaagctcgtggttgcctgcgacgtcgagacgaaggcggtggcggcttcccagctcatggcgagcctaaaagctgagctgttcgcttacgccgtcgagagaacaacactgggacaggaggaggaggcgacagcgatcagcgaccggttgatgctggagaagaccaagaaagagctcgacgacgtgaaagcgagcgtcgagatggccaagcacgaggccaagtgcctgcgcgtcgccgccgcctcgatgcgcgatgagctggagaaggagaaggcagggctcaccgcgctgcggcggaaggaaagggaaaggcaagggctctcgtcagcgtccatcccttacctcgaggaggagttgaggtgggtgaccgccgagctcgccgaggcacgagcgaagaggggcagcgacgagagcgagatggccgagcgtgtagccgaggcacggcgagaagcggaggaagccaaggcgaaggcccggtcggctcgagaaaaggtcgccagggccaaggaagttgcgggcgtggccaaggccgccgtcgccgccatggaggcgcggctggaggcggtgacgcgggagatactcgccgcgaacaagtcggccgagaccgccacggcctcggccggcgcgctgctgcaagaaagcaagccgtcgagcgataaggacgtggaagcaggcgtgaccgtgacgctgacggtgcaggagtacgccgagctgagccggagagcgcaggagacagaggaggccgccggcatgcgggtggtcgaggcggtgaagctgatcaaggaggccaaggacgcggaggtgaggaggctggagaaggtggcgcggctggacaagcagaccgagcagaggcggctggcgctggaggccgcgacgctggaggccgaggaggcggagttcgacaagctgtcagcggagcgggagctgaggcagtggcgcgccgagcacgagcagcggcgcgcgcccggcgacaccgactcgccccgcccgggcctcgccgagatctccgtgctccacgaccagggcaccggcgaggggcgcgggaacccgcacatagtcagcccgagggcaggctacatgccgcggacggagctggtgatgacgggatcggcggcggatgcggatgcggatgcggacgcgaggcagaggaagaccttcttcccgcggattgtcatgttcttcgcgcgaaagagaactcagtcttggaagtgatgcacaacaaccggcttccttttgaaatttcttttggggcttgcttctggtacgtggctttctcggatggagcagatcaaatatgacgacacaagtgtaaaatgtgtattgatcataattttttttttcgttttcactcggagttgtgatccatgcttggaaatatggaccggcttgaatcttgatagttggtaaggtcttgttcttttgtccaatccaaaaatcatttcagctgatcaaaacttatactccctccgtct

SEQ ID NO: 25141 - DNA, 1902 bp, Zea Mays
atgctgagtgggacacaaaatagcagagtacagtagccctagctgtggttggccaatcctgacacattatcctctccacctcttcagaatccggacctcggcagagtccagtactccagtcccttgtgcatctcggcctctccactctcctttccacgcccgtccagtcctctaatctgacccctcttctccagccggccggagatggtctcgctgcgatgcacaaccgcgcaccactccctcctcggctcgccgacctgcctcgcgcgcccgcggcggcgggcgtgccccgtcgtgcgcgctgccgtcgccgtggaggccggcgcgcaggccaaggtctcactcatccgaattgggacgcgtgggagtcctcttgctcttgcacaagcccacgaaactcgagaaaaactgaaagccacacactctgagttagctgaggagagggccattgagatcgtcatcataaagaccacaggagacatgatcttggacaaaccccttgcagacattggaggcaagggtttattcaccaaggagatagatgatgcgctcttgcagggaaggattgatatcgctgttcactctatgaaagatgttccaacatatctacctgaaggcacaatattgccctgtaacctaccacgagaagatgtcagagacgcattcatatgtttgactgcaaattcgcttgcagagcttcctgctggcagtgttattggaagtgcttctctgcggagacaatctcagattctctacagatatccatcactgaaagtagttaacttcagaggaaacgttcagacacggttaaggaaactcaaggagggagatgtctctgctacattgttggcactggctggattaaggcggctaaatatggcagaaaatgcaactgctgtactatcagtggaagaaatgcttccagcagttgcccaaggtgctattggaatagcttgccgaagcaatgatgacaaaatgatggagtatctatcagcgttgaaccatgaagataccagattagctgttgcatgtgaaagagaatttttggcagttcttgatggtaactgccgaactccaattgcagcctatgcttaccgtgacaatgatgggaattgctcattccgcggtctattgtcttccccagatggatctaaagtatttgagacaacaagaagtggaccgtactcttttgacgacatggttgagatgggcaaagatgctggtcatgagctgaaggcaaaggctgggcctggcttctttgatagcttgcaatgaaaagaatgagcggccatgagcaatttcaattgtcactcttttgggtagaaacagagggcccaagtagagtgttgagaggtttgtttttgtttattctttctcctactagttctgctagagaagggtgtacctggtgtagtggtgagctgagtcatcaggtcgcgggttcgaagcatccagtctccgtatttgtgggagaaggtatctgcacagcacagctatatgttttgtcgaagaggtatctgcacagctacgttctcggaagactccagcagccagctgcgtcagcacgatcagatcagtcatgctcgtgcccatccagcagccagcagtcgagatttcagatttgttgcagcgaatatgattttaaaagtctgaaccgatttgctgcagcgaatatggtttaaaaaaccggaccgaaggcagttttgatattcgggttgttcacttcggattgaaattatagagataaaaatacagtaaaaacaaagaagctggtatggattaaagaacgaacaagttgattaatgtgatgtttactccggatctagatataaaaatgtgcatatgcatatttcccccacgttgttccaatataacattgtcatccatttttatgttttgtcg

SEQ ID NO: 25142 - DNA, 408 bp, Zea Mays
ctcaaacaacggcatctccgctatttcggcacctactccggtggagtccacctccactcctccagcgagtcaccactgggcactggccaccgccacctcggccccgctcctcacgttgtcatccgtccacactgcacccgctcctctccgtctccccaacagtttcattcctcgagggggatcgcttgtcggcggggaagcaaagcttagttcttgacgcccaacctccccgttgcctattcgcctcaggaatttgggaattatgtctctttgaggggaatcaagggacttgcttttacttgtctgggctccatgtctaagtgggagccagtcacgtttcaggaatctcttagctttgttaagaaagtaaaggttatgctgaaagtgcttgaacatgagaggcaagtt

SEQ ID NO: 25143 - DNA, 117 bp, Zea Mays
tgcttaacggcccgccaaccttggaatcggttcagccggaggtagggtccagcggccgcaagagcaccgcacatcgcgcggtgtccggtgcgcccccggcggcccttgaaaatccgg

SEQ ID NO: 25144 - DNA, 701 bp, Zea Mays
ttgaatgatactaaaatcatctagatattctagagagcaagaattgtttttcctctatttttgatgataactagcagtacaccctcctatgaaagccgttaatcaaggaacatacccccttctcctcctcggtgcttcacgttgagccaaggttaaatttagcgttttcaaggattgtcttcctattcctgagagtagtttcaagcatgccattaaggagaactacagctcaaagggcaggttcacccaagagctcaacactaaacaagttcaaagactattggcactgttcaagcctatcagcctttctaaaccagctccacaacatattgaggatattcgaaaaccaagtgattatgaagaaagaagacagttgcaacatattgaagaaagggctgcacctattaatgtccacgcacatcctcttgaagatcggtacaagatgacacggtcattacatccgccactttttgatgagcctcgacgtggtttggtgctaaatccttatcatatgcaagagcctcaacatgttcctcttaattactatcaccaagtggctactaggtctccataccatcaacctcatatggatattatgcacgaaagttcaactatgtcgacaaccatgttcaaccattgccttttgattcgtcattaggaaagccaagctcactcacttattggcttgcagttagctaaca

SEQ ID NO: 25145 - DNA, 447 bp, Zea Mays
atcaaatccctactccattcctaatcgaacgttacacctaaagcaaaatcacactaaggaaacctctcctctctgagctcagctttaactttaagcaccgattcaattcaagaggaacaaccgcccctccccctccctctcctcctccgccgctgccgttcatctcctccaggagccttggcctctccgaatccaccgatttcgatcactgtcggccggaccgcagatggtagagggcagcggagcaagcaagcaaggcgttggtgttgattgcgtcggaatggggcagcggcgggcaattgcttttccaagcgtgaggctgagagccgcgaggtttgggggcttggggccgtatcaatttcttcggggcgggggcgccacatcggatgctgacatggccggttcttgacacgtggcgcgcgctgggccgctggattgggacgtgca

SEQ ID NO: 25146 - DNA, 2396 bp, Zea Mays
agtctggtcacacccttcggatccttgttcgcttccggcttccctcgttctctgcgtccgcccctgccgggccttgtcttctcccccaaatcaatccctcgcccacggacccaaccaaatcctcctccacctcctccatctccagccccgtccctacccagctcgtgtaacctcccgatgtccgggggcggaggcggcgcaggcgcgggctcgtcgtccggcggcggcggcggaggtggagggggcggcagggagggcgactgggactgcggcagctgcggcaaccggaactacgccttccgctcgctctgcaaccgttgcaagcagccgcgcctcctcgtcgaccctaacaccccgcgcgactccaagtggctaccccgtgccggggactggatctgcaccggtaacacctcttctgccgcgctacccttcattattaccccagctctgaatcacctacacttctcatgtttctacgccgtctcttcatgtagatgcagccctcatccattccctatgtatcgcattgatagtttagtgaaactagcatttcttctcctccttgttcatcttttgtgttggttttagccttcttacttgaatctagtacgttgggtgttacaggcctggtaaatactgtagccttcttagctagacttttttctctattaatgcagagaagatgttaataaggcaagttagactcgaaaaagtgtaaataaaggaagtagaaacttcatttaaactaatagaggggagtctaaaaattattttgaccactcctccttgagcatgtgtaaataaagtagaaacttcatttgaccaccccttcagcttctatgcaagccaggatagtcatgctcttcgatctagattttttttaaaatttttttgcactgcatgttctgactcctgtcctggaagtatcttttggatgatttttgttagtgcttcaatcttgctactatctgctagaaatattttgacgattccttttgtttattttgttcatttaatgctgctatatgtagataagattagaaagaattaccaatgagtgtgctgagtaatgactagtgtgcgtggtgtctattcctctctatgggtttgtccgggatggctggtcatcgtggtggtgggtgtgcgtgtccttcggtgcgttttgctgcctgctgtgctggttggtttatgcggcaaatggatgaataggttgcagtaacaataattatgcatccagaaagaactgcaaaaagtgtggcctatccaaggaggaagcagcaatgccagcattgcaaatggcagggatggctatgccagcttatgcaacttatatcgcaagactacagagccttgctgcttctgcttctgcatataagatgaactttgggatggctgccaactcacctttgcagcagcaactacttgcaaatgcaaactggtcctatgggatggctggtagatatgggatgcagtcttctggttggccacttggcaacagcagcccaaatcagtttccaggtgttccaaaggattggcgtaatggagactggctctgcagctgtggatttcataattattcatctcgtactcagtgcaaagagtgtggtgcacctataccatcaggcattccctccacaacaatgaaagctacgacatctgatgcctcttccacattaggaactaagcggttagcctcagaggagctggcaaacgactgtgataataaaaggctaaatccaggaaatgacaattatccactttcaacagcaggtgcaaataatttgtttttgggtattgagcaaggagctggaagcagcaatggccaggctgctttttcgaaatttgactatgggagctcaatgtcattaccatctgggcagggaatgtctggtcttatcgtaaaaggggcaaaatggcgcgacggggactggttgtgcaacaactgcaacaaccacaactacgcatctcgtgcgttttgcaacaggtgcaaaactcagaaagaatctgcagttcaccctggtgtgctatagcttgcttttgctggttcatattgttggactcgtttgttgcagggtcgtgcgtatggttgtggaaaacactattttgcagctgcaatggttagagatttgaaatatgagggaaaatatgagatgagcctcatgctgttgtgcatcatcgatcagaccactataagtaggactggaaatggatgtctggagatccgaattattcgtatttgctgaaaccgttaatatggatatccgtatctttattcgatttcaatatggatgtcaaatgtatacattcgaatttgatttataatacttttctctatccgattctatatttgtattcgaaaaaaccatgaaacatcttatactatccgtattcgtgaa

SEQ ID NO: 25147 - DNA, 3052 bp, Zea Mays
ctataaatcagcccccttcctccacggtcgcgtttcacgggcgtagagagagagagagagagagagagcgcgagcgagcgaagagggcgtgagagaggagggaggccaagccgtacgcgtcgtctcctgctgtttctccccatccctttcctgcctcggcttgcaccttcaaccttacttgtaagttccatcgttttaactctagagaggctttttgctcgcgaatattttggaacgaagatgctccgccttgattttggtttagctgttgttaatctgaatcgtttggttgcgtttatcgtggatttggacgtcgagacgccgctatatgaggaattaatttgattttattgcttatgataggggttgttgtcggttggcgggttaccgttcagatctagtgtagtaaaattgcagtggtgatgggaggagaggagtgggcaagttaggttattaggtttctaggtccatgtttgtttatttttttggtgaggatggtttctggttcacctaacggttgaaagggatgcgtgctgacttggcaaaggtcgttgtgtttttgtttgtacgtacgagattttttttatatctacttggctaattttaaaacggttcaaggttcaatgccactatgccggcggtactatctgcatctcagattcgggtttggtaccatgatttttttacagatttggccaaactgcatgaagttcagtggattatgtcaattatagagtcaggcgcctgagtgaacctttacagattttatgacgtcgagagttgggtaaagttggcgcgaaatcgttgcgctatgatttatttatttatctgtagttacgctagattacacactgtcggttaatctgttcctaatttcctatcacaatacaatcgccaatgcacagttgactaccttttgttccgcgtattgctcagatgagttggctcagcagtagcatcaagaaaaaacacattgtggtcatttccaacagcccccaaacagaactctgaagcaatttttttgttttgggttgcagaaagctctgacctcaaactgaaagggacctgcgaagagttttttttgcggcagtacaatggaggtatttggcaaatctgtgattgctgagcccagcaatgtgattttcttgtccgcgatccttaacacagaagggtcaaaccctagtcacaagtgtgacaagaggtgccagagcgagcgcattttggggaacatgtaccgttgcaaactgactgaaaccactcacatctgtgacaaaaactgtaaccagaggattctatatgacaaccataactcgctctgccgagtgagtgggcagctttttccgctctctccactggagcagcaagcagtgaggggcatccgcaggaagcatgaagtggacagcagtgaaggttgctgctttaagcgcaggcgcggcgcacagctgcatccttcccccttcgagaggtcctactctgctgtgtatccaatcccgagccaggttggagatggcatggacatgagctagagctaatgagacttccttttcttcggccagccacctaatttcgttctgtctaccctttttccctacgattacaagatggaactataagagcttccttctttttagacttatatgagactccttagatgcaccgaataaatgttcatgtagtatctattctgtttcatgggaccttgttgtaactcgtgaactttgattgaacgcctattttgatttagtggtactttcagataatcattagattcttctcttttttttgtcacacttccaatttagttattttatgtgctttactttttgttcaactaatttgccttctaattttaatcctttgatgcaatttaatataattgagaggtttacatttgtccgccaatgtaagtaagtgaaggattctttggtcctgtaatccaggcacagggaactgacatgcctttgctgactgaagtttttgtacagctgttactagtgttttgcttgacaagttcctaatcaagcttgaatcatttacggtttgttcccatatagctcaattctatctgttgcttaactcttttttttacaggttatgtttctaacgcttaatgttttcctatgttcttttttgtcttaacatttgttgtatgcaggaccatccaggttctaatcgttttttgggaaatgttttgttcttttttatataactatattgctaacttaatttaatttgttgattaatttgcctttctttgtttttgcaggtgaacatctctgattccattttcatctgttgggtggcaagaaactaatcaaggagtctctctcttctcattctctgcgtggaggactgtttagctgtagctgagtggcatgctttccagaacataaattggtggaagagaagtttgatgctaccactttgcgagaaggaccgaaccaacacaataacatcaaacttagatactgcagtttaccaactttttcaatattgaagattgaagagcagcaagatcagcctcttccatatgcagtttgaagaaatcctttttaaggtctattagactagaatccttccggcaatcttgccttcaccccaagcatgctgcataccttgtaatgagtgtggtacttgacgactgttaccaaagtttttttgagggtaagactgttaccaaagtagtggatgcttttctttggcacgaagtttctttcatatccacctagtttgtctgtaaaaaaaagtgaaacaccgagaaagacgatcagactaacctaccgtttggttcacatattggtaacgtaataggtaactgataacgttaaatcatgtttgtttaagtctaactgtaatcgataccacactataaatggatatcgccttttttaatttgttactgtcggtatttgagtgtgaatcgttaccattactatttacgttacatttcgcgaaccaaacgatacctaaggtgaatgaggcaatttaaattttcttctgattttggtcgctgttcaaatctaactccaaagcaccaaaaaagcacaaaaaa

SEQ ID NO: 25148 - DNA, 884 bp, Zea Mays
gcaacacgcccgccatttcagcgttccctgtcacttttgggggatggggctcgttgggtggcggttcttgaaatgaggctgtggccgtgaccactgaaatacaagaggagattcttcgcgagatgggagtagatccaagttttggtattggttgcctaggaaaggtgaatgttgtttacaaaaatgacaaggacttgatgattaaattctatcaatttgttgccaaagaagaaatggctattgatgaagctgagcttgaacccagagaattggctgaaaaactacatgctcaacaaataatgcaagaaaagcaactgaacatgctagttgaaatgaggaaatatagccgagagagccaatctgtcatacttgggactttgcacaaagaattggaagaagctaattttgacatcaatgcatcgatcttgagcccagagcaaatgcaagagattgttcaaaagtgatatatttccaacaaatgagatcagtacctgccttgtctacctttgtggtgcttgtgtctacctttgtataaattgctaaaaatagcaagcactcctgtctatatgagaagtgtagctgttacaagtaaccctgtagaacatattgatcgtgcaaagatagttcacagggatgtaaaacattctgaattttacaaacataatactttttgtggatgctactttcttagcttgaatatggtcatgtaaaccactacagacaatactgtttacagagtgaagtttaaaatataacatgtgataggagagctgttggagacaaccttatccttttgggagttcaaatattgatgcacactagaagcaatcttgaaacaggaagaagacatgtaataaaatattcttcataaattttcttagatt

SEQ ID NO: 25149 - DNA, 1370 bp, Zea Mays
aatctcactcttcctccctcctgcctgaaaaaatcagatcccgcgcttcgcagcggagtgcgtgccaatccagcttccatctcccgcctcccccacgcccccggccccccatcatggcgtcctcgtcgcctcaactcaaggaaccgtcgtccgcggtgaagcgggcgtcgacgggcccgacggcgctgcccgagcgcaacaagaggaagacgtcgccctcgctccccgaggcctcgggtgccacacagcagccggccaagcggaagccgccgttgttccagcgcgcgtggtcccccggcgacgaggtccggatcctggaggccctcgccacgtaccgccgtgaacatggcggccgcctgccaacgccggttgagctattcggcgcgctcgatggcagcctcgagaaggaaggcgtcggagcaaaggagctcgccatcaagcagcgcagcctcaagcgccgctacgaccgggacgttatgaagaatgctccgcccgccgataaacacgaacgccgcctctacctcctctccaagcacgtatggggacgcgttccgccaaccagaccaccggttgccaaggtccgaagtgctactcaagcgaagtgcgccggcgcccaagcaagcaacgccgctgcccaagcccaagcgaagagcgccgaccgccagtccggcaaggaggcgctgaagcccaaggccaagactttggatgagatgcgcgagctgtatccttacctggttgatgaggccacgatccttgtcgaaccggcggtgctggagagagtgctcctcaacattgaagacatcgacgcccaggtgttggacaagaagatcaggaaggcgaggaagcagctcgccggtgccatcacggaatcggcaaggattaacaacatggaaatgcctacaatatttctgtttacatccagcaagcttcaaccagaaaagttaagagtggaaaatgacaataatcttttggttgatcatttggagaaaatggatgatgtggatatttgtgctaaacaacgattggcaagagtggaacatgaagtaatggagttgagacagactgtaatagcttaccaggctcaggcaaagggtataatatgtgaatcagccaagagtggtcttcaatcaattgtagctgaaaatcagactccagccaatgtactacaaaagaagacagaagtaccaaatggcttgatccataaaaagaatgcggcggttacatcaaaatattattgtgccgttccccacaatgttcctcccaataagccggcatagccattttggcgctgaagaccaaagcaacaattacttttttaccaaagtaattgttcccactagattgacaaaagtccaactccaagcaaagcg

SEQ ID NO: 25150 - DNA, 1498 bp, Zea Mays
gggctccaatcaaacagccccgcaatactggtgtattcaagtgagattggtcaagatagtccaaccattctgttcttccaagaaaatgctggcaacatcgctcaccgtttggaatttgttcgactaatgatgcagcgactacagtgcaatgtttttatgctttcttatagagggtatggtgagagtgatggttatccttctcagaaagggatcacatatgatgcacaggctgcacttgaccatctagctcagaggaatgacatcgacacaaccaggatagttatctttggaagatctttaggaggtgctgttggagcagttcttgccaaaaacaatcctgacaaggtggccactctaatactggaaaatacatttacatccatactggatatggctggtattatgcttcccttcttaagatggttcataggcgggagctcttctaaaggtccaaaacttttaaactgtgttgttcgctctccatggaatacacttgatattgttggagaggtgagcttttggtggtttgaattaactttctgtgtctctgttttgtgctttgattaccattttcttattattttggttgcagttgaacattaggatgtaggtaacatatttcttacaaaaggttggatagcatattagcatgtattagtttatgttcgctcctttcccctttggcccgtgtgtttgaaatttataagttccaacctagattgaatcgctacatagttcagcatccaaccacaggtttctaagtatttagagcctcaaaacgttgcatctgctcatcttcatcttttttttgttctttaattcgaggacttactggtgtgtgctattcctttgcctgagttcatgttcatcgcaggtcaaacaacccattctcttcctttctggattgcaagatgaactagtcccccctccacacatgaagatgttatatgacaaagcttctgatcataacagaaattgcagatttgttgattttcctagtggtatgcatatggatacctggatgtctggaggggaccgctactggaggacaatccaattgttcttggatcaatacgctcctggagtgcagaatcatgatgccagcttcaaaagtgaaattaccgaggatggcaattattctgctccattgtacctgaagcaaccgaagttgtgaatatttttcgaggatattctccaccatgctctgccgctacatttgcccctggaacttaagttatttgcccatgaaccgaatatatatcctcttgattgaatgtatgaatgatattttttttctcctttgctagtatttggaacattcctaaaaatgtggctgtatgacagcccgatagataggctgtaagctcattggctgaactatttggttttgtgattttgattgtttcctttttcgatgttaaagcatctagacctttaatatgtttggatgacacaagattattgtgattaatgtatgttttgcagaagtgttgaagtt

SEQ ID NO: 25151 - DNA, 1490 bp, Zea Mays
gcaagtgctagagagtgccaggcgacacggttcgctcggcggcggcgccatctggcagcttctgcaaaactgaagtgcccattccagccctcccgtagcgatcgacctctgaactacgcagcggaaaaatcccatcaaaaaacaaggggaaaaaacaacacagcatgaactgcttgaagaactcgcgttctgtcctctcgcgactccttcgccacaggccccacgtagcagcgccaccgccgccgacgccggcgacggcgccgcagtcaccggcttcacggtactactactacgcctcccgcgtcaagccagccgtctcccgaccgccgccgccgccccagttgccgagatctaggcactactacacatccccgcggcggcagcaggtcgtccacttcaaccgccgccgcggcgggtcccggtggtaccacgaccagcggaagctcacggcggcggtcttaatcagcggcggcggggcggtcgcgttctacttcggccatttggagaccgtgccctacaccaaccgctcccacctcgtcgtcctctcgccgaagttcgagcgccagctcggcgagtcccagtttgcccagctcaagaaggagttcgggcccaagatcctgccaccgctccaccccgacagcatccgtgtccgcctcatcgcctcggagatcgtccgcgccgtccaccgtggcatctccgtccaacagcgccacgacgccttctacggagaggacgcctcgtatgggtatggcggcatcgccgacgacctctccatcaagaaccgcgacgccgacgctgctgcagcgctgcttggtgcttcccccggcaagaacgccagtgctgccgtggccgctcagcgagatgacgagctcctggatgacaggtgggtgaccgagagtcggagccgaggtaaggcacgtggggcgcaaccgcagacgggtcacctggacggggttaactgggaggtgatcgttgtcaaagatgacctcgtcaatgcattttgcctgcctggtggcaagattgtagtcttcactggattgcttaacaacttcagggccgatgctgaggttgccactgttgttgggcatgaggttgggcatgctattgcgaggcactccgctgagcagatcactaagaacctctgggtggcaatcctgcagattgtcatcctgcagtttatttacatgccggacttgataaatacggtgtcaacactactactcaggctacccttctcacgaaggagatctgtgtatctttatattaagaagagagagagagtaaccaatagaacacacaccacaccctgattcttagattacattcgcgcctgttacaaaaggatgatcctctacacgcactggatgcaacgaaaccccaggaattgggatggccaggagggatagccctctagcaccagccatctcccaaagctctcgctcctctgcaggactctttaagactccggccaagctagggctagcccatca

SEQ ID NO: 25152 - DNA, 1849 bp, Zea Mays
gcccaggcgcccagcccgcctgccggccgatctaaacgtcctccgctttcgcctccgccaccgccgcctttctcgccttcgcgcctcctccaccgccgcctttctcgccttcgcgcctcctcgaccgcgtcgtcccgtgatatcgcctcccctggcagattcgccaatcacattcgagcttccagttggaggagatcggctacgtttcctgtaggttccaatggtgcagcttccgggctccaagaagcggcacgccgagatggccacggcggcgaccgtgaaggcggaggtggagggtttgggctgcggcgatggttctcctcacaagcatgtcaagccaatgccgcagccgccgccgcagccgccacctcccgaggacttgccctttgatgtgcttgatggacctagcccattgggtctgcgactaagaaaaagtcgatctctggtggaccttattcaatgtaagctttttcaggataaatctgcccatgaacagtttgatgggcacaacaatgtttctgatacacccatgaagaaagaggttagatctggggctccaacagctggtgaacggatgaaagcttcaaattttcctgcaaatgttttgagaattggtagttgggagtacatttctcactacgaaggtgatttggtcgcaaagtgctactttgcaaagcataagcttgtttgggaggtcctacataatggtctcaagagtaagatagaaattcagtggtcggacattattgctttgaaggcaacctgcccagagaatgaacaagaaggggtcttagatctagtgttggctcgcccgccacttttcttcaaagaaactgatcctcagccaaggaaacatacactatggcaggctgcatcagattttactgatggacaggcaagctccaaaaggagacacatcttgcggtgcccctcgagtttgttaagcaggaattttgaaaagctcattcaatgtgatcaacgtctacgtgaattgagccagcagccagctgccatattgcaaaacccaggttttgaacctaagcgatctatttttcaaaatccaaatgaatcgaaggactgccttgatattggtggcttgaagtttgaacataaagctactttgcccaagttcactgctcccctctcaacacgtgtcttttcatcactgtccaataatgttggacgaccaataaacataggatttggtgctggacattttgggggcaatgttcctgaagaatcaaagaattgcaatcaatggaatcaattgatagtgcctggattggaggcactgcaaggtgatgaaaggagtgcaggtggtcctcctttgacaactaacgatgcaatttccaaaaaagcctgggaagatcttgttcaacaccttttcagcgacacaccgagtctgccagccttagatgataataatttgacgtcaagggttgactccctttactcgttgcttgagaaagacacagctccacccgccatgcgcgaccctgaatgcagtagtgatggtggggacatcggcgcaatccaagtggattctgatggctttaaggggaggctcgacccatcgcctccaggaatttccagaaacgattctctcgatgagctgcttctgaacctccccaaaatagcttctattccacagttcttgttcaacaggacagaagattctgatgaataaagcgcgcagtcaacttgtggtcttcaaccctaggactaaagcagcaaattgtgaatatgagcaatgagtcagcgacgctaggattctattctacttcttccccgtagataattcagtagattggtgcagcaaaaacgtctgctcattatttcactagctgag

SEQ ID NO: 25153 - DNA, 2047 bp, Zea Mays
cgacaatgaccgacactgcgtgatgttacatctggttggtgggtgacgagtttgttcttaaagttgaaggttaatggcgttgggaagaccacaggtatggagtacccagagcgccctggacagccactctgtgagtactatgcaaagaatggcacatgcaaatttggttccaattgcaagtttgatcatcccagggaaagtggttttgtacctgtcgctttaaacaacagtggattccctctacgtctgggtgaaaaggaatgttcgtattacatgaaaactggacattgcaaatttggaggtacatgtaaattccatcacccagaacttggttttcttacagagacgcctggcatgtacccaccagttcaaccatcacctatttcctccccacatccatatccacatcattccaactggcaaatggggaggcctgctgttgtgccagggtcatttttaccaggcccatatccaccaatgatgcttccacctacagttatgccaatgcagggatggaacccttatgttgtaagtttctattacttgtcattttgtactttattactttaaagaaggcacttgcgtgccttatataaattaggaagatatctttgttctaaattggcatctccaatattgcggtaagtagtgagaattcagtggtaagttcataacaaaatagaggcaatgggctaaaatggaggttttataggaccacaaataattggatgtaagttagtaattccttcatgccttgaaaacacaatcttagccatgaatagaagacaccactgactgcctgatgatttttaaaaactctttttggttctcagtcacctatgaaccaaactacaccagctgggggccagcaagctgttccagcagggccatcttatggcttgtcgcaccaggagccaacctctgcagtgacttatggcagtcattatgcgcaattgtattcttcttctgggacttcaagcagcaacatacaagaatatgtgtttccagagcggcctgggcagcctgaatgtgaacattacatgaagacaggaacctgtaaatatggagcagcctgcaaatatcatcatcctcaatacttcagtggaccaaagtctaactgtatactgagccctctgggtcttcccctgcgtcctggttctcagcgatgtgcttactacgcacaccatggcttttgcaagtttgggccgacatgcaagtttgatcacccgatgggtactccaaactacagtcttccagcaccatcacttactgatgtgccagtcgctccatatcctcacactttctctgttactcctattgctccatatctgctgccccctgatccgcggccgcaatacactctagccaaggatccctctgcttatccaccacaagcgcccggaactacgtacggacctgttggggcgatatcaaaggtttatgcccgccacacgcttatccgatccccgacttctggagctgctggcatgcaagcgtcgtaatgagacaagagttgagagcactagtcccctctctgtcatgaagatagatcttgggcaaaccttctcaggatttttctgccataggtggaatggggtctcggattcttttttttttgctccaattcgacttcccatcaactgtgaataacggccgcagctgacatagaaaggtctcaataaatggaaagatagggattggcaagctcattcacttgccatttttctgtccatctctgaaacgagaggaggtaattctgactgtagtcggattcagagctccgttattatctcgtgtaacgtgcacaattgcaggggattcgaatgggaaagctgatgggttccatagctctagcccaaatcttttgtttatctcgtcatcttattacatatatgatatgatgtgtataccccgtcggaacagcaacatgtatatctatctatatatattactctaaactcatgttactgtttattgggcgtgaattattcgactgattgcccatcctagattgaatactgttagcacgaatctggttcttattagg

SEQ ID NO: 25154 - DNA, 1131 bp, Zea Mays
caggacctttttgtggcgggggggcctactcatattggtgcagaaacagaccttcgctttgtatactgtgcagctgcaatctgctcaatgctagatgactggacaggaatggacaagttaaaggcaaaggagtacattcttaactgccagtcatatgatggaggctttggtatggttcctggttctgaatctcatgagacaagtcactgatggagggtttcaagggagaaggaacaagctcagtgatacatgctatgctttttgggttggaggcgtcttgaagatcttgggtgcataccacttgatcgacagctgtgctctgcggagtttcttgctcacctgccagtcgccttatggaggcttcacgaagttcccggatgatcggataccagacatctaccattcttactacggcctggcagccctctccttgttggaagaggaagggctggaacccctctgcgtcgaactggggatcctctccgctgctgcattatagaaacttgtgtttctaccgaatccagttactgtacaatgtttgtgggggggggggggggggggggtaatccagtacttaacacaggataaacagctgagaaatcgaagggagtaatttattgatagagtgaggccttgttcggttattcccaatacatatggattggaaaaaattcttaagaagtttgacttgtttgggattcaaacccatccaatcccactcaatccacatggattgagagctaaccgaacaagccctgagttggtccgtgctgtcagtgtgctgcgcagatcgtgtaacattacttcgtgagttcgaaaggcgtgtgacaattttgtttgcaaaagtgcgatgggcaggctaactgagccagtcttcttcccagttggttgatctgattgttgacagttgagttagctgaacgctttgtatgattgtatcgtcacttggaaaggtactcgaatgtttgacgtttctgtttccgtctgtttggcataactaaatggcttgtgtctgctgccgtgaacaactttacatattgcatgcttcttcacaacattttgtttcagttaacactctctttaggcatctgcatactcatcgcttttctctcagaattcaggtgagtgaga

SEQ ID NO: 25155 - DNA, 2700 bp, Zea Mays
acggtttccctccacaaccacttgctcctcatctacttttctcctccgccttaaactcatccttgctcctgcctgccgtcgtgcatcatcatctccggccagggccagggcattcgtctccgcctccggtccggcctcctccactccgcgcccccccagacgcgtcgctgcgtagctgctggccgccatggccaccgtcatggccgcggccgcgtccgccgtcgaggcgcccgccacggccaaggccaagaaggagtccaagaagcaggaggagggcgtcgtcaccaacctatacaagcccaaggagccgtacgtcggcaggtgcctcctcaacaccaagatcaccggcgacgacgcgccgggggagacgtggcacatggtcttcagcaccgaaggcccttctttgcctgcgcgaggtctcagaatccggggggaaaaagaaaagaaaagaaaagatgatgactgtctctacctcttgctacatgtgccgcttcctcgtccgggctcctccgctcaagtccaggagtgcagtgcgctgtccaagcgccgccccaccaggtgctagcggtgccacctccacctccaagcttgtcctagaggtgaaagaacggctagcaagggagcacccaggcctccccacgggcaggtacgggagggacgatgacgacatggtcctctggttcctaaaggaccgcaagttctccgtcgatgaagccgtctccaagctcaccaaggcgattaaatggcgtcaggactttggtgttgcagagttatcagaggaatcagtgaaaagcctgtaccaaactggcaaggcatatgtacatgattccttggacatttatggccgacctgtgctgattgtagtggcagccaaacattttccttcgacacaggatccagttgaaaaccagaagctatgtgcctatttggttgagaaggcagtcaacagacttccgccaggagcagagaatatacttgggatctttgatctgcgaggctttcgggttgaaaatggtgatctccagttcctaaagtttttgatggacgttttttactattactacccgaagcggcttggccaagttctttttgtcgatgctccatttgtttttcaaccaatgtggcaggttgttaaacctctattgaaatcatatgcctccctggtaagattttgtgatgccgagactgtgaggaaggaatacttcaaagaagaaacggtgcctcctgatttccgcgattagaaatgtgcaggtggtctcggaaacatgacctttaattgattcagaatcgattggcacccaggggggctggcgccttcctataccttttgattaacttctcaaaagttgctcagacggcagcaaacgattggagagtccagtaaaaaatgaccctgtacttgtataacttctgcgaagtagaatgctgagtttaggctggtgtctggagtgctcctgtaccatatttttctggttttggatgaagctatatggaccaaattcatctctgttgaacaattgccaattacataacttgtgtttgcccaattccatggtgtagtaccataacttctcagtgcagtgcagacaacacatggattccattttttgattaaagtatcatctgctacaaatatgaatcatggcttagtttgtagacttcataaagaaacacacagattaatcaaaccagtcttcgaagagtctctgtggataggaacgttccaaagcaaagtaagatgcaagttgtattgcataaaaaccaggtacacatcaatcagctgcattctggaagactaaactgcaacacaactacatctgcaatcacagagaaatcaggtcaacaacggagagggtcaagcgatccccacgtacagatgccagcatggtcttttacatggttccaagaggaggtaaatcgagtgtagccctaaaaagatctgccttgtgccacttcaacactttaacccagatgcaataaaaaaacactttaacccagatgctgcattgtggtgtggcaaaggcttgagaatatgacaataacagctgctcaaaaactgttggtaggaacatttatagcagcaaaagaacaaaatggaatgtgtggtttcttatctgccttagatgagataagatttcggacatgtgtattcatgttttcgagtgatttggcactatgaatgcgctagatggttggttgcttttttttgttaattgctcaggtgatatatgctgtatttctagtcactagtgttgtattgtttgtgcttgtgctaagatgatctcttttgcacttgtaacaggggctcattcaagtactctactgatcgaaaatggatggcgtctgtgatggttcattcttttgcacgtcttctacacgggtacattgacggttgatggagatggatggtggtgtagctgttttgtttagcaattagcactctaggtgttggaccactgttttgttaatggatgctatgtaacagtagtatgtaactaatgtgaacttgtttaggttgctgtgaaactgttatacaacacattgttatggggttgttacacagctgatatgttatgaacatgatatggagatatcttttcctttttggtttgggttttactgttgtgccattcgtctcataagttatgccattttattatttacttttggattgatatatattcgtctctgaagccttcc

SEQ ID NO: 25156 - DNA, 445 bp, Zea Mays
ggttcgaccagaccagaactcaaccggtcgcgcttccttcttcaccctcagtcctcttccgtcctcctcctgtccaccgccccgtgcagttcggcggcgacatggcggcggccggcgacctgtccgacgatgagaagcgggcgatgaggggcagcaagttcgcgccgcttcctccgcctcctccctcttcccgcccccagccgaggtgagccttcaacttcaggaagagtagtacgacatgtttcctcatttgtggatggaactgaggattctgaagatgaagcagaggttaaggggatcaaaagaaaaaggaaaaataagaaggttaaaactcatcaaggtgacaaacaacagagcaagaaaaagaagaaaaataaaaagaaaaagggcaaaggtaatgcaatataggttttttgttctctcttgttttttcatgtaaaagaat

SEQ ID NO: 25157 - DNA, 1165 bp, Zea Mays
caaccgcatccctagtacagatcgagtgtaccgtagccactccacgtctccacgctccacggtcccactcgcaccccccgacgggtcggaacctcagctcagaggatcggaagaacggacgacggcgagatggcaagcggggaagaaggcaagggcgagacggtgctggtcaccggggccagcggcttcatcggttcgaccctcgtccgcggcctcctcggccgcggctacaacgtccgcgccggcgtcctcgaccccggtcagtagagtacagtagccctagccccgcactctccgccggctttgcttcctctcctcctgaacaagcgtcgccatgaataatgacgccgggagagaaagctgctggccccttgcccgcctgcgacgcggcgctcgctcagctcatcgagtgcgccgcggtggtgtgcatgcagacgacagggcggagacggaccacctcctcgcgctcgccgccggcgccggccgcctcagcttcttccgctgcgacctcctggacggcgccgcgctgctcgacgcggcaagggggtgctcgggcgtcttccacctcgcgtcaccctgcaccgtcgaccccgtcaaggacccccagaatcagctgatggtgcctgcggtggaagggacgctgaacgtggtgcgcgcggccaaggacgccggcggagtgcggcgggtggtcgtgacctcgtccatctcggccgtcgtgcccaaccccgggtggcccgccggcgaggtcgtcgacgagcgttgctggaccgacatcgactactgcgagaagaatggggtttggtaccctgcttccaagacgctggcggagaaggcggcgtggaagtttgcagaggagaacgggctggatgtggttgtggttaacccggggactgtgctgggcccgatgattccaccagccatcaacgctagcatggccatgttttgtcgcctccttcaaggctgcacggaggagtacgccgatttcttcctagggccagtgcacgtggaagacgtcgccatggcgcatatcctggtgttcgagagcgcatcggcgtcggggaggcacctgtgcgtccactccatctgccactggagcgacttcgccgccaaagtcgccgagctctaccccgactacaaagtgcccaaacattgtgctgtgttgctt

SEQ ID NO: 25158 - DNA, 1924 bp, Zea Mays
tgcggtgttgagtttgctgcggaatatgtgattcctctcatcttcccattgctcacagcacatcaactgaatgtacaacaatttgccaagtatatgctatttgtcaaggacattacaagcaagattgaagagaagcgtggtgtgactgttacagataatgggaacacagaggtaaaatcatcaccttcattggcaaacgggatccattctgaacctatgtcaggacaaataccagttgcaaagagcagccctgcatgggatgaagactggggtcctactaagaaatccggtgttccatctctttcagttgattctagtgcacaaacaaagcaaccctcagtagacccttttgacttcggtactcaaacaaagcaatccacaacactcccctttgatttgagcacccaggcaaagcagccaccatcagtttctcatgttacagcagctacaatcccacctgcgcaaccacaaccatcactacaatctcttgcggctagttcaggacctaaaatttctggctcatgtgtccctgtcgacattgagtggcctcctcgaagaagctcgtcatccaacttcaatgcacccttgtctattagcaaggataatggttctggaaggctgtctagcgatggagttgatgatattgatccttttgctgattggcccccaatacctagcaatgttaatagcatttcagcaaccgagcattggccaagcataaatcaaaatatttcgggatttagctcaggcaacatagtttttggtggcagcgggaattctgtagggcaaacgaaaagcaaccaaatgagctggtcaaacacgtctaatctaatgggcacaaactcaactggcagctatttgaatcagggcagtgcagctctaggtttcggaaatccaaatggaggattgagcacaggtctctccaatccaagtagttccagtacaggcctgagcatgatgctaccaaaatctgattctggatcattgtcgacgtcggtcaacaatgccgcacatgggctactaagacttgcccctcctccatccacatcggttggaagagggcgcggtagaaatcaaggacagtccgcactctcccgagcatcaaggcctcatgccaactcggcatcaggacaacaacctatcctggatttactctagtaagagatggtcgcctctgttcttcgcgttcggattgtcaatgtgtacatcctcaaacctttgtaaggtgtgtaccttttctcatgtactccgcgcaaaattgtacaacaatgtttaatgggccttataggtggacctttctcatgtactccacgctccaccaacaatgtttggccttatatatatttggtgactcggtgttatagacaaaagccagatgttatactcgctatccttggttggattcttgtgtcccaaatctctgacgttgaccttgtacaggactgggggttcaactgcagtggtgctgtgagccgtgcatgcgatggacaactctcctatcgagcattttcatcaattcgctacacggccctacatccctgtgcctgtgtgtgtaccactagcttgcattgcattgcatgcagagtgtactattgatgggtgatgcattggatggggcatgcacagcaggaatatttgcagttgatgagcggcaggaatcagtggctcagggaaaattgaatggcgatctggccttcactccacatgagtacgtacctatacgtacgcatgtatcatcagacggagtcaggaggatgcgggtagtgtccctgtgttgtctaccattttgtctcaccaatgtggtcccaaagtacatgatgtttttttacttttacacactttaaaccgaccgtaatatttaattcttctgtaaatacttattttattttatcattaaatatattttttaattacttaactattt

SEQ ID NO: 25159 - DNA, 691 bp, Zea Mays
gatgaatcatggcaaaagatcgaatgtcacatatttaatatataataagagttctggacaaaataaataaataattacattataaggtgacaacggtctagcaacccaaagttgtttgggagacgacggcctagacctctcacgaactcgtcacggcatcctccatgcgcctcatcctgtggtacctgttcttgacctgtagggggtgtgagacagcaagagtgagctcacatacgttcatagctcaacaagttgtggggaataatgtgcatgaactcgccaaaggtgggagctcatgaagtgtaaggcttaccaaagaggatggttgaagttgggcattgattttaaagttggtcaaaattttattagcaattactaagtataagtaaataccaacccaattaagtagtagaacaaaagtaacaacaacacctgcgatgcaatgcatatgacaaattaaatttaagttccataaattaatcatgtgagggtacgagctgctcatgaccgtgagcacggctagtataccagttttacactctgcagaggttgcacatctttacccacaagtcatgttacccatctacgatggggttgtacgggccccatacacctctaccaaggaagcgaggcagggtaacactatgaggcctttacaaagttccactagtttcagaaaacccgctacagt

SEQ ID NO: 25160 - DNA, 4316 bp, Zea Mays
ggttctttctccaccccgatgcccctccccctcccccgtgtgatcccctctccagatcgatgtctgccccggccgtaacccccgcggctcaccgcacgaaaccgccgcgagatcttggagctcagcctctgacgatggctacgactacctcgccaacctccgcgagctctgtccccctccctctcctccaccggcggcgggggatccttggccatgttcctcccgaggcgccggtccacgcgcttcggcctccgcgtggtcatcaagcctttctgatggctcggaacagaggtcagctatgcgatgtggcgtggcgaggttaccgcgggcgccgcggaggtggagggggaaggggaggacgagggcacgggcaagagagcgcatcgctgtggacggtctcgtgagagggaccttgggtgatccgggtgcttggtttcttggttctacggctttcgctgctgttggatttgccgagccggagccgacggagatgaccgtcgacgagctgaagctgcaggcaagggccagcggcggccacgacctaaggaccagttccccgtcggcatgcgcgtgctcgccgtcgacgacgacccgacctgcctcaaggtcctcgagaacctcttgttccgctgccagtaccatgtgacaacaatgggccaggcagccactgccctgagctgctgagggagaagaaggaccagtttgaccctgtgatcagcaacgtccacatgccggacatggacggcttcaagctcctcgagcttgtgggcctcgagatggaccttccggggattaacagctgaaaacctcgcccgatttgtaaagaagttttcttgttcaatgcggcattgaatttgggaggaatgacaagtctcatgaaaacttctgtatgccctacacgtgaccactaaaagaaagagttagacaggacaaaaggctgcagcggcagaagaagagcttttacatacccttacaatgctgattttgatggagatgaaatgaatttgcatgtccctcggacggaggaagctcgcactgaagcgcttaattctcataggggttcaaaataatttatgtactcctaagaatgtgatgggggatacttcaatgcaataatgagcttcccacaaaattacccaaacagcccaccatcagtcagatttacctctgaaatgtggcatccaaatgtctaacctgatgggcgggtttgtatctctattcttcatccacccagtgaagatccaaacggttatgagctcgcaagtgagcgatggacacctgtgcacacagtatggcttcgtatactttgtttacatatcttttccccattgtaatgttactcatctcccttttatgtgtatactttttagagagaaaattaccttgtagtctcattgtttcagtttatggtccaatttacaatggcttcactgtaaatgggaaaacaactcggtaggaatgcttttttgaattataaattatttctatttcatacgatgcttataggtatgtgatgagtcctccaatctgagaagtagagcatggtaaagcactccaagctgctctttcatcgggaaatttataggtgacacttgtgtcatacattgaactatggagtcaaacaaattacatattatccttcaacatttttcaccagtgggaactgtagttattgcgtagaatagatggtatattaatcgttgagagccaatgtttacattaactgttatgcagaagacaatttatgttttattttatatctaactgtactttgttgcagcttgtaggtactgatcacagcacattcaactccacacagattgtccatgtttctttcagtcaccatgatttatcactaggtcattgtgtttgtggccaacgagtattgttctaacagttatgttcccatagctagctagattcattgttgtgttttgttcagggtactttcaccacttctggtatggttctgtctgtaatgtgccagggattattatattgtttttggtttggatttggaatggtttggggtccacaacgatgatgcgtcagagctgttccaaggattggatgatttccattcccctgctgccaattcgactaggctcgccgtctccgctctgcccaactggcaccaagcagccaatggaacttgagcagccaatggatgatttccattcccctgctgccaattctccgaactgctttgacccttcaactcaatccgcatgtacccagcctattgtggcagcaaacagcgactgggtgcggaagccggaagggagaggcgcttggttgacccagaacggacgacaagacaccgccgggggttcgctgcaaccgcacgcgtggtggccggtgtgggaaggagcccactgctcaagcagcgacgacttccgtaacttctcaggccaagttgtagggagggagggcagcaaagaaagcaagcaagaaagaagccgattccactggtggttaaggttttggattaaaggagagaggtgcagagaaaaaaaggcaatcttactcttaatctctgtgtccacatcacttccgatcatgccgtgatcgacagaagtacgggtgccatgtataagtgccccctccaactcaccaaagtaataaggagcagctgctgcaggttgcaactccctgggccaagcagtagcccagcaagttcagcaccaatggcagccatatgaaatataaggcaaagcagataaaaagcttaatttttttcaataaggtaaaggcaatgacagaaaagtgaggagggtcagaggtgtacagataaggatgagggctgaaaagaggagcaggaagggcatgatgaaatcagtgtttgctatttagcctccttcacaactaagatcatcctacataatagatttagacaacaaaaacttatggagtttgctgaaatgccctttcaggcatgctccatctgtgctacaaggttatgggcttcctgcttgctgccagcagtcttttggtgcttttatattgctattaatttgtttgaaatttattatggtgatgactgggaaggtctttttgaggctattactggttatggccttggtggctctttggccgtgttggtggtggtcattgctgacaatgttggtgataatgttggagatattgttggaatgggatcatatctctttggctcatatgctgaatcgtcatgtgctgctcttgttgtggcctcgatctcgtcttttggaatcaaccatcaatttactccaatggtgtatccccttcttgtcagctctgttggtattatagcatgtctcataacaacgctgtttgcaactgatttcttcgagataaaggctgtgagtgaaatagagcctgctctcaagaaacaacttataatatccactgttgtgatgaccattggcattgcgctcatgttggcttggtcttccatacaccttcaccatttataactttggagcccagaagacagtgcaaagctggcaattgttcttgtgtgtggcggttggtctctgggctggcttagtcattggttttattactgagtactacacaagcaatgcctacagccctgtataagatgttgctgattcctgcagaactggagctgccactaatgtcatttttgggcttgctctgggttacaaatcagtcattatcccaatttttgctattgcgtttagtatcttccttagcttcagccttgctgccatgtatggtgttgttgtggctgctcttggaatgctgagtaccattgccacagaccttgctattgatgcctatggccctatcagtgataatgctggaagcttaagtctgtatgggtgcatcttatcatttatatgtatatctgaaagcttaagtatttttttaaatagaagatgtctggaaactttagtaacgacatgagtttcaggctttcagctatagcagtcttattcgcttttaagacagagaagatttttatttagagtttagaaagagtaggtgctatgggtgcatgttatcatttatgtggggaacatctctggtggaaattaatcagtaacgacatgagttaagacagagaagcttaagtattttttcagctatagcagtcttattcgcttttaagacagagaagcttaagtattttttgaatagaagatgtctggaaactttagtaacgacatgagttaatcagaagagatggaagggtagtttatcaacatgtatttggcacttcgccgaaaatgtcacttggactatcttgcaaactgaattttcagattggcttcttctgtctgaacattcagttcagtcttgcaggattt

SEQ ID NO: 25161 - DNA, 173 bp, Zea Mays
tctcttccccacaccagcgtctcacctcgcagccgcccggatcgccgccgtccttcgtgtcggccttgtcgtgccctaccgtcgacgtcgttcgcttcctcgacgcacccgccgttcatcctcgtctcgctgtccaccggtgcacggtcgtccggctcgctgcctagcgtggc

SEQ ID NO: 25162 - DNA, 1499 bp, Zea Mays
ttctagtgatgtgtggtcattataattaatctacaggtttctttaaccagtctaagcttgaaattgacctttggctattctgtggcaacttatttctaggaagatctgttgatttcatgtcattcgttcaactctcagttggattctagccctgacaatcctgagggtttatctagggaagagttaggtcgtatggtggcttctcgttggactggggaaagtgtaactgaggttagtaaagatgataagaaggggcatgaagatcagcaagaaataccagaacctgcagaggaagcacttgaagatgaattagaaattccagaacctgccgaagaaaattatggtggttatcattcagaagttgaggatgataggcgtaaatatgaagatgaagagttttatcatgagtcagaagatgaatatgttgacgaccatgatgagcatgttgagtcctacaaatctgatgatgaccaaaaagatttaactgagccaggacatgcatcgtggttggacaaagttcagcagactgtacaaaatgttttccaaaaattcaactcttttaagacccctgtagatttgtcagaggcttctcatgttcgtaaggagtatgatgatgctagctcaaagctttcaaaaattcagtctaagatatccagtctagctgagaagctaaaacatgattttggtaatgacaaggagttctattccttttatgatcagtgttttgagaccaaggaagggaagtatacttacaaggtctgtgcatataagaaagcatcacaggctgaagggcacagttctaccaacctggggcggtgggacaaatttgaagattcgtacagagtgatgcacttttcaagtggagacaaatgctggaatggtcctgaccgaagcctaaaggttaggcttagatgtgggctgagcaatgagcttaatgatgtagatgagcctagcagatgcgagtatgtggctgtattgtcgacccctgcagtttgcgtagaggagaagctgaaggagctgcaaaacaaactggacgccatgtctttgaagcagcccgggcatgacgaactttaaaaactttagaatattccagcgtgaacataaagaagatgtcaccaggaggcatagctctgacagttacatccataacatgataggcatggaagtcaatgaggtatatggacagaaacgggccaagcgcgagaaatgagaatgtagagtttaggtcgcctaccaggctatattagctcgcatagaacattttttttagctgaaatttgatgttgcaattttccagactcatctgatggaatatatagtaagaaacagtacaccttgaatcagcatatactttacccagggtttttacatgaaactatgttcagaacggtcatttggaactgaaggaattcccacttggaacacaaggtgaatcgcctgcatacctttaccaaaactattgtgctttttggatatctagaattaggtcgaatcagaat

SEQ ID NO: 25163 - DNA, 1459 bp, Zea Mays
gcggcagcttcttgccctcttcctccattgacttgccgatgcagatcgaggggcgaggctgccgtcgtcgtcccgggctctctgtgcgcgtacgcggaagagtgaggaagctctagtccactcatacagcctttacggttcaggagagaccgtgatgcaattgggatgttcggcaaggtttgtgatgaacatgaagggtactttgttcatgaggccctttccattgccatcgattgcttacaacttgatattcaaatgaggccagaaatggaacatgtacttttccgtctccggatcattgttgctagaagcaaacttgctgctggtagtaacaataaacctagccaacatattggtcgggcccttgttaacaacattgataaacttcacccaactctcatatcaaccatttccatggaggaactgaatgaagcaaccgggaacttcagtaatgatgttcttataggacagggaccatacgccgaatgtttcctgggagttcttaaagatgggcagaatcttgctgtaaaaaggctacgtacttctgaagaaattcaagtagaggttccgaccattttaagaatgtgttaccatgacaatgttgtgcaatttctaggatgttttcttgaagggggaactcgtgttcttgcttatgagtacgccccaaggggctccttgcatgatattcttcatggtaaaatgggcatcaagggagcccgaccagggccacctctatcgtggttgcagcgtgtgaagattgccgtaagtgctgcaaaaggcatcgagttcctccatgagaaggtgacattggtgtttcaatacatgatgcccatcgccgggttcataattgggccgagtactattctgtcagggaacatctagcacctgagttcgcattcagaagaaggtatagcacaaagagcgatgtctacagcttcgggcttgtactgttggagcttttaactggccgctcagtttttcatgttgcgacacaatgtggcccgaggagcgcagttagatgggctaaaccaatgcttagtcaagacaaggtggaacagtgcatagatccaaggcttggaggagggtacctactaaacgatgtcagaaagatggcttctgttgctgcactgtgtttacaagacgagccagagttccggcctgaaatgagcatcgtcgtcgaggctctgagcctgttactgaacagcaagtgaacaagtaaccgtccctgcattggtgaagcacgtggaatgtgatttccttgcatgtcattgcgagctcaagatcacgggtttcgtgaaggcgattggcccccaacagaaagttatgattactgcattcatctaggcttggaacttgtgctttctttgtctgtgcacatgtaatactcaaaattctaaataaagaatatagagagatcttctcattttatgtgccttatttgcatcataaaaagagcaca

SEQ ID NO: 25164 - DNA, 672 bp, Zea Mays
gggaacgctagggcccgagatccgccgggatccacggtagcgtgcctctcacctgcgtccggaacatgggcgagtcatcgagcttggcgaaatgcatggactgccgccgcagtgtcgcccacctcctaccagcccatccgcgggcacgccgcggagctccgcctcgagcctgttcgccgccgggaccgccgcgcgaaggtaggcagctggggaggggagaaggtgcggtgccagcggcctcgtcgcggctgggcggggaagggaatggcggcggtctgggcgcgtggagggcgcgggtgttgatcgggtggctcggcgagaagcgaggcgaggaaggaggaaaagggggaggaggagtggagcgaggtggtggtggtggaatggcgctctctttctctctctcttcgttcggggagggaagaagaagggatccgggtggcaacaggtaaccgccgagttaattttaattttggtccaaattgtaacgattattagggcctgtttgtttacccccatggattatataatctggattatttttggaggattatataatctgaattatataatctggattatataatctgagtagtcctgtttgtttacccagattatttgagttgttaatagggttcttttgtatgaggaagacaagaatactctctatatttg

SEQ ID NO: 25165 - DNA, 2385 bp, Zea Mays
ccgcatgaccgcatcagctcatcgcatcggccgctttgctttgcttgctgctctcttctctccgctttccgccgcggtgcaaggccagcgaattccatttccttccgcgtctgtccccaaaagcgggaggcccgccgccggaacgagccagcaaagccaagcaagcatattgacggaggaggcggaacggcggaagcgtgaatccggaggctctgcagctgttctccagaagcagccgactgggtgtccgtccgcggaccggtcggtgtataaatggttggcgaggagagcggctgcggcgtcgagggagggacaggaggaggagaagtgccggcggcctctgctcccaacggggaccgctcagggaatagccgcctcgccgtgccgtcatcctccgcagatgatagaggcttccatagatcaagcaccatgccaggggtgattaagaatgatgaaattaccaatgaatctactggaccatcaaatttggaaaggtccagaactgagcgtcgtcggcaaaataatccaactattgatcctgctaaacagttacttgatgaaaggattccaataaaaaagaagctcaaaatgctaaatcggattgctacagtaaaagatgatggaactgtggttgttgatgtgccaagtggtctggaaccaactatagttggtggaactgaggatatttatactgaagctgttgaagaagcattagatggaacggagatactatacaggcctcctatgcaaatagttatacttattgtgggtacacgaggagatgtgcagccatttgttgctatcgggaaatgtttacaggactatgggcatcgtgtgagattggccactcatgccaactttaaggagtttgtactaacagctggcctggagttttttccgcttggtggagatcccaaaattcttgctgaatatatggtgaagaataaaggattcctaccttcgggaccatcagaaattcctattcaaaggaaacagatgaaagaaattattttttctttgctgcctgcatgcaaggaacctgatcctgacactggcattccttttaatgttgatgcaattattgcgaacccacccgcgtatggacatacacatgtggcagaagcactaaaagtaccaattcatatattctttaccatgccatggacgcctactaatgaatttcctcaccctctttctcgcgtgaagcagcctgctggatatcgactttcttatcaaattgtggactccatgatttggcttggaataagggatatgataaatgagttcagaaagaaaaagctgaagctgcgtccagtaacatatctaagtggttctcagggttctggcaatgacattccgcatggatacatttggagtcctcatcttgttccgaaaccaaaagattggggcccaaagatcgatgttgttggattttgcttccttgatcttgcttccaattacgtacctcctgaaccacttgtggaatggcttgaagccggtgacaagcccatatatgttggttttggtagtcttccagttcaagatccacaaaagatgactgaaattattgtcaaagcactggaaattactggacagagaggtatcattaacaaaggctggggtggccttggaaccttgtcagaaccaaaagattttgtgtatctactagacaactgccctcatgactggctttttctgcactgcaaagcagtggtgcatcatggtggtgctggaacgacagccgcaggtcttaaagcagcgtgtcccacgactattgtacccttctttggtgaccaacctttctggggtgaccgggtgcatgcaagagggctagggcctccgcctattccagttgatcagtttggtttgcagaagttggtcgacgctataacattcatgatgaaaccagaggctgtggagctggcgaaagccatggaatctgaagacggggtgacaggtgctgttagggcattccttagacacctgccatcaaaagctgaggaacagagtctgccgcagtcatcgggcttcctggaattcttaggcccactaagtaaatgtttgggatgttcttagtgcacaaggcatcgttactattcacggattggcggtgtaccatttcctcgaagcagccacgagttatcgtaatattccatgcaaagaagcttcaggccagtagtgtttctcctcttcttttctgcgggtatttataatgtgtaaagagtgcttgtggtgtggatggtctgcacggatggcctgcatcctgtggtgcgtgtaattttgatgtgcatgtttgccgtgcagcacagacgacgatttcacgtctgcatggccaacccgttctgtatatgaaaagaaacaggtgcctacgttttcttcgttttc

SEQ ID NO: 25166 - DNA, 3673 bp, Zea Mays
tattatttgatttcctcgcctcgccctccctccactcctaccgcttccgccgccgcccgcctccacccctgccctccctccgccccacgcgcctgcgcatcgtcgatcggcgcccgggccgcgcgctccctccgcccttgcgcccccgtggactgaggcctcccgctccgctcaggccgtacgccgcggggtttgccactccgcgttcaacgacagtcaatatgtcgctcgatgttactcaagtactcttaagcgcgcaatctgctgatggcgcagtaaggaagcatgctgaagaaagcctcaagcagttccaggagcagaacctccctggattcttgctctctctctcaagtgagttggccaatgaagagaaacctgaggagagccgcaggttagctggcttgattcttaagaatgcactggatgcaaaggagcagcacaggaagaatgagcttttccagagatggctggcactggatgctggtgccaaagcacaaattaaaggattgctgctgcaaactctcacatctcctgttgcaagtgccagatccactgcttcccaagttattgccaaggttgccggtattgagattccgcagaagcaatggccagaacttataggatcattgcttgcaaacatacatcaggtccagccaaatgtcaagcaagcgacgcttgagacacttggctatttatgtgaggaagtttctccagatgctgttgaccaagaccaagtcaataaaatacttacagctgttgttcagggttaatttctcgaatgacatggagcgtgactatatcatgagagtagtttgtgaagcgacacagtctccagatgtgaagataaggcaggctgcttttgagtgtttggtggctatctcgtctacttattatgataagctggcaacatacatgcgggatatatttaatataactgcaaaagctgtgaagagagataaggagtcagttgcgctccaggctattgaattctggagttccatatgtgatgaggaaatcgacattctggatgagtacagcagtgaatttacagctgattctgatgttccttgctactactttatcaagcaggctcttcctgccttagtgccgatgttgttagaaactctcctcaagcaagaggaagaccaagacttggatgaaggtgcttggaatcttgcaatggctgggggaacttgtctgggcctggtggcaaggaccgttggtgatgacattgttcctctcgtaatgccttttgtggaggagaacataaccaagtctgagtggagacaaagagaggctgcaacatatgcctttggctctatcttggagggcccatcagctgataaactggctcctcttgttaatgttgcattgggcttcatgctgtccgcgctgatgaaggatccaagtaaccatgtgaaggacacaactgcttggacccttgggagaatctttgagtttcttcatggttcagcgcttgaaactcctcctatcattacggccgagaattgtcagcaaatacttactgtgttgcttcacagcatgaaggatgtcccaaatgtggctgaaaaggcctgtggagccctctattttcttgcacaaggctatgttgattctgggtctgcatcgccactatcccctttctttcaagatattgttcagaaccttcttatggtcactcacagggaggatgctggggaatctcggctacaaacagcagcatatgagaccctaaatgaagttgtcaggtgctccactgaggagacggctgctattgttatgcagttagtacctgtgatcatggtggaactccatcagacacttgaagctgaaaagttgtcaactgatgagagggagaagaggagcgaactgcagggcctcctttgtggttgcttgcaggtcattattcaaaagttgggagggatggagtcaactaagtactctttcttgcagtatgctgatcagatgatggaactgtttttgagagttttcgcatgtcgaaatgccacagtgcatgaggaggctatgcttgctattggtgcattggcatatgcagctggtccaaactttgcaaaatacatggcacagttttatcagtatttggagatgggtcttcagaactttgaggagtatcaggtgtgtgccattaccgtgggcgttgttggtgacctctgtagagcactggaagacaaaattttgcccttctgtgatggcatcatgactcaactcctgaaggacctgtccagtaaccagttgcacagatcagtgaaaccaccaatattttcgtgctttggtgatattgcactggcaattggggaaaactttgagaagtatttgatctatgcgatgcctatgctccaaagtgctgctgatttgtctgcccataccactgcaactgatgatgagatgctcgactacaccaatcagctaaggagtggaatcttggaagcctactctggtatcctgcaaggatttaagagttcacctaagacacaactactgatgtcatatgctccacatattattcagttccttgatgctctgtacaatggaaaggatatggatgatgctgtgatgaagactgcaataggtgtcttgggagatctggcagacacattgggtgtccatgctggccctttgatcaatcaatccacctcaacccaggcatttttagaggaatgcttggcatcagatgatcctttggtgaaagaatctgccgattgggcgaggatagcaatcagccgtgcagtttcgggttgatgccagagtcttgagtctgcacttgcattcatctacatatcatcatgcctgggtctttgattgcatcatgtccagacatgctcttgggagaaatccaacatttttacagcagagtctgagggtcctcactaactcatgcatcactacatgtgtcaacccgcccttcttgcttctgcgagaaaagagggttcaagctggccgtctgctaactttttctaaaggcatctgcaaccttcatttcttattggaggtgagatgtgagcttctattgtcgcatgacatgctgaccagtttccttggcatgtcaagcgtatgatctgtggcctatcatttccccttgcattcatctcatgcattgaacattggtcggatggtcacttgggacaacaggtccagttgcttgctgctgctccagtaagcaagagcgggctcaaacgcattgtcacaggattatttttgtatcgatcagggtggccaagtccatgctgatagtaggatgttaatttcctagcattcttttcctttcatccacttgcattgtctttgcatttcattcttggtcggattgttttgtaagagttattttagggcaaaactttgtcctgtctggtctgctaccgcacgctatttgtaagtcaagttcatgcgtgcattggtttatttacgggtgctattggagcagcgggtgtttgtgcttttttccatcttgtttttggtaatatacatacatgctgctccatttcggattatcaggagctgggcgggtgaagagacagttttataggtctttggagttgtttttgccggggcagaggcagttgagttggctgtgatatcttttgtgatttatgaagaaacaaagtgaattgagaataatatggtgaaatgtaaatggtcttcatttcacgcttgg

SEQ ID NO: 25167 - DNA, 1158 bp, Zea Mays
tgtgaatatacatatgatggatgtatgtgaatataacatactataggagttgaggggattggagatattaatgcagtaaagctgatatctaagtttggttccttggataatctactgaaatccgtggacgaagttgaggatgaacgaattaaacaggctttgatttctcactcggaacaggcaatcctttgcaaaaacctggccacgctgcgttctgatcttcctcattatatggttcctttcaagacagccgaccttgtatttaagaagccacaggatgatggagagaaattcataaaactcttacgagcattggaagcatatgcagaaggttcctcagtaaatccaatcatcagaagagcagcctatctttggaacaaacttaaatcatgatgacactgatgttttcagcgttgaataaaaaggaattttgtcaaggctgagagtttgggttcaaagcttggtgtcgtagtgctcaatactggcggcattgacttctgtggactcggcggccagctacactcacatcgcaacgcaaaatcaaattgttgctggcagaagtgcataaattgaaggtgccgatgcttaagcaaagcagctcagtgtttatacctcggaacttagctctgtagataagaaatgcacaacattgcccatgtattccgccttttttgagaggaaagctcgtggaatctatttgattttttttctctgtactaccaattacaaagggttgtaggtggagctgtggaggccagagcgggcaaccgtgtggcttaacattctaccacgcctagcactctagcaggtttcatgaagtctactacggtggtgaatcagatcgcacaactgttgtgttgtaggagcgagtatgtgctcgttttgtcgcacaaagatgttgtaaggctgagtccaatccttgtcgatcctgactgttgatgccggcggtcggtaccgagcaaactggctccaatgccggtcggtttgattggctggttggtgggcttgccaatcgatctgaggcctagtttgttttgtggtgattaaagtttagtgagtcacttttagtttctaaagaaacaaacatggtaactaaagtggtgtaactaaacttaagttctttagccacaagggagtgactaaaaggactaaagtagg

SEQ ID NO: 25168 - DNA, 387 bp, Zea Mays
aaaacagaaggcgtccgtagcgtccgggccgaaccgagcgggtctttgtcatcggcttccgggatccggctcgctcggggctatatagggcctagagcgccgcctctctctctgcttgcaaccacccaagaatcgtgtagcagaccaacgccagtgtgagagggggagaggtattccatgaccgccgccgtcaccgtgtcgcagcgttcttgtgccgaggggtggttgaggacaatccatgggcaacaagccgttggtggcctacgtgcgtagaggaaccccggtgattgtctgttcaactgcgcggatcgtgtcccgcccgcgtccgatggcgcagtgacatcatcggcgtcgacctcctcatccccacgtacggtcacgaggatc

SEQ ID NO: 25169 - DNA, 2868 bp, Zea Mays
gctgtcaatcgcctccccactgcggcagatccgcaatccgctcctccaccaccgcgctcctcacccacgccagggacaagactgtctacctccacgcccgcctcaccaactccgcggccaccgccaccgccacgcccctcccccatggtcgtcgagtccgagtggtggaaccagcgacgcatgcgcgtcgagggcgacgtgaaataggtgctccaccgcgggcacaacgggcacagtggaggtggaacgagcaccatcgagttctggttccaccgaatccaccgctcgcacaccggatccatcgctcccacatgcccgcacaccggatccaccgctccctcccccgcgatggcctggttccaccgagacaactgcggggctagggtttggattcgtgggtggagcccaaggctagatccagcagggggagggaggtagaggaggggagggaactgctggtggtcggcagtgggcgaaggcgcgacaatccaggatatggattcctgagcgtcacccacccgcccatccacgtcgcgcggtgtagtcatcccctatccgcagccgcctcgctccctctcccacaacaaatccattctcctcctcccactcgacgaggatcgcgaggatgctggaggacgtcgtcgctgtcacgcttgacgttagggcctccgatgcttgacgttagggcctctcgcttgaagaggaacacaaacagagctcatgttttttattttgctctgcattatctactgcttctctgtgggggcgttatttacagtatgtggcctgtttgttgtgttgttcctgcggaagggcgggcgggccgaaggtgtttaagaaaatgttgttgtcaacatcaacctcctggaagggccagaacgcaggcagcgcctcaactcgtcaccccatcagcacggatgattatcacgagtacttcaagcgctcattttaggaagacatcgctgcgcaagtgcctcaaggagtggaatgtaccggtttttggttgatggtgtctggaggtgtgatgagacaaaaccctttgtacgtgatgaatatggactgatcagcaatgaagtgcttgtggaaaacaatgtactacccgttgtgcagccagagccttctatcagaggaactaatatggataagggtaccattttgaaaacaatgcccctggagccatcatctcagaacccaagcatgcaaatagcagttatccgccatgtggtctctggaatattattacacaataccatatatgacgttgttcccctttctagcaagggtcttgctctggttcctttttgggatgaccgtcagggaaccataacaggcatgctcactgcatcagattttgttttaatcttgagaaagttgcagagaaacattcaagttattggcaacgaagagcccatttctgcttggaaagaagcaaagctacagttctatggtgggcctgatggtgctgtcatgcagagaacgccattaatccatgtacttctccatatatttgctgattctttcatttgattcaatgtgtaagcagttgcaagatcagcactttcataatataaatatattacttgtatgaaattctagatatggtctccaatacaacattaagcttaatgtcgtttgtgttaaaaaattacaaatcatcttatgtcttgaaataaggagaaattgtttgggtttctcctccccaactttcagaattacctatttctattgtatgtttgatcatttggacttccattccatcaacaattttggtttattcagtgaggaactatgtttttaaccactctgtagtttgtacagacaggcaacattgatctcagggccaagaaagaagctcaactcggcatgcttcctgtttgaagcaagggcaacaaacttaccccaccagatctctgtcgccaaagcagggctagtgaataagctgtgtttcctcccggattgtcactgcttttatatttgtgcatttattttgagggaaacattttgcccaaaaaaggcctgcagtgcacgttttaaacaagtcatttgaaccaactcttatgctgaaaactgtatgtgatactgcagaaggcaacacactagcttgataggaaagttggttggcaagcataggtggactctggtgccttcatatatctatatatatattttaagttgacgatcttcgtgatgctgaaactgatgaagacctccgatgaaaaaagagacatgctgcacatgcacgagggtacttgcagatcgatgtcggctctatggacgaacactcgaccaagtcagatgaggagtatgagggcctagccatgcgcgacgtgatggctactggtccgacgatgagcagcaagctgtgagttaaagatgaactcacctgccctggagagtaacatccataggagtgaggcaaaatggctggtaccaccacaacatggacccgttcctgaagatgtccaaggaggtggtagccgacaccataatgtcttgtgtcattgtgtcaccggtcggcaacacactgcgctggtaccggcgggtgttgtgtttcttaggcgtctgcttctgtgctttgagttgtgctatagagtggttgtgccaactactgattttaaaagaaaaaggtgagctgagaatcattgttgaaaacaaacatgtaattgttcgttctcatcagttgtgccaactaccaagcatttcattgatcagaatttatcgttgctcatgagaaccaaaagtaagacacttctcaataacattggatgcaaatttctgctagcttatcttcactatcttttctcgtatcaatataacacacatttatacataatttttgtgttattatatgttttcgttgcaacgcac

SEQ ID NO: 25170 - DNA, 462 bp, Zea Mays
ttcccccaccgacagaattgcggcgtgggttcggtaggcggagatctcgcgcggcaggcgcggagtaatggggtcatcagccgccgcgaccgagaagaggaacaacacgattggtggctggtcggtgggccccgcaaagcagtgacacggagtgggctgaacgtgcggaacggaccaggctttcagcgagggttcaggcgcggcgctgcggttctgcatagccgggcccacgagtcggtcgctcacgcgactgcacacaaaaacggatgagttgggagtgatgggccgagccgtggtaaccaatttgggccgagaggtaaggattcggcctagtgcttgtgtttggcttttcttttctattttctttctttccaatttcaaacttcaattcaaattttaaattcaaactttgtggcaagtttgtactcagactactgtttaatttgctcatacgaaatgtgg

SEQ ID NO: 25171 - DNA, 2481 bp, Zea Mays
atactccttttcagaatctgcccacccaagcttcaaaaatggttgcagaacttcttggctgcagtattgaagatctcaatttagctttgacaaagcgccacatgaaagtaaataatgaaaacattgtccagaaacttacccttgctcaggcaactgacacaagagatgctctggccaaatcattgtatgccagtttgtttgaatggcttgtagaacaaattaataagtctctctcagttggcaagcgtcgaactgggagatctatcagtattcttgatatctatggctttgaatcatttgataagaacagttttgaacagttctgcatcaattatgctaatgaaaggttgcaacaacatttcaatcgtcatttatttaagcttgagcaagaggaatatgtggaggatggcatcgactgggcaaaggtcgactttgaggataatcaagattgtttgagtctatttgagaaaaaaccactggggttattgtctctgctggatgaggaatctactttccccaatgccacagatcttacttttgcaaacaagcttaagcaacatcttaactcgaattcttgcttcagaggagaaagagacaagggatttgctgtccgtcactatgcaggagaggtggcttatgatacttcgggttttctggagaagaatagagatttattgcacatggactcgattcagctccttgccaaatgcaaaacttttctgccaaaaatgtttgcatctaagatgttagttcaaccagatgattctatgtctgttccatatagatctagtgctgctgattctcaaaaactaagtgttgccatgaagttcaagggtcaactgttccaacttatgcaaagactggaaagtacaacaccacactttattcgttgcattaaaccaaataatttacaacttcctgcaatttatgaacaaggacttgtgcttcaacaacttaaatgctgtggggttctcgaggttgtccggatttcaagatctgggtatccaacaagaatgactcaccagaagtttgctcggcggtatggctttcttcttcttgaggatgttgcatctcaagatccactcagtgtttcagttgcaattcttcatcagttcaacattttacctgagatgtatcaagttggctacacaaagttgttcttccgaactggacagattggcaaacttgaagatactcggaatcgtactctacacggtattctaagggttcaaagctgtttcagggggcatcaagcccgtcatcatgcgagagaacgaataagaggagttttggctcttcaaacattcattcgtggtgagaaagcacggcaaatttattcctctttgttgaggaaacatagagcagcagttattttgcagagtaacttgagatgttggcttgcaagaaggtatttcataaatgtccggaaggcctcagtgataatacagtctggtattcgtggcagtcttgttcgaagatgtaatggcaatattgatctaataaacgtgctaagagagtttgaatcaaaacaggaggcagagggtgaccaaattttgatcaaggcatcagtcctggccgagttacagaggcggatactaaaagccgaggccacagtacgtgaaaaggaggaagagaatgagacgcttcatcagcggcttcagcaatatgaaaaccgctggttagagtacgagcagaaaatgaaagctatggaggaaatgtggcagaagcaaatgcgttcgttgcagtcgagcctttccgtagcaaagaagagtcttgctctgcatgagacacctaggatgtcggactcatcagtggatcagagctgggaaagcaacgggaaccatgtcagcagcgggtctcagctggtgccacgcactggtgggcgcgaaatgagcgctggcctgagcgtcatcggccgcctagcagaagaattcgaacagcggagccaggtttttgctgatgacgccaagttcctggttgaggtcaagtccgggcaggcggatgccagcctaaacccagacatggagctccggaggctgaagcacaacttcgactcgtggaagaaagatttcagtggccgaataagggagacaaagatgatcctgaacaagctcgggaacggcaacgagtcatcgcccaactccgtgaagcggaaatggtggggcaggctgaacacctccaagttttcgtgagtttgttatgtatactgattggtaattcgtagatgtaccggtattttacacgccggtgtggttctagcttcctagagtttctattctacggggtgtcgtgacttgtgaaagtcgagtgtgttgggctggagttgtgttccgtggagggcgagttgtatagttcttccacaatggcttcctttgaggggggtcaaggactactgaattgtgatgtaattacttgctgaagtagttgtcgaagcgggaagattgtgacatcgctcactattccactatcctcgtgctttac

SEQ ID NO: 25172 - DNA, 1105 bp, Zea Mays
tgttaggtcatttatgatttttgttaggccattccatagtggatgatcatcacgcaaatagaatttatatatgtgtattcatacacatctaatcaccacagatatatatttatccacatcatatacattcacaaacatatatccatccacatcaaatacattagtacccatacaacatcatataaatcgtccacatcatatattccatcgtatacatcatcatattatataagcggtgttgttcgttgttcagtatcgcttgcattgttgtgtgcatgcatgccaatgggcaacaatggcccatgcaaatctattgggctgggcccaaatcagctaacttcacgtatcagggatttgggattctttcttggtttgggatgatgatgatggaatctcaaggctaaggtgtagaagaagcaaggggagccagccattgcaggaaatgctgaccaggaacatccaacagctgcttagattttttttaaaaaaatatgtgtttttcctgctgtcaaacaatacactaaattaaataccaagaggattttagcccctgagaacttatttgggggcaaggagattagagaggatcgaagggactaaataataagaagattttagcacttacaatcccctccatttcccttactgctaaatatgtcctcaatgccccttcaatttcattgctcctaaactagctctacgcaatatattattccctttttattctgcagatatgataatgataaactgaaccacctggatgtcctggcaggcattttctctgctgatgacaccatgttctcctgaagaatccagacaccacatcgatcagtaatcatttggattccctctgggttttcttaagagccaacacgcatgttattttcatagcaaatgcagggcaccaagacaaaaaaaaaagatgctagcatagagacgagattagttacgctaaattaatgcccgagactgaacagagagaccaggaaggagaaccctaatcaatccaaggaatatatactgcctcttcagggttttagaattgtctgcacattttctatggtcatgttcgttgtgaattaccgtggcttctataatattttgc

SEQ ID NO: 25173 - DNA, 3192 bp, Zea Mays
cagaaagggagaaaaaagtgtagaaagagagaggaagtgaagggagcccagacaattcaaatccctactagccgagggccgaggcttccgtttgaagactgggcgtgcggtcctcctccgggcggggctctcgcgcggagagatctccgagcatccttgctactcccgttatcaggtaaagggatgggtgggcaaggtacaggaaacactgtctctgttcccctgctagggaaggcactgtccctctccttgtaagttttcctgtgagctctctgctgctgttcaaggagctttatccggtgatagtatcaaagcaccaagatgaagtccagcgcggttactacaaagggcaaggctatatttgagctcaagcacaagctggtacaagctgttaacaagattgcagacagagacacttaccagattggattggatgagatcgagaagatggcggataccctggcccctgacatgattggccccttcttgtcatgtgtcattgacactgatgctgagcagaagagtgcagtgcggaaggagtgcatcaaggtgattggcacactggcacgactacatggaaacctattggcacctcacatggcgaaaatggtgtccagtgtagttaagcgcctgaaggacaccgattcagttgttagagatgcatgtgttgacacttgtggtacccttgcaatgtgcgccagaagttatggggatggtggtgcagcgttggtgacattggtgcgccccttgtttgaatcactgggtgaacagaataggtatattcaggctggggcagcactgtgcctggccaaggttatagatgagagcaattacttccctgggcctgtgctcccgcagatgcttgttcgtgttgttaagctgctcaagaacccccacttcatggcgaagcccgctgcgattgacttgataagaagcattattcaggctgaaggtgcttccacagagcaggcattatcatcagctctaacaagtattatggatgcgctgaagagtactgactggaatacaaggaaggctgcctcactagctctttcaagtattgcggtcagttctgggtatttggttacctctttcagaacttcctgccttcgctcccttgagcgtagtaaatttgacaaggtaaaaccggtacgtgacaccattatacatgcaattcagctgtggaaagctattccagggtctcatactcctgaaccatcagaagctgggtcatcaacaaaagagaactactttggagaccatcatgacgccagaagtatacatgatggaggatcaagagatacttcttttaggagaacagatcatgggccttctgtatctgttatcagtggtagttctctcagttcagcaaagcggaggtctcctttatctattaacaaagtagccataaacaatgctgcaaatttgcaacggatgaagactggtgattggcgtgttgaggtgtcagttccaaagcagagtatgataccgctggttaataatgacgagaagggatccagtaaagcctgcagcctaaaagatacaaagagaaatgcatatgaaagtgttgatgtagacagtaagtttgactatgacattgtagatgataaacaagaatgctcctctgtgtcagaagtagccagcaggagttttgagacaaagcatgtcactactgctcaggaatgcactgaagattgtgattcagcagaagttacagaacaatgtcccaggggtcgagaaagtaagagcataggctcaacaattacagatgttactactcatgacacacatagttgttgtctgaatactatgaatgaattggcccttgttaggaagcaacttcaagagatggagaggaagcaagcaaatttttttgatttgttgcagctcagcagagaacatgtcagtgctaaatttgaaggtgcacaacttggagaatgctgcagacaaaactgtatatacaattactcagagcgaaagccggtatcatcttcctggctccaagcattttaagaaccaaagcgtctcttctttgcctaggctttcgacttctacacctagatcatctatggatgttaactacaagccaccaccaatctcagagttgaaacatgagaagtggatgcgtgatctaccatctcggggctcaaacatgtgttgtaaagagggagctgattttcgaaaggatcatgttcgcagtaaagttaggaagcttgggcctgtgagcttagagggtaacttgggaagatgtgatccaagctcagcaagaagtcgaacatcaggggttaaagggacttatccagtttcatttaccagttcctgtgaacaatctggactgcgaaatgcattgtgcacctcaaatcaacctggtgagtttcaagatactgatggcatggaacctgcatacatggaagccctgaactgtggtgattatgatgatctgattgacctaatggatagaactggaccagttctcgaaaagttgtcgtgtgagacgacaaatgagcttttgagggttatagctgaacaatttcttaataagaagttctttgacttggcactgccttggcttcaacagttagcagatttaagcacgatttataagccaactcaactttttgcatctgtgagagcacaaaaggagttcctttctgcattggaggaagctgcaacgggtggatctatggaaccagccttgaggattgcaattgcacagctcggatttaaactatccaaagcttttgaggttggcccatgcaggaaaatctcagccagaatgtgcagagaaaatgaaactatcatgaccaatgcaatgtgagatgtttcttgtctagtatatgctcaggccacgaaaacagtgctttagggagcttaagttaatttcttgtagcagcacaacctttgtaacttgtcgtatgatctgtttaattagcgtgtgaaaggctagaagatttcaatagaggttgatagtttggtagtttaaaacatgcgtgctttggttctctactgtaggactggaaacttttgctgtgtagcaatgtggcatgacttatgtttggtgctttcagacggggccgtacagatttttgcttgaattatctcactctgaaacactatcgtacctaacacaatgcttacaatggaaaagaaatgaaagaaaaaaaaggataaaataacggaagctgtttgtca

SEQ ID NO: 25174 - DNA, 2392 bp, Zea Mays
ggcaggcagctgcgtctgcgtcgtggccggcgcggcgctgcgctgcgcggaaaccaaatcctcagctccggtgttctctccaatctccatccatccatcctcctcgcggctcgcgccccgaaaaatggcgccaacccctccccagtctcccgcgcggcgctgccccagctatttccccctcccctgaattgaccccagccgcgcctcccaaaccctaacctaacccccgccccctgggccccggccatggcgtcactgcccaagccgccgccgccgccacgccccaagacgcggggcaactacaactgcggccgctgcggccagcccaagaagggccacgtctgcgtcggccccggccccggccccggcggcgctgcgtcgccctcctcctcgtccggggccggaggggagcacgggctgcgccgcgccctctccttcgacgaggccggcacgccgtcctcgccggagaagaagcccaaggtggaggacgtcgacgaggcggagctggacgaggaggccacggtggacgtgggcgcccgcgcggtgtccagggaggtcatggcggaggttctgcaccgcctcggtccccgcggggtcatggccgccgccggggtcagccgaggctggcgggactgcgcgggccgggtctggcgcgcggccgaggagctccgccttcgcgtcctcgcctcctctggcgccggcctcctcgccgcgctgctcccccgctgccccgcgctctcccgcctccacctccggatggaaagtgatgttgatggcactaccctggcttgtattgcattttcctgcccaagtttaagaactctcgagattaccatggctgctgatgctgtcaacaggatgactggggaggatctaagtcgttttgtttcggagaagtcttctctctcagccctcaaaattggtggttgctctaatttggatattcttaatctgtgctcttcaagcctttcaattctttggttgtcagatctttgttccctttcgaaatcggttatgaactgtcctaatatgagcgagctatcactgtgcttcacagaacatagtagtgattgtaccaatctgattactttgatggatggcctaggtcgtacatgtcctaacttggaaaaaatgcacatatcatcaaaacaattatctaatgaagctgtatgtgctctagagaatgctaatctcaggggactgttcatgctatccctgattctaggttcaaaaataactgatgcagctgttgcatctattgttcggtcatgtgcaagcttggagttacttgatttaagtggatctagcattagtgacaatggtgttgggatgatatgtaaagcataccctcgtactttatcaaggctgctccttgctctttgcccaaatgtgaccacacgtgggatccagctagccacagcacagttgccatgtcttcaactcatggactgtggaatgagcctatgtgctaatgtgaagaatgaaaaagagggtccatattttggtgaaatcaatggaggtattagaattattcgaaaactgtccatcttaaagaggcaacctattcaccaaaagcttattataaagcatgggaatttgaagaagctcagcctgtggggctgttctgcattagatgctctatatctaaattgtccagagttaaatgatctcaatcttaactcttgcacaaatctacatccagaacgtctgcttcttcagtgcccaaatttaaagaatgtctatgcatccggatgccaagatatgttgattggagcaatcagaaatcagacactgatatgcaagccacaaaacctaaccgatcaacttatttgaactggagcctagcatggagtgagcagagggttggagctgaaggttctgaatgagttcgctgcagttgaaccatctcttccatgcaagcggctagcggatggctccaaacgggttcaactccctcagttcctaaagcagcagccgtcgaaggacaacaaattaattgaattgagccagacccagtgcactgtgcatcttggttcataataacaccaccagagccagttaacggagcattgtacacaccgaattatgtgaatcatgcaccacataacattatcaattcgttgtatacttctgtattgcatcagaacctgtagtgattgttgtataagctgctaattgctgcatggacatgtctgaatccatcatggatttcttgcgaccgttagtctgttctaggaaacattatataggaataattcgtaaccatgacccgtattctctagggaaaaaaaataatgatcctaggtcactcattttggttggtgttattctgttattcttccgcatgagctatctatggactttggttcttcaatctctacttttaaatagg

SEQ ID NO: 25175 - DNA, 562 bp, Zea Mays
cccccggctcagccgccatggtcgcaacaacccgccggaatgcgcgcgttccagccaggcacaacaacggcctcccaaccaccccgcatcgagctcgggcctacatgacccatgccaccggcccaccgcaaccctgagcccttgattcgggcggatcgaagttagcctcagccttgcacgcggaaaggggcgtgaacggagaaattgggggcaggcgccgcagtcgattgcgcccgtacaccatcggagggtccatgggccgtgtccggggagcttccttaagcccaccgcggggggtgctcgtctcatctcgggcgtgtgcgacggtcggcgagcagcaatttctcgccgaactttgacttcgccgcacaactacgtatcgtcgtggattacgccgataccgtctagctcccccggggagaaccttgttcccttaaggagcagatttcatttggtgttgagtttgggggcgccggcggtcggaacgggcggccagagttgtagcgccgccaccacatcacatcgcgtcatggcccggctttcctgtacccctagagccaga

SEQ ID NO: 25176 - DNA, 3851 bp, Zea Mays
gtcatagagagccacaggccacaggcaggcaggaggatcggacgagtcagcgaggaagctgcctgctttcagatagagagagttattaagatggcgttgcttcggctgcttgccatctccctgctcttcgcagtggccactcctgtcagggacatcgcccacgatgcctgctcgtcagaagtgaaggatttccagcacctgaacaacagctcggggctccacctgacgctgcaccacccgcagagcccctgctccccggcgccgctgcccgccgacctccccttctccgcggtgctcgcccacgacggcgcgcgcgtcgcgtcgctcgccgcacgcctcgccaagacgccgtcctctcggcccaccttgcttgacgagagccgcgcggggtcgtcgtcgtcgtcgtcccccgatgacgagtcgtccctcgcgtccgtgccgctcggcccgggcacgtccgtcggcgtgggcaactacgtcacccgcatgggcctcggcgttctccatcctggacacgtgcttccagggccaggcggcgcggctgcgcgtgcccgaggtcaccatggccttcgcgggcggcgcggcgctcaagctggccgccaggaacctgctggtggacgtggacagcgccaccacgtgcctggccttcgcgcccgcccggagcgccgccatcatcgggaacacgcagcagcagacgttcagcgtcgtctacgacgtcaagaacagcaagatcgggttcgccgccggcggctgcagctgagaagcgacacctacatacacgcgcatgcacagaccgactcggtaactaaaactaaaacgaacagcgcatgcatgcatctaccgtccggtttcgtctgaaaccatcattaatttcgatcgtccactccacgcacagcaagttctttacggagcttgccgcatatgatatgtacatggtgacaagataaggtacaggagaattgatgaaagaagcgttgccggccagtcgtcgttgcacgagaacaaacacataaattaaaacattattacaggagtagggtatttattgtattgttcaggccagaaaaatatgtggaaagtgggtctttaacttaattcggaagaagcatatagcactccaaaaaaaaaaaaagattcatattcatcacatagccaacagatagcatgtagtagctgttcatgcatgttattcttttggcaagtcctggtcaggaagtactatttactgtgtgtaggacgaataaactgaagtgatgtgtatgtttctgatttctttcgtacttgcaaccccgggcccacgtggtttttttactcccttctatatatactgtggaaaatattgtaacccacgcacaagacacacactcctatgctatatatgttctatgcacaagacacactttgttaacgaacaaagagatcgatgatgcaaatatttatcactatatatatatggctattgttagtttcgtgccttttgcacgatgaatataatggttgaacatgcatgggacgaacaggtggttagcaaatctgtacaagaattcattcacatatcacagtcttcaacgggacaggcctttggattttgatgaggcaaaccaatatctaggtattatctgtttgctctttcagcatttcggagtggaattgtgtacagttagtcgtgaactacatttttccttgtagagttgcccctgtaaaaagcgtgttgctacctgattgaattcgagtagatgtcctctgcatgtcatcctaacaaattccatttttctacctgcctgttgaagtaatgggtttatttgtacctgttttttgattgcttcttccgttcaacctggttgttgtctcttttaagctgggatggacatttgtatatgtacttttgtgttccaggttattttttgtttgtattttgtacataagccttcttcccacatgcttctttctgaagtttccacggataaaaattactttcatggaaaagggaaggggctgtaatatacttctcaagtactgagctattatacctctttattgtcactaatatggtattgtgatttccttctctgcaatttcagagaaatgtgaaagagataaatcgcgtgttcttgttcattgcatgactggaaaaaacaggtccgctgctattgttgcagccttcttgatgaagtctagagggtggagacttgcacagtcttttcaatgggtgaaagaccgaagaccacaggttcaactgacagatgcttctcagaaggagcttttggagtatgagctgaagcttttcggacccagtactcaaaccttggttcccactgaatcatttgcttctcttggatttggttatacaaaaccagcaggtgacatgcaaacgcctgtgttcaaccaaacgaccatgccatccatattcgagcgattcaacccaaatgatcgccccgccaatttcacttttggagttgagaggaaagcagaagctaaccctcaagataacaatagtgatggcagggtaaacccaacttcaacggagaacctgatggacagctcttaagatgatttcacgatgtcgctgttcaatctccttgttccagaagtaaacccgctgtaatctgcatgtcgcggaagtaaacctactgctcggtgcctcggcgcaccgaatacttatccggtgtctaggtttcagggaggttttgcccttgtcggatgagaaatggttctctggaaaccgatctttgctttagaatgactgtatgaaatagatgtttgtggctcatctatctgttcctttctcgtatagtttctgattgctattatatggataaggcatagtgcttactgcttaccagtcgggtcgtttatttggtcatgtatatatgtagtcgtccgtaaaaggagaggagagatttttcaggtcggcagctggtggtgacgtgatgagttttagatctttagtccaatgcaacaggagattaagaatctagattatcgcctttttagttcgaaggtttgagaattaatgacagattgataaggtaaacagttatttatttatttattttagtttgtgaacccaactgagtcaattttagagacctttagtcaggtgcattttactcttttactttctcaatatgatgtgtagactactctagaatttctacggatacaatcacgagcgatgtacctgacaatcatgagagatagcgtcatagcaatgtacctgacgagtgatgtagtcatgtacctggacggatcgtcgaccaactggacaaactcaggatgatctatctgtatatggatcaactttaggtcttgtttgaatacgtatctatccataaatatattatattcacatagattaagagattaaggtggatacacaagcaaatcctacatgcatcaaaatattatatccacacgcgtatatagtaactagtgcaagtctccatccactagacttcatcaagcagtatgactttcacacacaactggagtacaagtggaagctgacgcaccgcaggccgcacaaggatccgcaagcatcgaccatggagatccgcacgacgtcgcttgtcacaccgccggtacagccccacgaggtcctgcaagaagcaagatccacacagatcaggaaactcagaagacgaacaccaaagagaatgcagaccacagcatctggtgtctcttccctgccatcatctactcatctcccaacttataacctcaaagaagacaaggacgagtcccctgatccgaacttaccactcttcctgcctattcgtttggcattggcacacaacattgtcgtcagagaaaccacggctgctggtcggcaaggtctaagaacgtggtag

SEQ ID NO: 25177 - DNA, 1549 bp, Zea Mays
gattccgcctccgcctccgcctcccccgccccgcccgcctgcgccctcgcccgccgctgcattttcggtggcctcgccgcgtgcggccgcgagaagtgggaggctgctgcggtcctcgcccgcgtctgcccgtcgtctccacgtgggggcgtgcccggtaccggcgcgacgagaagccttacgcctgttcaagacgtcaggtgttggtatttgggttgcaattgagtgattgggaaacctgattggacagaagcattgttggtcaaccaatgggaagcaatgaccctagcacaccctccaaggcttcaaaggcatcaaaacaagtacttgaaacagtggatcaacctccagctaccacatccagtggaacagtttcagtttaccctgaatggcccagctttcaggcataccaagcaattccaccacatgggttcttcccccctaccgttgctgcaaatccacaggcccattcatacatgtggggagctcagcccatggtaccaccttatgggactccaccaccaccttatgtgatgtatccacctggagcagtatatgcccatccctctacacctcctactatgcatccgtttagtcattaccctatgccaacaaatggacatgctgaaactcctggaaccgcgccaagtgctccagaaatgaatgggaaaagtgagcctggcagaacatctgctccatctgccaatgggattacctcgcacagtgagagtggaagtgagagtgagagtgaaggaagtgatgccaattatgaaaatgattcacattcaaaggacaatgatggaaaggaagatggcaattctcagaatagcatatcttattcagcatcacaaggagtgttaaaccaaaccatggcgatgcttccaatacaaccgggcgcaatggttggaggagtttctagctccacagctaacttgaatattggagtgcactactgggaagctccaggttctgcagctgtctctgcaacgcatggcaaagcaccagctggttcagctcggggagaccaatgggatgaaagggaactcaagaagcaaaaacggaagcagtctaatagagaatcggcacgcagatcccggctgcgcaagcaggctgagtgtgaggagcttgggcaacgtgctgaaactctgaggtcggaaaactcgtctctcagggccgagcttgaacggatcagaaaggagtacgaacagctactttcgcagaacgcttcactcaaggaaaagctggggggcagcagtgacccgattcctgatatgaatgaacagaacgacggcaacggcagcgacaagaagcaatctgattccgatgcccagcctgggagcgagtcttgacccgtttagctcaggatccttgggaatgcacattgctatttattttctcgaacatggttgaacagaacataggagaaaaagaattgtttatgtaactcttaccccttgactgcctaatgtctctgacggcatgtatataatgtatgccctcactgctgaactagtactagtaattgaggaattgcagatattgacagctt

SEQ ID NO: 25178 - DNA, 688 bp, Zea Mays
atgtccgaccccgccgctggaggcgccatggttcctgctgccggacgcggcatcgcatgggcgaacggcggcccccggttcggcgacatggtctgggccaaggtgaagtcccatccgtggtggcctggccatatctacagcgtcagcctcaccgacgacgaggaggtacaccgcggccaccgcgacgggctcgtcctcgtcgccttcttcggtgactcgagctatgggtggtttgaccccagcgagctcgtccccttcgaggaccacttcaccgagaaggcggcccagggcggcagctcccgcagcagctttgccgccgccgtggccgaggccgtcgacgagcgacggcaacttcttcctggtcgacgtcccggcattcgacaccgacgctgactaccaactcgaccagatccgggccgcacggcagcgattcgtgccgcggaaggcgctcaactacctgctggacgccgccgtgactcagcgagacgcggcggaaaaagccgcgcgcaccgtgcctgggatggagatggccgcgctgttcttggcgtaccgccgcgcggtgttttcgccgatagacaacacctacgcccaagctttcggggtggatcctgagctggctcttgctgccgagcagaaagccgcggcagagagagctcaacgagatcaagcaacaattattttgatgtga

SEQ ID NO: 25179 - DNA, 2418 bp, Zea Mays
tttcacttcaccccacggcccggaaccaacccttctgtcgtaccctctggatcgaagcctggacgacgcgaccgtgcggcggcgactcgacgcaaccagcacggcggcggcgcacagccccgacgacgactctccccactgccttctctccgttctacaatgagtatctcattgcgggatcgtattagaaagaggagggaagaagaagaagaagatgacatgatgatatttattgggaagcaaagtattggaaaaaactgcatttagttgatgatccactagaagtttaagctatgtcccactcgagtctttatacagtggtgatgtctcttgttatgctatgttcactgcatgatttttgtttttggcatgtctacaactggttcagctgttcagctgctcattgtggttgcagtcaaccataagattgttgtcttagcacctttgatatgtcttagcaaaaactcccagttcactctttgatatgtctagattgaaccagttcactctttaatatgtcttagcattgaacttgttttagattcaacaaatattcttgtcacggtgccagcaatatattaaatctacattgtgtaatatattgtcaaacaaggcttgggttgctagctttaactgcatggaatggaattagtccaggctgaaacgaacgaactttagtggccaccaggtttcatttcagagccggatctataacagaccaggttccagtgaaccacccggatccactctatatggaccagaaataaatacatgtctgttttcaaaccaaagcaaacgaacgcggccttaaagttcttcaggccctggtgtagcagctgaactacctagtttgatggtgaagaaagagctctaggtgatctaaagatggtgatgagataaaagcaccaaaaagtgtacagtgggatagcaaggatatgactgtcatgatgcctcagcgccaccgggctacggccaagaagcccatgtggataatcgtgctcttgtctatggtttgcatcatgttgattggggcttacgtcttcccaccacggcgcttctctaagtgctacctctctgcttcaagtgtatgtacgtctttcaaggattggctcccttccatgggccatcgggagcgtgctgacgaggagattatttcatctgtagttattagggatatcctttcaatgcccatgcctatgtcaaaaaatccaaagatcgcccttatgttcttgacaccaggttcattgccctttgagaaattgtgggagacgttcttacagggacatgagggaagatactccatctatgtgcacgcatcacgtgaaaagcctgttcatactagttctttgtttgctggtcgggatattcacagtgatgcgatagtatggggattgatttcaatggttgatgctgagaagagactattagcaaatgcactggaagatgttgataatcaagtttttgtcttgctttctgacagctgtgttccgctgcattcatttgattatgtgtataactacctgatgggaacgaatgttagcttcattgattgtttcaaggatccaggtccacatggcagtggaaggtaccctattgagatgtatcctgaaatagacgagagtgattttagaaagggtgcccagtggtttgcagttacgaggagacatgctttaatgattctggctgacagcctgtactacaagaagttcaagctatactgcaagccagcagaagggcgcaactgtattgcagatgagcattatttgccaacgctgttcaatatggtagatcctggtggcatctccaattggtctgttacacatgtggattggtccgagggaaaatggcatccaaggtcatatagtgctgacgatgtcacttatgatctcttgaagaatattacaacaactgatgagaacttccatgtgacaagtgatgacaagaaacttgtgatgcagaagccgtgtttgtggaatggatcgaagagaccgtgctatcttttcgccaggaagtttaatcctgaagcactcgataacctactgaagctgtttacaagttatacatctgtttgagcctatgagtcctacctgattctttgccttgggctttctaatcccacatttttttctgtttatatgtaaattgggaagcccgtatttattgggatctgggcctaaagatatcggtacaactgcaacagctgtgatggcttggagtacagtcctgggtaaatggccacaacaatgtttatagaatgacactgccctgagtgtaatttgtcgtgttcaatgtatgtctccatagtcttccagccaactcctaactcattagttctctattcttggagaacagttttttttttgtcagaatgttatatgatccattctttgtagacacagagattacaacagatgtacc

SEQ ID NO: 25180 - DNA, 2739 bp, Zea Mays
atggcgacgacacatagggaggggttgacagcagcgacatcgacaacacgagtgagggagaggtggcggcagggacgcaaggggatgggagaggaggttgttgcggtggggtcgcgagggcggggagggatgaggaatgatccaaataatattgtccattggatttggtctgagtgtaatttgtttggtggatttagtggaggttatggatgtgtgggtgatttggttgtgtttgcaaaattgcaaccgcccccaccacatgtgcacgtcctcactaatcgttcccaccgcttgtcacttaacatcaaccgcctcgaggaactgtcgacggactacatggacgcggagagagacatcaagcccttcgtctcccctatcatggccaccaccatccagcataggcggagcctccatggccccaacgcttctcagccaactgcattggcatcggagcacgatggcactccagtgttaccgcaaactcagcctcaagcagcatgcgtcttgaacaaggccgcttcagaggtgtcaggtgacgtcagcgaccagtccattagtgcctacgagacactcgagggtacctcgactcgtcggccttgctctgcaccacgattgagcaggaaattctggggcgccggcgattatgacgcggcggcggggaggtccacgccacaacctctaagtctacagaatcgcatgtgcgtccaccccgaatttctccactctaatgcgacttcacataagtggccgtttggagccttggcagagttgttggacaatgcagtcgatgagatagaaactggtggtgctacaacaatattgttggacaaagtcaccgacaaacggaatggatcaccagctatactaattcaagatggaaatggttttaagactagcacaatgcggcttggggcagatgttattgttttcagtcgctgcactaagagcagtgggcctacacaatccattggtctcctctcttacactttcttggtggaaactggacatacagatgttgtagttcctgtggtggattataaatgcaatctaatgaaaggacaaactcaacgactggagcgtcatggttcggaacaattcttctcaaatttgtcagcattgttgaaatggtccccttttgcaacagaagaagagctgatgcagaatttctgtgacattggtccacatggcaccaagattatagtgttcaatctgtggtccaacgacgatggtaatttggagctcgactttgacacagatccggaggatattatgattagtggagcgccaaatccagaagaaattagaaattctgtaaaaagggctaatgagaaccatttggcaaatcgactacgctattctcttagggtctatgcttctgtgttgtatctgcagctaccagattactttaggatcatacttcgagggcaagaagttaagcgtcatcgcattgccgctgacctaatatatcctgaatgcatcagttataaaccacatagttgtggaataaaagaggctacggttcttacaaccattggattcttaaagggtgccccaactattagcgtgcacggatttaatatctatcataaaaatcgccttattttgccatttcatagagttctgaatacttcaagcagcaaaggtagaagcgtctctggggtgttggaggtagacttcatcaagcccactcatgacaaacaggactttgagaagtcacagctgttccagaagctgatcaaccgcctgaaggagatgactaacgagtactgggaactttacagtgacaagattggatacatgaaaaagccacgcgtgagtgcagctcctcttcctcctccagtaatgctgccgatagcaaatggcactgctgaaccatcagataggagcgcacctgctccgacgcaacccttgaggtcgcacagcaactacttgaatgcagttccaatcgcctcagcgccccctggttttcactcagcacctgtcaaagcagagagcgttgcaccaggagcgcatatgggctactccccgtcctcgctaaacgcgcagaccatgcaagtcaacgggataaaatcgccttccatggtgcctgccaccgattcggtagacacaagaaaaaggaggaacgacgacactactactatgacggtcgcgtttaaaaggaaggctacgcaggatttggctggcagcagctgtgctactgatgagacaaaacaggtatccgggtatatggggatgggagagcgagagacgaaggaattttgcttcctgaagatggaaaaccggatgctccgtgaagagtgctcggattttgttatggcagagaaggcactacgactcaaggaacagaatttacggctcgagattgagaaggcgcgggagcaattcaagagcctactgaacgaatacgtttcgttgtcagctacgccgacacagaaacggtaggcatcgtcccgaagccaccggccgtggccggcggcttgtgcactcgtgctagctcttcacgacatgtgggtatgttcagaatgccagagaaccgaatgctagcaaggaagcggtgatgcttctggacggctttgccggtggcggtgtagacatagcgcgaaaggcgtgtgtaccaagctctcagaaactcgactttggtttattctccagtgtcgagtgattagatactgtacatacttgtaaaacaagaggtcaccttttctgtgtgacgaaaaaatatatatatttcgaaaattg

SEQ ID NO: 25181 - DNA, 1883 bp, Zea Mays
ctcccagtttccgtttttttaatgctttgtttactcgcggggatcatggggtaatcgcgtgggccgtgcctggctgggtttatttatgccgacctgccaattggagcaaatcccctttcctgcccctccccctccgcctttcctctctctcgctctcctcctctcctctcctctccttccgcatcacacaccacgactcccaaccgccggttggctttgctgctccgagctcttccacacccgccctctctcttgtgggtcggcggccgagtgtctgcgtcgtccacggagatcagggatcggcggcggggtatggcgagggagcgtcgggagataaagaggatagagagcgcggcggcgcggcaggtcacgttctccaagcgccgccgcggcctcttcaagaaggctgaggagctctccgtgctgtgcgatgccgacgtcgcgctcatcgtcttctcctccacgggaaagctctcccagttcgccagctccagtatgaatgagatcattgacaagtacagcacacattctaaaaacctggggaaagcagaacagccttcacttgacttgaacttagaacatagcaaatatgcaaatttgaatgagcaacttgtggaagcaagccttcgactcaggcagatgagaggtgaagaacttgagggattgagtgttgaagaactccagcaattggagaagaatctggaatctggtctgcatagggtccttcaaacaaaggatcaacaattcttggaacagatcagcgacctcgaacaaaagtaatggtgggagcgagtagcggccttggtccagtgcagccaaaggcggaggtcggagtccacattctttatgatttgactggatatctttcaaagttccacggagtggaggttatcatcgtggatttaactggaggttatcatcgtggatttaactggaggttatcaccgtggattgaactcttctatcgcgcaatccatgccctaaacatctcagttcttcagctccccaaatcatgggtaccaggacgccgagccaggaccaaacctgcacatagacagaagagacgcacctgctcctccggggttgacagcaagggaatctgttttcttgcagagggcacactttagtttaaagcatgtactctctctattccaaattagtacacaactggcagaggagaacaggcaactgaggaatcaagtatcccacatacccccagttggcaagcaatcagttgctgatgctgaaaatgttatcgctgaagatgggcaatcctctgaatcagtcatgactgcgttgcattctgggagttcacaggataatgatgatggttcggatgtctctctaaaattagggctgccttgtgttgcatggaagtgaaaaaacaagatggtctgtgttgatctgggtggagctgcggcttcagcagataggcacttgtgttattgtcttatggacgacccccgactactgcaataatcttgcatcggaagcgagatcagttaacctgatttgtcatccttgtggcttcatgatgcgatgttgcgcttgtaccgtttgctaggatgttaactggactagaatcgtgtctacttttgtactgctcgtgaatcctatctactttgtgctatccaaagttatgacctaccacttgcatcggcatggcgcgccggccgtaagctgtgctcaagcatgcatgcttcgtgttatacgtgtgtacttattgggaagttgagtctgcatacaacctgagcgtagttgttgtcttacagagaccgtttagttttcagaaccgctttccccatgtctcgtttggatccttagaattgaatttcattatgataatagtaatttatacaaaaatcaattaaggtaatatgatt

SEQ ID NO: 25182 - DNA, 3104 bp, Zea Mays
cacaagcgcccccctcgtcgcagtcccgccgttacatggcccgctctgttcccctttccggcgcccgcgacggactgcgacgagcggatagatagatctgtgccccgtccctgtctcgccatcctcctttctcctcctccactccctatcgactatcgagcagagcgaatccttagcggggaagtctttccgagctcagggagtggggtttaaaacgcggctcgacgaaaggaaggccgcactcgctgctgctgctggtcgcttgctttcggtggcgagcgtctcggtaaagcggcgtcggcgtcggaggcggcggcagagactggacttgcttgctccttgctgcgcagtgtagtgctgtgctaccttggagacaggatcctgccgcagggactcataattgatcagtgtgccccaacataagagcgaaacgtgactgagtttgccagctcccccttcatccactgtggtcgctcgtctgctaatgcccgcatcggaggattgctcacggatatgcttctggtgatgggcaacccggggcgctcgcggcagttgtcagcgctggttgcttccgccgccatcttgctgtcactgtccgcgttgccaatttgtcggccctacacctacgagcaagatgtgtttgcgataaacggcttgtacacggcacttggagcaccacagctgcctaattggacttcaaatggtggtgacccctgcaatgaaggctggcaaggtgtttcatgtgtagcgtcaaatataacctccataattctcagcggtgcaaatttaggtggacagctgggcaacactttggggaattttacatcattaatcaccttggatctcagcaacaacaatattggagggaccataccagatggtctaccactcacaatgcagagatttttcctttcagctaaccaactaagtggtagccttccaagtacattgtcatcccttacacttttgacaagcatgtcactcaatagcaatcatttgactggagcgataccagatgtattttcagcactcactggacttgcaaatttagatttttctgataacaatttgaccggtccgttgccaccttcaatgggaaatttgacatcattgactagcctacatattcagaacaatcaaatatctggaactcttaatgtgttgcaagatctccctttccaagatttgaacgttgaaaacaaccttttctctggtcccgtgcctgtgaaattactgaacttgccaaacttcaagaaggatgggaacccattcaatacaagcatagctccatctgcgcagcctcccatcgcgccaacaccattaccgtctatcccaccttcgtcagggcatgtcccctcaaaagaacctgcacattcttctagtgttccaggtggtagtacttcaggatcaggaaaacatactacactcaaattagttggatatattcttattggagtggtattagcagtagttcttgtgctaattgcaatgtactgtttatccaagtacaaagaaaaaaggtcgagagatgatatttatatgaaaaacaagataggaagggtacctcagaagcttggagagcctaaaatcaaggagccaccattaaaactcaagaatgatgctgagaaagctccgaatgttgtttctgatggaagagaggagcataagttaaaagtgccaacatcagaaacttcaaatgtggtttatgatccaagtccaagggatggggcagaacttagattcatcaccgacagccgatggcactgcggactgaaaaagtcactgtcaatcccagtgtacgtacaagaaggggaagagtaccttcagttgaaaaggtggaatcgacgactactgtcaagtccttttccattgcatcccttcaacaatataccaatagtttcagtgaggaaaatatcataagagacagcaggtttggtaaggtgtatctggcaaagcttcctgatggagagctactggaaattttgaagattgactcttctaactcaaaagtgccagtagatgcctttcttgagctagttgtgaggatttctgaactgaggcatcctaacatacttggtcttgttggatactgtgcggagtttgagcagcgattacttgtctatgagtactgtagcaagatgaccctacatgatgaacttcgtcatgtggatgactcaagcaagccattatcgtggaatgctcgcctccaagttgcttcagaggcagcaaaagcattgcaacatcttcatgacggttgccaaccaccagttgtacaccagaattttgaaccctctgttgttctgctcaacagcaccttagttgtgcatatttctgaatgtggccttgcatcactagcatcaaaatcagtttctcagttgtctggacacaccttattccattatgaagcacctgaagtgcatgaatctggatcagtaagcgatcgaagtgatgtttacagcttcggtgtagttatgttggagcttctaacaggacgtaaaccttatgacagttcgtatccacgagctgaacaacatctagtacgatgggccacttctcaactctatgatattgatgccataacgaagatggttgatccttccattcgaggacaatgttctgataaggcattatcccgttttgctgacattattagccgctgcattcagcatgaaccagaattcaggccaccaatgtctgaagttgtccaagacttaactcgcatgatgcctttgacgaccattgatgcggtagtaggatattttggccaatgcaaaatgggtggaacacagtggcaggatgcagagactgcaccacgttttgtccactgccagtaatgctcctctgaatctctggtcaatttatagttcaaagctattgttgtaattctgtagtctgcactctgcacaatatatttcttagtgcccagttccagatcacgtggtgtgattatgcgtggttatctagaccatatgtaaataccaagaagttaaacaaatgtattatagcgtgcttgtttgaggaatgagaaagtacatcttcttactcctcactttattatttgatttgttaaatgaaatgagttggtccatcatatttcattcttt

SEQ ID NO: 25183 - DNA, 2937 bp, Zea Mays
gaaaatctagcctgtgccgtgttgtgctggcgagcggatcctccgctcaaagaagaagaattcagcccaatcttcagatgatgctgacaatggaaatgtgaaataccttgaagtactggagtgtattccacaggcatctgcaagaaaacatggagctagtactactgataagtcagaaaccagtaagattgcagatgtacatagcaaaccagtttatggcaatcatgataggattcagacagggccaagtccctcaaatctgaacacttctattagagatgatggcaaggaggcaaagtaccgacacattcgttattgcgagaatggtgaaatggggcaatcattgagagtaagagacatgtccccgaagtctccaatcaatcacatttcagacaataatcggagtgagtaccacttgaagcagaggtacagctattctactaaggaatgccctggtgaaagaaacttggatggtccaagcaaagtcaggggacttgagaaagaccgcgctgagatcttgaggatgcttgatgagttgagagaccaggtacagcaatcttgcaatgcgactaatggggcaagtggaattgccccatctactgcagcagcagattccaacagttcacatggtacttctgaccggttgagtcaattgaggcaggttgcaccacaattgcatcagaatggttcacatcactccccatccttgaatgttggaagtcctagcgtttctcgtgtttatgctccgctgcctgcacaacaagattgtgtcagatatgcagagcctatttcacatgctcgagcctctagctatcctgccagcctctatccatggagaaattttgataattatttctttggacagcatgatcccgatcctcttctctcttgccgccatgatggcttctatcaccaagctgcctgttcttgcttgcactgttgccaccaagaattcttgcctatacagggaaatcacataggcttccatgatcaaagggcaccatatcttctgaacaattatggggcttatcctgtggacagtcccttacttggtcagcaaagatacagtgcaagagttaccaatactaccttgcagcagaatcacatgagggtcaacgttagcaagaaggctgcacagacttgtgagccagtcgcaggtggtgctccattcaccatatgctgcaattgctacgaagttctacagataccaaggaaacagtccctgtcagggaacgagtataaattgcgttgtggatcatgctcacatgcaattatagtcaagcttgatggaaacaggctcaatgtatcagaatttgcactatgtacacgtttatctgatggacaggaaaatgacatgggaaccgatgggcaaactcaagacaataggtccattccagcttaccatttatctgttggaagtcctgcatctcaagaacgagatctgcactcaaatttgagcgagtcagagaacaatcatacccctctaggaactgactcagagggcacttccctgtccagggatcttcctgctgaagacagtgcagtttcccatgtaccaaatttaccacatcacagtcattctggatcatctccaactgaacattttggagtgggaagtagaagtacccattctgaacctgaaaaagttatactattaactgaaagttccaagcagacctcagttagaggtatatgtgtaacaaacaagatgcaatctccaaacaatgagtttgatgttcctgaatacacagatgatacattaaatgaccaacaagatactgaccaccctagaacaacaaaggccagtgattcctttctcactaatctgataaaaaggagcttcaaaattaataatggattgcgcaacagaagagcaagggtttatgtaaatggctttcctatctctgatcatgtggtccgaaaggctgagaagctagcaggatcaatctgccctggcaattattggtatgactaccatgctggcttctggggcgttatgggacatccctgccttggcatgataccgccttatattcctgagttcaatttccccatgcccaagaactgtgctggtggaaacaccagcatatttgttaatggaagagagcttcaccagaaggatttggatttacttgtcactagaggactctctgattcccctggtagatcttatgtagttgaaaattctggaaaggtttcagatgaagtatctggtgaagagctttatggccttggaaagcttgcaccaacagttgagaaaatggggcggggatttggcatgcgcatcccaaggttcatcaagcgacaggccaacttggtacagctagacttctaaaccttgaaggcaaatcgatggggcgtggatttggcatgcgcatcccaaggttcatcaagcgacaggccaattcgatctaccgtggttacttcaattgtgaagaaagttccattccatgtacatagctgatggcggacgaagctggccttcggctgaagtgctaccaagaaaaacccctggaagtgctgcctataaaagctgaagtagtgtgaagagaagcttcgtctaacacatacaaacggcaagggtgtaactcgaagccacaagcctcggcatgaagaggctttcaggtgtaaagtgacgaagtagacgaagtctgagacttgtgcagcaagaaagaaagagaaaagatagcaatgtccctgcatcgttcgtaaacatgtgtgtaaactttatggatatgtttgtaattttccacgaagctatttatcttcgctataaataggtgaacaatgctctacataaattcacctttttgaggaccttaccttcgttttgcttagccttcgaagtatctttgagccatcttgtgtggagaagccgaacgtatgtttgtaaactcgtttaatacgaagagaaagggaatgaaaatgctaaggcat

SEQ ID NO: 25184 - DNA, 1214 bp, Zea Mays
caggtattggtgttgggattagcggcgcagaaggaattatgctgtcaagcgtcctatttgcaagagataaatggcttacgcccgaggggcttattcttccttatcatgatcaagaagtggaatacttgttctaagggtcccaagttgggtggtggtggtgggaagcgttttcaggtcggtcgtgactttggttatccactgaaaagatatgcttggtggtgctttcttgtgttgaagaacaagtatcccacggaaccacaaccgtttgtattatctggtgatttcctacattattagctggcctaactaaaccatgcgctcagaccctaaaccagctgtaagtctgtaacttaaaagcacagtgcactagcggaatggggttccttgctttttggagcgtttccccagtcagatcggcggcagggcaggtcacgtggacggggctccttgttgctggaactaaataccgtggagagtttgaagtgagactaaagaaacttatggaggaaattaagcaaaatgaagacattattctctttattgattaagtgcacacactgattggagcaggtgcagcagaagtgcattggtgccacaacactggatgagtataggaagcatatagagaaagatcctgccttggaaagaaggtttcaaccagttaaggttccagagcctactatggatgaaacaatacagatcttaagaggacttcgtgagagatatgaacttcatcacaaactgagatacacagatgatgctttaattgctgctgcacagctgtcttatcagtatatcagcgatcgttttctgcctgacaaagccattgacttgattgatgaagctggatctcgtgttaggctgaggcatgcgcagctccctgatgaagccaaagagctggacaaagagctgcggcagataagcaagcagaaaaatgaggctgtacgtggccaagattttgagaaggtatactgttgtttggcacagcggtgacaaagccgatccgctcccacctctctagcaacgtcgatatggttaataccaagcattatgttgtttccttttgagataaatattttgttactgattttaccttttgtctcctcttcttgttttttgttctagaatctgtagcaaatggctaacgatgaggatatccattactttgtttatgacaataaaactgatatgttcaagattccgtagcaacgcac

SEQ ID NO: 25185 - DNA, 2746 bp, Zea Mays
gtccgctcgtcaatcgtcctccttcgggcttcggcacagcaagcaccacccccttcgccaccgccaccatcaccgctaccgctacggcttcccacctcaaaaccctaaccctaaaccccctccgcgcgggagccctcgcccatggagaaccccaggccccaggccccagcactcacccctcccatggccccgctccccgtccccatccacccgccaatcgccccaatccccgtccctccgccccgcgtgcccgcccccgccccagccgccgccgcttccatggcctccacacccactccctccactggggacggaggcgaggccgagtacgaagtctccgacgaccaccgcgccgcgcgggagcgccacgagcgcgcggtgcaggagctcctccagcggcgccgcgcctacgccatggccgtacccaccaacgactccgctgtgcgggcccgcctccgccgcctcggcgagcccatcacgctattcggcgagcgcgagatggagcgccgcgaccgcctccgagccctcatggtccggctcgaggccgatggccaggtcgaccgtctcctccgcgcgcaggaggacgaccaggccgcgcgcatcggcgaggaggaggaggaggagcagatcgagtaccccttcttcaccgagggctcgcaggagcttctcaaggcgcgccttgacattgcacggtactcgctgccccgtgccaaggccaggatcgagagggccaagcgacgccacgaggaccctgatgaggatccagaggcggaggccgaactcgtcgtcaagcaggccggggagtttgtgctcgagtgcagtgagattggagatgatcgcccgctcactggctgttccttctctcgtgatgcatcgatgctcgccacaagggaagatctggtgcagcggcgagagctatctcattgagtcatcaagtcgtgggtgccaagcagtttctctgcatttgtgggggaaggaggattgtcacggtttatccctttcccagaccccactcatgtgggagcctccaacattggtcctgcttgagcttaattgagattagtttctcaccgcaagagaactgcaactatttcgatttttagtatctgaagtcactgggctgctaggaagccaggatcaggtattcaggtttgcttttcttctagtggatagagaatgaccaacatattatcaatccaaaattcccgtttggaacttgtatccctacccaatgcacataattctccctttttaacaaaccttggtagaacataaagctgaagttagacatctgtactgtcccccgtggtattgagtattatcaaaataacagcaataagaccatgttcagcgatatttaccttgagccgttaattgaaatcagttagcagttcgtatgcacagaaataagattgttaactgaagttaaacaacttatctatgttaccagtgtcatgtgcaactagttgcttattaaatgttatgatgtctatcatatatttacatttgttttgagctttaacatggtagattatgttctcgtactcttgcttccttttcaggaaataaccatttgcttatccacattgtgtagttcctggagtggaatagtcaaagtatggagcatgccacaaataactaaggttgcaaccttgaaaggtcacacagaacgtgcaactgatgttgtcttctctcctgctgatgactgcttagcaacagcttcagctgatagaactgcaaaattatggaaaccagatgggtcacttttgatgtcttttgatggccaccttgatcgtcttgctcgccttgcttttcatccatctggaaagtaccttggtacagctagctttgacaagacttggagattgtgggacatcaatactggcaaggaactgctactccaagaggggcacagcagaagtgtatatggagttagctttcaccctgatggttctttggcagcatcttgtggtcttgatgcatatgctcgagtatgggatctgagatctggaagattgttctttacactcaagggccatgtgaaacctgtcctaggagtcagcttctctcctaatggttatctggttgcaactggaagtgaagacaatttctgtcggatatgggatttgaggaaaaggcaaatgttgtattctattccagctcataagagtattatttcacatgtgaaatttgaaccccaagaagggtattatttagcgacttcttcctatgacaccaaagcagccctgtggtcagctcgtgattacaaaccaatcaaaagtttggtgggccatgagtcgaaggttactagtttggatattagtggagatggacagaagattgtgactgtgtcgcttgatcgtacgataaaaatttggtcatgcagaagtagcacacaagataatgagatggaactggattgagacaattgggttcattgttgccagccccgcttctctattcatcagctagaagtagatattctccctttttgctgatcagacattccaatcagtcattggtgctattgcacggaactatttcatagcatgtataaacccttggcttgagaaatatgttctgcacttactttgctgatattccttgtcatatactagggctagtttggctaccccattttttaagggattttcatttttctaacgacccgtttggatcattagaatttaacaatagtaattttggcatatattaattaagctaattcagttttatacaaaatata

SEQ ID NO: 25186 - DNA, 2785 bp, Zea Mays
tttggtagcacatagcactagtcacgtccatgtccatcccggcccttggtagcactaacatcgaagcatcctcctccgtccacgacccacaccgccgtgctcaaattcggccttgccagcgccgccgagcgtccagcgccgacccaagcacgtgaggagttggacaccaccgagaggaactctctggtcctgctcgtggtggtcgtcgtcatcgcttcccgggcctgagaactgtgactgtagactacaattgcatcctgaagaataaaatggaccaacatgattccatggctgactcaccaaggaggcggcacaaccttttgcgtgacaaggtccaattggtgaaaaggaaagattcagatcgctatgagatcgtccgcttccatgatccactgtcttttgagaaaggcttctttgttgtgatccgtgcttgccagcttttggcacagcacaatgacgggataatatttgttggtgttgctggcccctctggtgctgggaagactgtgttcactgagaaggtggtcaatttcatgcctgatgttgctgtgatatcaatggacaactataatgacgcaactcgcatagtcgatggcaattttgatgatccacgtctgacagactatgacacactgctggaaaatatacatggtctgaaggaaggaaggtcagttcaggttccaatatatgatttcaagtcaagctgccggactggttatagaacagttgatgtccctagctcccgaattgttatcattgaaggtatttatgcactgagtgagaagttacggccagtgatagacttgcgtgtttctgtcactggtggtgttcattttgacctagtcaagagggttttaagggatatacagcgagctggccaggagcctgaagaaataattcatcagatctctgaaacggtttatccaatgtacaaggctttcatcgaaccagatttggagaccgcacatattaagatcatcaacaagttcaacccattttcagggttccaaaatcctatgtacattctaaagtcaccaaggtctctaggacctgagaaaatcaaggctgtgcttggtgatgatcatacggaaagcaacgaagaaacttatgatatatatctgcttccacctggtgaagacccagaagcatgccaatcttacttgagaatgcggaatagggaagggaaatataatctaatgtttgaggaatgggtgaccgacaattcttttatcatatcaccaaggatcacttttgaagtcagtgttcgtcttcttggtggtttgatggcattgggatatactatagcagctatactgaagagaagcactcgtgttttttctgatggcaaggcaactgttaaaattgattggctggaacaacttaacagacaatatatacaagtgcaaggaagagatcggctttatgttaaatctgtagcggatcagttaggtttggatggttcttacataccacgcacatatattgaacaaattcagctggagaaattgattaatgatgttatggcgttaccagaagatttgaagacaaagctcagcatcgacgatgagctggtctcaagtccaaaggaagccttttcccgtgtttcggctgatcggagaaacaaacttatgaagagtggcctatctcaatcatattcaacacacggagacaaaaatattgtgaaattgagtaaactaacagaaaccaataggaggtttggtggagggcgggcccttgaaccgcctgctatcaaccagggtgcaatcacccagctttcagaacagatatcaacattgaatgaaaggatggatgagtttacctctcgagttgaagaactcaactcgaaatttacagtgaaaaaacatttgcccagtcagcagaacttagctcttccaaatgatgcttgcaatggttccacgcctacaaatctctttgtctctcatttaggcaatggtactctgatacctcattcttcatcatcaaaccaactttcaaaggattccccgatgatagaagagattatgaacataacaagaggtcagcgccaggttatacatcagctcgacaatctgacaaatctgcttcacgagcatttggtcttaacacgccagactaataataccgccagcaggaaccgggtgctggatagcgacacactcatctgtccacttatttgcctgactgttgccagtatcggttacttcatgtttaaaggtctcagtaggggctgagcaaagtgagttggcccaaacatgtgctccgaggctcaccaccaagttttggcagaactggagctaaaggaagacagttcttgaaccgtttacatcaggaagatcatatctaacagcttacggtcttattaagacaggtaaacctatataccagcacatggaacaaagctttcgcttttcagggagttattactcccaaacgcagaaaatggtgtaccagaagcatacacttctgtaacaggcactgacagttcccagtgctaataaattttggaggttaaaataatgctcagataatgtcgaagaaattatgagagatctataagtttaactgaacattgtcgttgtctttgtcgtgatttctgagtgcgagcactatctcatgatgccatctgaattcacgattctacaaaattgtcttttattttattctcacaagtaaccgggattaacaattgctgcatatttgacgttccgtatggtacaactgtcggaaacgttgaaacggaggagagggtgtagaattcgtcgcgcgctaaaaataacaaagaaaa

SEQ ID NO: 25187 - DNA, 2234 bp, Zea Mays
cttcctcttccctcggctcttcgcgcctcgcctcgcctcgcctatatataacagtctcgcgccaatcccctcattcatcagacggactcacagctcgcagcacctgcaccacttgacaaccagccagctagctaaccaaccggcggagccaagaacaagcaagagacaacttgccccgtccaggcagcatgtgcaactccaacgtcaagtccgcgggcgtcgcccagatcgacggccgcccggtgctgcagccggcgggcaaccgcgtggcggcgccggacgccgcccgcccgctcaagaagtccctgcacaagtccttctccatgccgccttcctacgacaacaatgccaccgtgcccgcccgtcccgcccctgccgagaacacccgtgcggcgccggcgccgccttctctgctgcctcctacgacgccggccccggccccggccgccgcgagggcgaccaaggcggcgggcgccgtgcccgcggagaagcccaggtccaaggccaggaagcccggcgccgtgctgccggtggcgacgttcgcggcgccagaggcgttcgagccggcggggagcatcgccgcggcgcggcgggagcatgccgcgcaggcgcaggcgcagcgcaagtcgcggatcgcgcactacggccgcaccgcgtccttctcccgggtggagggccgagtcggcgccaccgccacggccgagccggccgtcccagcctcccccaccaccgggctcgacgagaagcgctgtagcttcatcacgccctactctgaccccttgtatgtggcgtaccacgacgaggagtggggagtgcccgtgcacgacgacgagttgctgttcgagatgctcacactgtctggcgtgcaagtcggggccgattggacttccatcctcaagaaaagacacgtctacagggaggcgttctccggcttcgacgtggatgcggtcgccaagtacaccgagaagcagatggcgtcgctgagcgccgactacgggctggatttgggcaccgtcagaggaaccgtcaacaacgcctgccggattcttgaggtaccgtcgtcaacttgattgacctcagtcctcagttgaagttggtagtgtttctgataagatactagtagttccagtaccacatctcgcaaccgaagcttaaccgaaagatgaagggaagcggtcaattaatgaagggaaggccttaggcctgtatgaaacgaaaccagtttagcaactgaaagcgaagtcttagctgaatccctgaaccctctccgtctgagccgcgttctgccctttattatttataaaggtgaccaccctggcgatgcgccgcggagcaagtgcgtcgtaaaagcagctgggcacagccaaaaagagtgagcccttgttaatgggcattttggggacggagcaggaaaagatgctggttgtacttgttcgtcacgcctttattagttttaagctttgcttcttcacattctcgcgaacgcaagatgatgtcccgcgcgtctccggcagaggagtaccgtgtgttgcgcaccactctgtcgcggacaaggttccattttccaaaacgggccactgtttagccggttccctctaaccaccaatcaggcagtgctcggtagctgctgccacaccacctaaactaatctatctatcggtcaagtagttactactattggtgcggagggacttttgctcgctggacaagtacgtgtgggcgttcgtgaacaacaagccgctgtcgccgagctacaagtacagccggaagatcccggtgaagacgtccaagtcggagtccatcagcaaggacatggtccggcgcggcttccgcttcgtcggccccactgtcatccactccttcatggaggcggtcgggctcaccaacgaccacctcgtctcgtgcccgcgccaccgcgtctgctccgccgccgcccgcgtaaataactgattctgctgacgaccaccaagcaaaacacaagagggaattatctaaggacaaccaagacgagagagagagagagaggtagcagtagtaatatacaaaagagagtgttggcggtttgcatgtgtgtatgatgacccagtgtgcttgtgtagattaattacggcctctgattagcgaatgaatgatcttgcttgctgtgaattgcatgcccctctggaccgctttaagggcatatgaagagacaccaaaacaattctctacaagagataactaatagactttattat

SEQ ID NO: 25188 - DNA, 1081 bp, Zea Mays
aacaatgacgcctcgcgctcccacctactgacccaccccacgccgcctcctctcccagtgggtcctccgcatctcccatctcccgtctcccctcttcctcctcccctgcgatctccaccgcatcacctccctcgaaccctagacccacccacgcgcccattgccttcggtcgccatgtccgccgctcagcttctccgtcactcgcgcaagctgcggagtttgcaaaatcctgtaggttgtgagaattttagttttgttcggcatttctccagcggttctgggtcctttatcgccagggaaaatggtattggaaaaagaaccagaggtaccagattttcccagcataaccagcctgcaaaacagctcgagacattctcagcaggagtaaatggaagctgcacatggagaatagcatccaacagccttaccccaagtgctgctagctggctcagtggttcattctcatgtggacaggtagtctcagcacggccattctcaagtagtgcagacctgcctccacatcaagaaattgggatgccgtctctttcacctacaatgactgagggaaacattgccaagtggcttaagaaggaaggagacaaggtctcccctggtgaggttctctgcgaagtggaaactgacaaagccactgtggagatggagtgcatggaagagggctatcttgctaagattattcatggagatggtgcgaaggagattaaagttggtgaggtcattgctataactgtagaagaagagggtgacatcgagaagttgaaggattataagccgtcatcttcagctgaacctgtagctcctgctgaaccaaaggctgaaccagaaccctcacagccgaaggcggaggaaaaaaagcctacgcaggctcctgaggcgaagaccccgaagattgaagaagcttctcaatctggagatcgtatatttgccagccctcttgcccgtaaattggctgaagataacaatgtcccactatcaagtgtgaaaggtactggtcctgatggtcgtattttgaaggcagacattgaagattacttgggttatataatgttgtggcctcacaggc

SEQ ID NO: 25189 - DNA, 1087 bp, Zea Mays
ataaagaaaattccattggtgatgcagaagaagaaaaataagcatgccaatgttaagagtaatcatgatacggcagatgctgtggtggaatttctgtcagacagtaaatatgatgctccactgaagctaaagaagaagagcaaaaagaagaaaatggaaagtagtggtcctgcagtcgtatatgaaagttcagttgttactgaagatgctggagcatctaagctgaagaaaaagaaaaggaaggtaaagggagggaaggtctctgctgggattactgatgcagaagaaattctgcatgaaaatcaaattgaagaaactagtgcactgagtgaagatgtggataatgaagagcctcagaaattaaagaggggaaagaaaatggaagttaaaaaatctgggaaggccaagaagaaggacaagcatgcatcgcgtaaagataataacaacttggagagacatgttgatgttagtactgcaaacgctgatgagaatatgagattccattagttgatgaagactgctctagaggactgaaaaaatggatcttggagtgcaaacacaagagacctggcttgaaagccttgcaagaagcaatagatgaatttattgttgctcatgaggaacaacaagagaaggtgagtgtttcttctgtgacatatatatcctctgatgaaaccaaacagacaagttgtttgttcctaatacctacttggttatttcaggagaagagagagaggcccgtgcagcagaagatggatgggcagttgttcatcacaaggggaggaaaaagaccacagatgctgaaactggaatagctgttggctctgtatctcttgctgcaatgcaacataaaatggctaaaatgaaacccaaggaagttgatatgaacttctacagatttcagagaagagaagcccacctcagtggtatgtcatcattgcttaacgagacttattatttgttattccactccctgattagctacacatgatagaacccagactatatattgcacattatgaagtgcttggacttggtagttgtaatgcaatgcagttcaccagccacgataaaatgtaatctgttc

SEQ ID NO: 25190 - DNA, 3208 bp, Zea Mays
tggcagtggcggggtgaggtgagagagagtgagactgtgagagtgagagaccactccatctctccttttactctcctctcccctcccgctcgcttttttcagcggggggagagaggccgcggcggcagcttgcagcaccagagagagagagagagcgagcgagcgagcaaaggccaacagatcacagctagctccgccccgccccgcctaccagagttttcaatttcaccgcgacgtcaaaagaaagcagcttttggtggtaatctcttggagcattgcagcggcgagcgagatctgccacgacgcgccagctcctgcagcggcccggcggccccggcctgccactgctactcatctgcgccgctggcagaggagctgccgctaccgctgccgccgcacccattgcctgcccctgcagcctgcccaagcagcaagcacaaagccccatcccgcatcaccctcaggctactccaaactactgcaccgtccactgtcgcccgcgcgcctcagccacgcagtcttatgcatcaatgcatgccctagcattctgcggcttcccccgtgcggcgcccaccgctggagagtagagacacgcggatagcaccaagaccagcgccggctacgtagctgctgctcggtgtctcttcagactcttcttactaggggggaaggaggaggaccaaggcaggcagtcggcagcgaggaggtgaaaagggcagcagctgcccgtgccgtaggagaggccgggcggcggccgcgtacgtccgttgcagcgcgcgcgcgcgcgctctggcctccgtgcgataccacgcgacgctgaatcgccgatcgacatgacgctggaggctctgtgcccgaccagcagcgacgtcctcgtctacgacaccttcaacgccgccgccgcatgcgccgctgcttctgcggggaccttccttttcggcaatgcaccaccggtggaggtgccggcggcggcggcggcccaggcgaacggggagaacagcgtgcagcaggggcggaggaagcggcggcgacggcagaggagcaccaagaacgccgaggacgccgagagccagcggatgacccacatcgccgtcgagcgcaaccgccgccgccagatgaacgagtacctcgccgcgctccgctcgctcatgccggactcctacgtccaccggagcgatcaggcgtccgtggtcagtggcgcaatcgatttcgtgaaggagctggagcagcagctgcaatccctggaggcccagaagctggcgctgaagcggcagctgcagcagcagcagcagcgcagcgtcacggccgcgatacgcgacgacgcggcgcagccggctcgaggccgtgatgacatcggcgcgggcgcgggcggggacgccgcggcgcgcagcgaggtgtcggcgccggagccagacccgcctccgttcgcgcggttcttccggtacccgcagtacgcgcggcggcacgcggcggcgcgggaggacgccggcgcggaggagacgagccgcgcctccgcggtggcggacgtggaggtgggcgtggtggtggacgcgcacgccagcctgcgcgtgatggcgccgcggaggcccgggcagcttctgcggatggtggccgggatgcaggcgctcggcctcgccgtgctgcacctcaacgtggccaccgccgcggtcgacgcgacggcgctctacacgctcagcctcaaggtacgacggcggcgcacactaccggacggatgggtagctagcaaagcgacggtccctttctccttccgtccacggacacggaccaaccgtcgtcgtcaaagcctcgttgcttgtcacacactggctcgttttcttgtgcctgaaatggtgctatcgccgtgctctaacatgcactttggtcaccaccggtgccactgcccctgagcaagtacgtgaccaaaatcctctgtccttttcttttttacaacaaaaagctctctgatgcggagatcgctagattacgtccaccgaaacaaagggacatgatgccagatagtatagcatcccgtccaccgaaaatccgagagagtagagtgtagaggccatttgtatgacacggcaccgcactagcagcagaggcgtccaaacgcagtagcaccgcagcaccattgtccatcgcactgactttgtgcctgctgggccagatctccaaatacagagacatgtagaacacagtacacaccacagtggcttcccctgcgagcccagcacgactgcaccacgagccatgggcgcttgcttttgaccgggagagagagagagagtccagtccagagctcgaaagctgtttgctgcgtttggcaagctgtagcactgggcttttgacgtccctgtctgaacaccttcaaattcgagcagataggataggagtacagtaaaaaaaagaaaaggctgtgtattttcaccgttctcttttttttcgcactaaaggctacgtaaaggagaaaaggacgatcatggagaatcctctcttggcttggcgagcagagcaggcacctggcccgtcgtccattgacatggcgaggagatcgatgtggactgcagagaaagattgtgttgtgtgccgctgccctgcctttttcttttctagtgctgcgtgtttcaggacagcagagactgactgctgagtaagctatatgtgtttgtgtgccccggagccgagccggacccctcaacgtagcaggtggaggaagggtgcgccctggcgacggcggaggagatcgccgcggcggtgcaccacgtcctatgcatcatcgacgccgaggcgacgccgcagaggctgctcgctgccggagcaccagggacagggcagccggacgtctagctagtcaggatgattcaggacgaggtcttcccggcgtaacggggcggcatgggctgcgcggggtgtctgcttccgtttcttgtaaagtgcagtggcgtgcgtgcgtggctggccagcacacgagagcctgatggcgtagcgtaggtacagagtatgtaacgggcaataacacgcaggttcgtgtctggacctgtggtctctcgttcgtgcatgcctatgcgtgcccttgtgtttgcgtgtgacgggaattggaattgaggacgggaagcaggaatgcaggaacagggaagggatcggacgttgttttcttcatgcgctcagcacaactgcgcaagggaaggggagccgtgctgaatcttgc

SEQ ID NO: 25191 - DNA, 3731 bp, Zea Mays
ggaacgaaagcccaatttgcaccaacaacggcccaactcctactctcaggcccggcccactcggttttcttccacgccaatgttcgccaagcggctcttccacagggcactcgtgcatcatcatcagggagtaggaagaggaggaggaggaggagcctcagcaccagcggcatcaccagcggatgccatccaaatggacgcgcagatctcgactcactgcggggtgccatacacagcttcactactcgccttcgatcccgtccagcgcctcctcgctgtcgcaactctggatggtaggataaaaatatttggcggtgataacattgaaggcctccttatatcaccgaagagtgtgccgtacaagtttttgcagtttattacaaaccagggacttctggttgcaatttccaatgaaaatgaaatccaggtatggaatcttgagttcaggcaactattttattcgtcacagtgggatgtcaacattactgcttttgcagtcatagagaggacctttatgatgtatcttggagatgagaatggccttctttctgtattgaagtatgatgtagatgatgggaagcttcaaataatgccatacaatgttcatatccattctctaatcgaaagatctggtgtttcgttacaggatcctcaacctattgttggaatactgatccagcctgacacttttgggacaaggttgctaattgcatatgagagagggttgttggttctttgggatgtatctgaggaccgtgcagtttctgtcagaggctatggggatttacgcatgaagggtcaaatcaatggtgctcagggggattctggtgaagatcaactaaatactactattgatgacagtgaagaagaaagagaaatttgctctctttgttgggcttcaagagagggctcaactgttgcggtgggctatataacaggtgacatacttctatgggatatgactacaaaatcctccagacaagagaagcaaagtgatgtttcatctaatgttgttaagctacagctggcctcagggagtcgtaggcttcctgttattgtcttgcattggtctgctgggtcagcagtacattctaataaaggagggcatctttttgtttatggcggcgatgatatgggatctgaagaagttctcacggttcttagcctggaatcaactgctggattagaatcagtgagatgcatgtcacgaactgatctcaaacttgatggatcatttgctgatatgattcttattcctgatactggggttcctgataaaagcagaacttctgcactttttattttgacaaatcctggacagctgaatttttatgatggtggctctctattttctgtgcaaaactcaaaagagggaactcctcttcctgaagcacagaaatttccagtcgcaattcctacccttgatcccaacataacggtcactggtctttattcgctaaccgaaagtgaatttccaaatatttcactgaagaaattttgtgctaggaaaaatgctgggcatttcatatcagagaacatgaaatggcctttgactggtggggttccaaatgagatgtcactggacgaagatcatgctgttgaaagaatatacattgcaggctaccaagatggttctgtgagaatatgggatgcaacatttcctgttctaatgccaatgtttgtcttggatggaaatgttgctgatgttaatttggatggagctaatgcttctgtatcatctctagccttttgttcattaagcatgactttggctgttgggacaacaagtggtctggtgcgcatctataaactccgagaacacactgggggttcaagcttccattttgtgagtgaatttaagcaagaagttcatgttgttcatcatgggaaaggatttcattgttatgttgcctttttgtcagcaaattcctcagtgctatctctattatttatggcttcaggtggcctccttgctgcaggctatcagaatggtcaggtggcaatgcttgatccaagtcagttatcaattctattcactgtagatggtgcatcaggaacaaattctcctgttgtttccttgggcatctacagtgttgctgcatctgctgcaaaagcagatcaatcaaagaaagataatcctcaaaatgcaacgttatccagagatgttcttctttccttgacaaaggatgctcgtgttactgtacttgactgtacaacgggtgtgatgataaattcacatatcatacatcagaagcaatcatctgctatttccatgtatgtcatagatgcagagtcagacgagacacaaacccaattatcagaggacaaaattccaagtcaaggtcagacagggaaagatggcaatgatcttgacaaaatacaaacccaaggaattgaaaagcacctgaaaaatgcttcccagctttcgcaaaatggtggttcagattcactccttgtggtgtgctgcgaggatgttttgcttttgttatccctggcgtcattgattcagggaagcagcaagcatctacagaagacgaaacttgcaaaaccttgttgctggtcagcagttttcaaaaacatggatgacaaagtttgtgggctgatattagcttatcagactggcactatagaaatgaggtttgggccagatctggctattgttgctgagacctctttgatgtcattattgcgatggagttacaagacaggcatggaaaaatccacaagctcctcaaatggacaagttactttggtaaatggatctgaatttgcgattatctctcttatggcctcagagaatgacttgaggattccagaatctctgccatgccttcatgacaaagtacttgcagcagctgcggaagcagctatgagtttctcaactgatcagagaagaaagcagaatccagcagcagggattattggtggcttcattaaaggaatgaaaggcaaggctgaagaaaatgcaaaaatgagagaaagtttgacattgcgagctccaagcgaacagttggagtcaattttctcgaaagaaccatttgctgaaccttcaatacccgaccttgatgatccgatggaagaactgtcaatcggttctctttctccttccttgtgcatcattttatattgagtgctcccttccctcttgacttgggagtaatgaatgcagatgacatagagattgacgatgaagtagcagtagccctggcacaagcagcatcgtccacatcccaagggaataagagaacagcagtggaggaggagagagcgaagctgtttgaagggtcaaacagtgcggataaaccgagaatgagaacgcagcaggagattctaaccaaatataggtttggcggggacgccgccgccgcagctgctcatgcgaaggataagctgatgcagaggcaggagaaactggagagaattagccaacaaaccgcggagcttcagaatggagcggagaactttgcttccctggcgcaggagctcgcgaaaacaatggagaacaagaagtggtggaagctataaactgggtttgtttgtacgtatgtgtgttgttggatgccacccgtcgttgcgaattgggacacataccagcattaccatttttttgtgtccgtattaatcactttggatattctttttgtgttttggtgatgtacgtgtaaagataaaaaagagagaatgaaaggaaccctcttctcctggctatatgagcgagtctcttattcgtc

SEQ ID NO: 25192 - DNA, 3053 bp, Zea Mays
gcaaatttctccagcccaacacagccagggggacctggagagatctgaattcccagcacactcctgcccgctcctccccgccgatggagatccccaccgctgtcatccaccgcctccagtccgctctccgtgaggccaccttcgccccttctgtagaagatgcacccgcccctcccttcccctccgtcgccgatgccgtcgcagccttcgactcgtgtgccgcctccgtgtcggcggagctccgatgcgtgcgctgcggggcctcgggagggctcctgcgcggtgtgcggtctgccctctgcacctactgcgggtgccccaggcgcggggaggaggctgaaggcggtggaagcggcggcgtcgccttccgtgacggcgtggcctaccagtggctgctcggctcgcttggactcgacggatccgagattgtagaattcgatactgacactacagcttcgaataaaagcaaggatgtaccaccaccaaacagtgggatgatcatatctgatctactggacttaaaaatcacatgcctccctgaaaataaggaaacatctccaagttccataacaaaggagcaatcatcttctgtggatacactaaatttatctgctgctaacttagattcatttttcattgaaagaaaagaagagatgacttctgcttctcttccacaaactcattttttggagcaggaaaataaaagaacagatagcaaaagccatgaatctagattggaagtgcatgctgcacctaaaagcttaattagttctcaaagaacaaatcagattgaagctactccagcatttgcaagttgggatgctgattttcagtctgctagttcagaaaatgctgccaaaaactccaagcaacctgatctatttaagagcacttctgtggccgagtcttttagtttcccagcttcagagattgccatcaaacctgtagtaagtactgaaagtaaaacaaatacgagaagtgccatcctagaacatcactcagaagttttggcttcagcaagtagcacattatttggtgatgacctttctgatcaaaaggttgtccaccatatctttgagagcagcaacgctcctgggttcactgaatcctctctccccatggattttgctaaaagtgatcagttacatggaagggacgatgatggattcaatgatgatgaagcttttgatgaatggcaagaatttacaacaagtggcaatcaaggcagcctatcaaatgcggaacatattgaggaacctttaaagagagatttgtctgagaatgatgtaatagatcccttgcgagtaggcagcaaggaatcacccaacaatgttattgaaaaatcctctaatgaatggcaaggttttgcttctgtgtctggtcaaggaagagattttgtgacatctgtggaacgatcaacaagtgaccacagactaaatttggtgggaccagttggagatgaagagacaatgagcagcatctcacaccaacattcttcagaaattaatcctgttgatgtatggcatgtgggcaatgtgaaggctcaaaatactgcagaaatggttaaggaaaaaaatgattcttttgacgattggcaagattctactaccaccggtcaagtccaggacacttcgttgaatcaaactggggacatgatggaggtctcaaaagccagtcacaaagaaacagacatggactcatggttcattggacattctagggagccagcaaatacgggtaccatgaatgcaaataacatgttggacgattggcaaggtttcactggttcagatcaagcacagcaaaattcatctagcactggtgcagaaatgataagtgtgccatttgagcagcatggtggaactgtttctgccccatcatgggcaaatggcagcagtaatgatgccgcaaaaacatcctcaacaagtatagaaagcgacccatttgatgtttggcaaaattttactaaatcaggtcacctgcaagaaaatatgtctagtcttgggagagaaccgagtagtctgtcgcctgaaccagctaaaggaaatgattccttggatttgtggattaccagcaacttcaaggaatctaaaagcaatgatgttgggagaactaatgcctcatctgatggatggcaggattttgccagttttgatcaagctcagagaattactaaagttcatgtggaaggacatgttgtaaaagatccttcaggggctgaaactttggacttatgggcctcaagtcatgttaatgaaaagaaccttgaacagataagtgaacataatgatctattcgatgactggcaggatttccaaaactccaatccacagcaaacaaccttacaagtttcttcagatgcttcattatttgatataaccttggcatcaaggcctgatgcttttggagagcaggaaattgggagtgttttgcaggtagcttcatccgaaaactcaaaggataaaaaggagggttctaatgaatcaaaagcatttccatctgatgaccacttgaaaagcacaagtggaatgcagcagatgggtgatgttgattcgctgtcttcattatggccagctaataaaccagagcctgcaaatacaaatgtggaacagttgcttgctcagatgcacgatctgtcctttatgctcaaggatgaactttctgtccctgataaacccatcgatcattcaaaaccctgaagtgacaacatcaaaaattgtgctctgttactatcagccaaggaagattgttgttgcaagtccaaccttttgggtgctggacgaattgcaacgaatatcccttgagtggaaaatgcaagtcaagtcacagaaaaccctgttgttccaacagtgccttttatcagagtattggtcagcagaggattgtatttgttttctctgttgcttcgttgcattgatcgtcagagactcagagtcgggttggttccttgactgtccctgagtgaggctgaaaaccacgttttatgtctgcctcttacatatgatgttggcttccagtaattctatagtactacatcattgacctccttgcct

SEQ ID NO: 25193 - DNA, 2539 bp, Zea Mays
cagcgagtcctcccttgctccgtcctcctcgtccctgccgttccccaaacccaaagcagagcagcctcggcttctcttatccggagaggagggcggccgccggcgtcgaccttcgcgaggaaggagaggaggccgttggatctcgctggattcgattgggctaggacgggatctccgcgggcagatgcgctgagctcttggcgtgtgcagtgcacgatggtcgatcttgctgatctcgagggtgcgggcgaggcggcgcgctcgcatcccgccgcttccggccagcgggacaggctggcggcgctgctggagctcgctgcggcggacgacgccgcggggttccgcgaggcgctcgcgggaggaggcggccagggcgacgcagcggagctggcggacggggtcgggctgtggtacggccgaagcaaggcgtacgagccgcgcacgccgctgatggttgcggcgacgtacggcagcgtcgaagtggtgtcgttgctgctcggcctcggatgcgtcgacgtcaaccggcgccccggcgtcgacggcgccaccccgctgcactgcgccgcttccggcggctcgcgaaacgccgtggccgtggtcaagctgctcctggctgccggtgcctgcccggtaacccccgactccgccggtcgcttgcctgccgacgtcatcttgcctcctgcttcgcccgacgccttgggcgatctggatatgctccttggccgccgccgagggctcgctgtcgcgacctcggtaccatcgctctcgtcgtccccgccgctctcgacctcgccggatgaaggtaacaggtcgccatcctcgcggtcgtcttcgttgtcaccgattaccgtggaccgcgccaagaaggagtacccggtggatccgacgctgcccgacatcaaaagcagcgtgtatgcctcggacgaattccgcatgttcgcgttcaaggtgcggccgtgctctagggcctactcgcatgactggacagagtgtccgttcgtgcaccctgccccaacttccgccgccctggaggttgtcccagtggtgatagctgcgagttctcccatggtgttttcgagagctggctccacccatcgcagtaccgcacaaggccctgcaaggagggcgcagcttgtgcccgccgcatctgcttcttcgcccatgatgaagatgagctccgccatgtgcctcacaatagtggtgcaggcctgctgtctccccgagcctcttcatccattgacatgaccgctgctgctgctgctcttgggcttctacctggatctcctaccagacactttgtgccaccacctctgtcaccatctgccgccaacaatggtggaggtgctgctgctcattggcttcaaggtagcaggctacgatcttctttcaatgcaagggatgcacaggttgatgaccttggcgtgctcctggaatgggaatcacaataccttggagctctcagcctcccacaaagcagccgatcccagctgagtattcgtccaaccgcaattgctccatccaatcttgaagagatgtatgcttcagacatggctatgtcgccaagattctccaatgatcaagttcactcagtctactcaccagcacacaaatctgcacttctaaacaagtttcatcatcagcaaaagggccttctgtcgcctgtcaatactaacaggatatactcgcctaggggtcttgatccatcagttctccattctccatttggtggtatgtgtcctcggtcccctcggactatggagccagcatctcccttaactgtctgtgtcggggctactgctacacagcgtgatatgttggatcagttctcttccctgaacaagcatcaggtgccatctgcgggatcgccacggaatcttaatgtctcatggggcaacattggtaccccaaaaagtaaggtggattggggtgttgacaaagatgaactagtccgcttgaggcaccctgtgcaacctggaaatacagaagaggagccagatgtgtcttgggtgcagtcaatggtgaaccatgctgagctgagtggcaagaggggtgaaatggcaggcatggcttctcgaccaactaataggcctgaactgagcagtcaggatgactcactggatgagagtgttattgcttcttggcttgagcagcagatgcacttggagccgaagtaactgtgaaagaggtcttttgctctcaaggtggatgaaaccatctttttgccgggaaagcagtcgctcacagattggtagctgaaagcagctgtcaagaattggtaaacagcctcgttaccttggaggtcctaactagtattcttttgattagttcagatgaggtaaaattcatatattccaccgtgagagtcaatagtatctgtgttggtctctgtaacaagagaggttatagatatttttttttccatttatcattgaacgatttcatgaatacattgataattcccatttattcttctgaatacattttccaatgtttttcctattttctgccatggaaattgcgtatgtgtcaatgctattat

SEQ ID NO: 25194 - DNA, 508 bp, Zea Mays
cagatggcgcatgacgaagaggttgaggaccttggtgatctggacagcacgctgcccgacagcgtgctgcccgaggcatcggaggtggagctggcgccgccatccgatgcgggcgagggcccctcggtgacccccacgccgactggagctggcgaagaccccgcgccagcccctgcactgacgggtgaggacgcctcaaaggtggtgggcgaaccagctacagaacacccagcggcggcggccgggccttcgcaggtggcgggataggggttagggatttaagtgtaaacttttgtttctgtgatactgaacctcggttgctgcgcaagtgccgacgtttgggcctgcgcaagcaaccgctgctgacaatactgattttgtggcggcctcaaccgtagtgcctgttgataatagtttgtttgtctctgtgtctgagtgttttgagtctgatggtgaatctgggagttcgtttccttggatggaggagtcctcggatgaaggcttggat

SEQ ID NO: 25195 - DNA, 2196 bp, Zea Mays
ggaccaaatccgatctcgtggccacggccagaacacacctcctcacgtccacctgacctcttgctcctccccaataatgcccagtgcggcagtgcctgccaccgtctaagcccaccccaagtctccgccgtcaacccgtcctcccccatggccgccgccgccgccatctctctatccttccactttcgtttccgcccgccctttccatctccacgtacccccacgcgccacgctcccttttccttgttctccccttcccttcttgccccctgccgcctccgcgtcgctcccggccgcccctcaccgtccccgtggcgccccgacgtgcgggcgcgcgctggaagcaccatcggggcgccgcctgcgcttgtgcgcccaggcggagccgtggagacggaccgcctcccctccgacgtgcgggaccgggccatggaggcggtcgaccacttcggcggtcgcgtcaccataggagacgtcgcttctcgcgctgggctgcagctcgcgcaggcggagcgcgcgctccaagcactcgccgccgacactgaaggcttcctggaggtatcggaggacggggaggtgctatacgtcttcccaaaggactacagggcaaagctggctggcaaatcgtttaggatgcgggtcgagcctctggttgacaaagccaagcaagtgggtgcttatctggtacgtgtttcatttggcactgcgctcattgcctcaattgtgctggtgtacactacaatcattgccattctctcaagctcaagtgatgaagatggtcgtgggaggcggaggagatcttatggttctactatcatcattccgacggatatgttttggtacttggatgcagattattatagaagacgtcgagtagaaaacgaaaatgggatgaactttattgaatctgtaatttaaaagggtattttcatttgtgtttggggatggtgatccaaacgatgggcttgaagaaaagcggtggaagatgattggacagtatatttcatcaaatggtggagttgttacagctgaagaactggcaccatttcttgatgtgccacctccatcagaagagtccaaggacgatgaatcatttgttcttccagttcttttacgctttcagggacatccagaaattgatgagcagggaaatatcctgtatcgattcccatcgctgcaacgtactgcttcatcaaaaagtggtaggagcagggaatatgtgggtaccaaatggtctgcaatgtttagcggagttgaaaagtacttagaggagaaaccgtggaaattcagtaaagcgaatgcaacagagaaggcgatggttgctggtttgggaggactcaatctctttggtgtcatcattcttggaaacttgttgaagcaaatgacagtgacacctggtggactaatctcatttgccgcacagttatatcctttgcttcagatatacgctggctccttttttgcaatacctttgtttagatggtttctgctacgcaagaccaacaatggcattaaaaagaggaataaggccagagaacagagagctcaggagctcgtgtcaccagattcttctctaagaagaaagttgctcagtgcacgtgatatggctgaacggaaagtaatcacgccagaggagattgtctatactactgaaaaggatctattggagcaggattatgaagtcaaggagtgggagaggagatttaaggagctcgagtcagagtgatggacatgaccgatatacttgacacttgcagtagctctacatggtcctcaccatacttgtcggtgatttttatccgcatccaacggagtggaagatggatctgactgaaccactcgagcaagcgaaactggatggtactggacctcactaattgtcgtgtcaccaccagcccaccactgaccacttcgctatggaagttttgtggaagctgttggtttaattggaaccgaccattatttgcaagatgatgttcgtatctgtgccattgacctgcatatatgtatagttccaatcacggatcaaattcagaatttgacacgaaaaagaaaaaaaacagggaatatggctaggatgctactcggtttgaatggagtccaatcaaaacatgtaaaaaggtcagcctgtgaacagggactcagactgtttgctgcggctttaatccactggctcctgttttttcataaaaaaaa

SEQ ID NO: 25196 - DNA, 1188 bp, Zea Mays
acagggcttcagcagggacgctggtttagcaatggaggcgatccattccttatctgcttcaaaatcaagttatccaatggttgatctcacccaactcttcatgacagctacccaggaaaggaaaagattagaatcgcaaggccagattctcagggtgatatgcacttccatgggcacccgacgacattaaattcacaagaataagaaaccccctccaccttaagggttcaagtaggagccaacgaagaagcaagccccatcgtcatcatggaaggaggaggccatcccacccacgctgacgaggagccaccgaaggagaaggccccaccacccaaggagaaagccgcccaaggaaaccttttcatttcaggtggttgaggttaatgttaaggtggaaagtgcaggcacacataacatgcacaataatgatttctatgctaaagagaagttgctcaaatcaatgcgtgattgtgatccttcgtctttgcgccattggattttccaggccccattgcagcactacactgcgctaatggaccttcaggactattctgagaatggaactgtaaccgtggtatatcgagtgatacttaaaggaactgatggagaggcatatagagatgccacgggcacaacacagttccatgaggggcgcagggaagatgctgttgcagccgcagaggaagctgcattcagcaaagcttgcgcatggttcggttttggcctgtatctgtaccaccaggatgaatctcattacgacgaccacttccattgaggctcaatctgcaaaagagttgatcataagttgtaacatgcgttggatatgcccctagaaaacttcgtatctagaatcaatttttggtctttgcgtagtatcatactcataacacaaagaagtgaacctatgtagatgctatttgaaacctttttattaatattataattcttattaatattattgtataattactttttgagtggagagaaggaaggccttttgcagctaccaagtgacaaaggccttttgcaactaccaaatgacaaagccctcctctcttatccatcattctgcccacttgttgacaaatatgtagcggtatatatatctttgatccttgtcatttgttcggggtcgatttatgttaacctgggtggctgtaataaatatttgtcggccttgtgttttgt

SEQ ID NO: 25197 - DNA, 3418 bp, Zea Mays
attacaatgagttgccactagatatacgcgaagcctctcccacctcatctgcctcgcgtgcggcggcggcgactccacctggcttgcgtcctcccgttttccagccagcaagccagactcctcccctctccgaagactccgatcgtccggattcatccagatccgggcgttctgagtcctgccgaggctctagatcgcgtcgcgcacgatgccacgcgacctgtcgcggtcgcggtctccgccgcgccgacgttggcggtcgccgtctcccgcgcggtaccgcggccggagggggcgcagggaccgaagccccagtcccatccgtagcaggtccccctatcgctcctcgtataggtgaccacacctcccgttacacgcagaaatctggcgagtcttcgttttattttttgggggtttgtactgtaaaaaaaagaagtgaggcgatgctgaccgccttcattgaaattttgtactattgcttgcttgatggaaacggggcttggtgctcttatgattatttgatctatcaactgtttgttggtgttactgttagaggtagccagcgcggtagtatattgtgctatgtcatatctgcatgaactatggtttatgaatgtgcaaatttcataatacttcggagcgatcaagatttctgatttccaaaggaagaaaaatgcttcggattcttttgcattacagagttagaataaaaatacttcgatgcagcatggaatatatcagcagatgaagcttagatatagttatgccatgttttgcactacttgcctgtacagactaacaagagttgctttcgtaaaacgcatggaatctacaaagcttttactctgtgctgtattgctgtggaatgctccacccctgtaacagtgtctaaggtaactgcttttgcccatgttttagggcttcaggagctaatgaaggaggagccctttgccttccccaagaaggcacaagagccgttctccgtctcctaggaggcgcaagagtccgtctccatcacaaaagcgttacagaagaaagagaagtccgagtgtcactagctctccagtcgctgcatctcagagttcccaccttgggttggcagagaataagaatgttattgatacacaaaggctagaagaagaaaagaaaagggaacatgcctcagtagaattgatgaaagaaataaaagaagggtatgtgtgaaatattaccagtatcatttcataaattttacagcagtttgtattaactattgtgcacgtcaccttggaaaccattaattttttttaaaaaaaaatcatgaatgcttcttgagatgtttggtgtagttgtcagagctgtcttactgagtcatcaggtcatgggttcgaagcaacttctccacatttatgtgggaaggctcgcctcggcttatcccttcacagacgctactcatgtgggagcctccagcagtaagtctgcccaatgctccttgagatgtgccatcagaagagtttttttccacataaacacaaagttacagaaaaaattatgcatgatttttattgactattttttgagcaaagagataagctattgccaggattaaaaaaactagaccaacataggaggaaccaggtggcattttattatcaagaagaaaatagccatgcaaattttccttgacgaggactagaacctaggtggcctgggctagccacagaaccacatgctctaccaattgcgatagatcagcttccttaacagtgagcatacggtcaggattgtctgagcatacaaccaggattatgtcatatatgttgattggaattatatattgtgattgcaactgtttgtttgttttttccatgtaggctatctattttgacacagatgttgtcctcagttgtgtttcaggactaaaagttttttagtaattgttcattattgagttagcactcatgtttttcgcttgatttgttgtgtgttggacttctctgtaatatcactatcatatgaactaggcagtagtatgatagatggaggatttctgagttagtttgacctctgcgctgtaatgttatctttagaaggtaaggaaaccgaaaaggctgaatttcaattatcaattatgtaccatgttgtcattgaaattcacttttttgtgctctaaatatgtaatgtagttattttagttcgtttctgatcgcagttttcctgcatacttgagaaaaaagaagcttgtttctgatcctttttttagtcatgccatgtggtatgagataacctgtcaggataaattatccaaaaatcattcctggttatgcagttccactaattagcagtaggtagtttattctataattgtattgaggcttgaattatgattttggttgggcatgtagtaagtagcatccaagaaatatggtttagttggaatatcttaatgcctcatgattagctctaaacctgccacaaattacttgacattcttctctacaggctttaccgaagggagctactgctatagttccacttgttatatttgatgatgcaattggtgatcatttatctactcttgatcagttttgataattcgtttttggatctggaacgaactagaggcgccaaaaggaagttgaactgagactattagagaaggagacggcaaaaagagttgaacaagctattaggaggaaggttgaggagagtctaaattgtgatgaaatcaaacatgaaatacatcgtcgaattgaggaaggacgaaagaggatacatgaggaggtagcaatccagattgagaaggaaaaggatgcagctttaaatgaagccaagctgaaagtggaacaagaaaaaaagaagcgggaggagctagagaaaaaacttgaagaagaacgaaagaaagctgaagaggcgttgatgaaagaagcgttggaacagcagcagaaagagctagagcggtaccaggagttggagaggcttcagaaagaaagagaggaggccatgaaacggaaaaaaatggaggaagagcagcagaggcaaaaccagatgaagctgctgggcaagaacaagtcgcggcctaagctgtcgtttgcttttgggatgaagtagcgttcgattcaccgaacgaaattagtgctttagtatactgtaaccgtgtagtgtagtacctctgtatgaaactgcccatttctaactctggcagacaaattgcgatgtcataaatgctcctgatctgcttcgtaagttgccggctcttggtggatgtggtttcatctgcttcttgctgttcagttggcgttgccttgcgagaagactgccagagaagaatccggttggtttgatcttgcatgtcaccaagatactatctccgtttgtgttgccccctagttcagcctgttcatatttgaactaaaacgtgataaataaaaaaaacgga

SEQ ID NO: 25198 - DNA, 239 bp, Zea Mays
cttccgtgataatattgctaatgcaatatttgccaatgtcaattgaattattttttttcatatatgagtttcaacctagtacaaatatagagggcattcttgtcttcctcatacaaaagaatcctattaacaactcaaataatctgggtaaacaaacagaactactcagattatataatccagattatataatcctccaaaaataatccagattatataatccatggggtaaacaaaca

SEQ ID NO: 25199 - DNA, 3378 bp, Zea Mays
gtctaaaagctaatcccctacgctatctgtatatacaagacggaagcgcgaccccgaaaaaaaaatgtcctccatctccatcctgcacagatcctgcctccgcctaggtctgctgccgttctcaccactgcgtgctcgcgccaccactctacgccttccccttcctcttcctcagccgcggcggcatctccacctgccccgccggagcgccatgagctctgccgcgtccaggctgtcgcacatcgcggctgccaccggcggcgggggcggcgcggccggggagtcgaatgagtcgccgccggccgcatccgccgcgacccaggaagacgatggtctttcatctggggatatgggctaccgccttcctccaaaagaaatacaggacattgttgatgcaccaccacttcctgtcttgtcattctctccaaacaaagataaaattctgtttctgaagcgtcgagcactgccaccactatcagacattgcaaagcctgaggagaagcttgctggtctaaggattgatggaaattctaatactaggagccgaatgtctttctacactggaataagtatccataagctgttagacgatgggactttgggcccagagaaagaggtgcatggatatccagtaggtgcaaggattaattttgtcacctggtcacaagacggccgtcatatatccttcagtattcgagtcgatgaggaagacagcaaaagtggaaagctgagagtgtggattgctgatgtggagtctggagaagcaaggccactttttaaatcgcctgaaatatacctaaatgctatttttgacagctttgtatgggttaatgattgtacactgctagtctgcactattcctgcgacacgtggagatccaccacataagccatcagttccatctggcccgaaaattcaatctaatgagtcaaagaatgtagtccaagcgagaactttccaagatcttctgaaagatgaatatgatgcaaaactatttgattactatgcaacctcacagcttgtgttggcctctttggatggaacagtgaagccaattggccctccagctatatatacatctgttgatccatcaccggatgataaatacataatgctttcttctatccaccgcccatattcctacattgtaccttgtgggaggtttccaaagaaagttgagttgtggactgtagatggaaagtttattagggaactttgtgatttgcccctggctgaggacattccaattacgatgagcagtgtacgcaagggtaagcgctcaattaattggaggccagacaaaccttcgatgctgtactgggtggagacacaagatggtggagatgcaaaagtagaagtctcccctcgtgacatagtttacatggaaaatgctgagcctataaatgtggcacctcttggtgtgatgaatctcttgctttagtgtatgaatcttggtttaaaactcggaaaatcagaacatgggtgctctctcctgataaaaaagatgtcagcccacgcgttttattcgaccggtcttcagaagatgtatactctgaccctggctcaccaatgatgcgaagaactgtgatgggaacatatgtcatcgcaaagatcaagaaagaagacggaaatatttatgtcttgttgaatgggatgggtgccacaccagaaggaaatattccattcctcgatttgtttgatataaatactgggagtaaagagcgtatatgggagagcgacagggaaaagtactatgaaactgttgttgcactgatgtcagacaaaactgacggggaactgctccttgatcagttaaagatacttacgtcgaaagaatcaaaaacagaaaacacacaatattacttgcagacttggccagaaaagaatcaagttaagataacaaatttcccccacccatatcctcagcttgcttcattgtataaggaaatgataagataccagcgaaaggatggagttcaacttacagcaaacttatacctgcccccagggtatgattcatcaaaagatggacctttgccatgtctagtttggtcctaccctggtgaatttaaaagcaaagatgctgctggtcaagttcgtggttcccctaatgaatttccagggattggtgctacatctcctcttctttggttagctagagggtttgtgattctgtctggtccgacaatcccaattatcggtgaaggcgatgaagaggccaatgacagatatgtggaacaactagtaacgagtgcagaggctgcagttgaggaagttgtcaaaagaggggtggctcaccctgataaaattgctgtcggtggtcattcatatggtgcattcatgacagctaatctgctggctcacgctcctcatcttttctgctgtggaatcgctcgctctggagcttacaacaggactctaactccatttggttttcagaacgaggatagaacactctgggaggcaacaaacacatatgtcgagatgagccctttcatgtctgcaaacaaaatcaagaaaccaattttacttatccatggagagcaggacaacaattctgggacattgacaatgcagtcagaccgattcttcaatgccttgaaaggtcatggtgcactgtctcgtttggtaatacttccttttgagagccatgggtactctgccagggagagtatcatgcacgtcctctgggagaccgataggtggttgcagaactactgtgtaaatggtactagcaaggttgactcagtgtcagaggctgacagtaaaaacaaaacattgtcagctagtggtggcagtgcagcccgtgaaggtctaaaccctgaggaactctcatcattaccaagatcgcttctgtgatcaacttcagttggtgttcatgaaacattccctggacagcaagcctaaagggaaaaaatagtgtatcgttgcacttctaccttaaccgactaccagggatgccttgattggcctcatatttgtttcgattgctgcaggtgatcatgttactggcatgcaggagccccctacccccccccccccccccacccccaccccacaaatataagaaaggcctagtctctggtggccactgcactcagatatatttgggtcaatttgtattctattggtaatggccaatggaagtcattcttgcgattaatatcatgtacagaaatatagccttttgcagttttgatcccaactcttgcacttggcagcgaactgatacgttggttttctttgacagcaatctaaaataaaataataactaatgagattatcatatgctccaatgtctcgcatcgtcacattttacctgttaccattatttactgcagctgttgtactgacattcgttgcccatttgagaggcgc

SEQ ID NO: 25200 - DNA, 1952 bp, Zea Mays
cgctcattcccatcacgcccatcattttccgttcttcaatccgtcaatccagtccccatccccacggcgccgacgactcgggggcttccccccttggacttggcccgggtgggagtagcacgtcggggaagggaagcaagcgtccgcgagtaaggacagaaaaccgaagggaggagtggagaggaggagcttgcttggagcgggtggacgtgtggtgtgtatatagttaagcgggcgggcgggcgggcagccaatgccgtcgggcgcgcagggctaggagcatgggcggagggggcgcgatcgtgcacggcttccgccgctggttccaccgccggagcgaaggctccacctccaactccaaccagtcgtccctcgccggcgagggggaagcggacgacggctcatccgatctcgaggtcatcgaggacccggatctcctcggcctccgcgccatccgcgtgcccaagcgcaagatgccgctgcccgtcgagagccacaggaagagtacggagaggcaagccagtaccagatccaagaagtcattggtaaagggagctacggagtagttgctgcagctgtggacacccgcaccggtgagcgggttgctatcaagaagatcaatgatgtgtttgagcacgtctcggatgccacacgcatactgcgggagatcaagctcctccggttgcttcgtcacccagacatagtcgagattaagcacatcatgctccctccttctcggagggagttccaagacatctatgttgtttttgagctcatggagtcggatctccatcaagtgatcagggcgaatgatgacctcacccctgaacatcaccagtttttcctgtaccaacttcttcgagctctcaagtacatacatgccgctaatgtattccatcgtgatctaaagcccaagaatatactggctaactcggactgcaaactgaaaatatgtgactttggacttgcccgtgcatcattcaatgatgccccttcagctatattttggacagactatgtggcaacaaggtggtaccgggcacctgaactatgtggttcctttttctccaaatacactcctgcaattgatatttggagcattgggtgcatatttgctgaacttctcactggaaggccactatttcctgggaagaatgttgtacaccaattagatattataacagatcttcttgggactccatcatctgagaccttatcccggattcgaaatgagaaggccaggagatatttgagctgcatgcggaaaaaatatcccgtgccctttactcataaatttcgacatgctgatcctttggctcttcgtcttctagagcgtttgcttgcatttgatcctaaagaccggcctagtgcagaagaggctctagctgatccatactttgcatcccttgctaatgtggaacgtgagccatcaagacacccgatttctaaacttgagtttgaatttgaaagaaagaagctggccaaagatgatgttagagaactgatctatcgagagattttggagtatcatccacagatgctggaggagtacatgaaaggcggagaacagattagcttcctctatccaagcggagtcgaccgcttcaaactgcagttcgctcatcttgaggagcattacagcaaaggagaaagaggttccccactgcaaagaaagcatgcttccttaccaagggaaagagtggttgtatccaaggatggcaatactgaacaacaaattaatgaccaggagagaagcgcagattctgttgcccgcactaccgtgagccctccaaggtcagaggatgctgacatggatgatgtgaaacccacaagcttaagctctcggagctacctgaagagtgcaagcataagcgcttccaagtgcgtcgttgtcagaaataaacacccagagccagaggatgtgccaaaggacatctaagattgatctgttg

SEQ ID NO: 25201 - DNA, 1068 bp, Zea Mays
cggcccacgactcctctccccttctcctcaccatcttctagcaagacagttgtgctaaatgaaaaaacccctataccccgccagccgccatcccctccgaccaaaccctagccggccatggcgtggcgtggccccgcctcccgggccgtccttgccgccgtccgccgcccagccgcagcgcccgcggccgcacgcctccacgccccgcgacctttcgcggccccgcgccgccgcgtcccgtccgccttcgccacctcctcgctcccgtccgcgcggcctctggcggcgatgatggggtccccggtgacggtggccgcggtgatggcgcgtctcacggcgcaccccggtgccagcgcgcgggcgtgctgcgagctctcccaggggagtgggaaagatggttgatgctggaggctgcacaacttgatggggaccttccgtcctagcataatgaaacggaaaggatgggtgatgcaagaaaggccgttgtagagcctgccaaagaagctggtttgaagcatgtactcctttggtacttgaagctgctgtgtagatcccatccttttcgaaaggataaaaggtgtctttttttttgggggggggggggggggaaatgctattgtggcacttcttccactgcaaagttggaagaatttacccacccagcgatagccagttccctcgttaggatgttagaatatactggaataattttaatgttattcatggcacggtttgagcacatggatttaccttctcttccccttagagattcattgatgtcatgtttcagttggcatgagttaaatgattgtgttaccgtgctttgggcgttagcatagttttcattgtcgtttttgaaatcattggcgacgacacaaatatcccctaaatgacaggccacgtacatccatgtgggcaattttcaggcatgtaataataacagtactcaatctcaaggtcatttatttttttttataaaaaaacagcagaattctgtgtccctgcttcgccccttccctatcctcactctcccctacactctccacacaacatcatccatgacatgtt

SEQ ID NO: 25202 - DNA, 923 bp, Zea Mays
ggaagagaaaaaccccgtccccctcggccgccgaagcgaaacagcctctggccgctgcccgaccccgacgccagctgcccagttcttcgccggcgacgagcactccaccagacgagaggggattccaagatgccgagggccaccagcgacgcgaagctcctgatccagtccctcggcaaggcgtacgctgccacaccaacaaatctcaagattattgacctctacgtgggttttgcggttgccactgcccttattcaggttgcttacatgggattggttgggtcgtttcccttcaactccttcctctcaggagttctttcatgcataggaactgcagttcttgctgtttgcctccgcattcaagtgaacaaagacaacaaagaattcaagaaagggcctttgctgattttgtcctatgcaatctggtgctccacctggtgatcatgaatttcctcggataagcaactgctgcaccatgttggttaaaggttttgtagccccaggttgtggtcgctgattgttgcctttaaatgtttggaactgttgtgatcgtgatgtcgaatatccatatgatctgttgaaggattacttgtgtaagctgagtattcccggagggaactattagtcgaatggacagtttgcccagcgctgagaatgtgacctagcatgttctttatttgaagaagatataattcatttttcactaaggtatgctgcaaataagcaattcctgggaattgtcgagacacacatttttccatttctagaacacatctcagttctaggttggtttttttttgttctataaaaaattgagatttggagaaaggtgtaacacatacagttagggcatgtttgggggagcaagaagaatgtgtagaatggaaactgttgtgcgagaatgaaatgaaaaaggagcaccg

SEQ ID NO: 25203 - DNA, 1860 bp, Zea Mays
ttataaacccccgcttgtccatgcactgatacaattggtgatgtaagaatcccagcttctttctgtggtttactttgttttaggccttcctatggtgttatatctactcttgggaccatagcaaattcacaaagtctcgacacaatcggatggtttgcacgagatccatgtattcttcatcgtgttggtgaagttcttttaccagccgctgtaggtggacttaagcaaacaaggcaatttgtttttgccgatgactgctttcagctgctaaaggtctctaatcagaaaactgtgcatgccataaaaaatgctgtccaggcattacgtggatatcagccacctaaacacatcaatattggccaatatatttattccaatgtacctagcctgaaggagttttgcgaaccagctacaaagttagaagaaggaacatcagccctgaaagcaatctccacagtgatgttgttattacagagatatgagtttaaagcaaaccacgaggagtgggttaacactgttaaacctaagcttggccttgatatctctactcgtgtgctacaagccgtgaattttgcacgggaaaacatcaaatctttgtacgcaataagaaatgaattgcgggttgcactcaagaatcttctaaaggatactggaattttagttctaccaaccacagctggatatcctctgaagagaaactctaaagaaagactatcatctggatttgaggatagaatgtacaaatttgtaggcgttgctgcactttctggatgttgtgaggtcactattcccatggaaaatctggatcatcatgtatctctttcatttgtagcagcacatggatcagacaagtttctactccgtaatatcttggatacatattctctcatccaggaccaagtagttttggcatccaagttggaaactgcaccagtaaccaatgttgatgttgatgtcaatgcatcagagcttctaaaagaaaagggaaatagcgctttcaaaagaagacagtggatcaaggcaattgagttttactcagaggccatcagtttgagtgacacaaatgcaacatattactgcaacagagcagcagcttatctggaactgggccgttttaagcaggccgaagcagattgtgaccgggccttactgttggatagaaaggtaatagatttttgtagatgcaatattcctgtgctgctacgggtgacatgtctgaagcattgtctaccctaagagaggagttccaaaggtttattggatagtcctggatggttctgacatcattaccatcttgtgctgttatggcaacatcaaatccttactgtgaataccgtttgttgcttcagaatgttaaagcatatctacggcgtggttttgcaagggaagtaactttgaattacaaagaagcacttcaagatttcaggcatgctttggcattggagccacagaataaaacagctcttgcagcggaaaggaggctgcagaaactcctgaagtgatgtggggagcagcagcacatccgacttgtaaattattttgaagacttgcctggttgaaggcaattttgatcggcagcatgtgaaaggaagatgcgatctgctggataagagtcattaaactattttttgtttgccatcattcgaaaatttgtatctcacgacgattgtcagcaagttttgatatagcttcttgctatgaccgtctattaagggaaaatcttgtatatgcattgtatactacttcgatctgaaggccgagaacgcgagaacccatgcgagcgcttggctctgctggagtgtatgattgtgtagtgcaggatctaatttgggaggcgttgagacgccccttattctccta

SEQ ID NO: 25204 - DNA, 2220 bp, Zea Mays
ggcaagcaccgcggtccgtggctaggctacacctacaccagatcttcttagctggggaccaagcaaagcaagcaaggctacccgcaaccgccaactgaccgctgtagcggagacgatggcagccgccgcgccctcctcgtcctcgtcctcgtccgcgcgggcgcgcgcgcgcgcgccgccccggccattgcatcccctcgcccgcggcggccccgagcgcgaagaaatggaggccgtcgcggcgacccaccccggcgcgccaccgatgcggcgcaaggggaggaagcagaagcagcggtgctcactcgtgccgtccggacctactacgcagctgtggcccaggaccgtgctgcggaagtggctcaacataaggtcgccggagtccgacttcagcgccgacgagggcgacaccaccggcgacgacaccgacagcgaggtcgattacgaaggaatgaaacaaaagatgggcgtctatttcgatgaactaccggagtacaatgttattcctcgtggtttccaaaacgataagatctcccactttatttttatatcctgcattttgtttacgagttgtaaaagaaaaggaaggtccgaatctgattgcacgaaatacagttgcagcacatggtagcttacaaaaaagcgggtaactttctgaaaagggaaaacagggagcataatgctgcacttcactttgttggcggtgatttcaggttttaaaattattggtctactttagccaaagcgacattgcgttagatcgcatctcttttttttggggggaggtttggatcttgtgctgattttgatcggtgtggaagatcaaagtctaacagtctacatgtaatggaccttgagcagagatgtgcgcatgggagcgcaagttgcacgatgaggagaggagcgtccgaggattcggtgctgaggctattggaaaccaattgggggtggttccttgtggccttcgtagaaggcgcaagtcagagacccttcgtgctcagtatattgatgtcagggagctcaggatttgtgctggaacatggaatgttgcaggcagacttccacctaatgacttggatatccaagaatggttggatatggaagagccagctgatatatatgttcttggatttcaagaaattgttccactaaatgctgggaatatatttggcgctgaagacaaccgccctgtagcaatgtgggagcatattattcgtgaaactttgaataagatcagcccagataaacccaaatataaatctcacagtgatcctccttctccgtcaaggttcaagccatctgatgatgcttttgttatggaagatgaacttattagtgagtctgatagtgaaggtgatggggaggtgcacccattgaacgaacaagatttggtcgactctgttgatggcattcatggtaacaaatgtgaacctcaaacaattttacaagatgaagagttcagcaggttgccttcagtgaagacttttgacagatccaataacctaagttttaaagaatctaatttggaagagaagatctgccagaagatattaactaaaacattcagtcactcagagaggcttgggatgatttggcctgaaccaccattggatatgtttgcccagtgtcttccagacagcacaaagccatttgcttcaggaaaggttttaagatcatatttgtctttcaagtcggtaaatggagattctggtccatttgctgaggacaattcagttcctgatttttatatgagctgtgcagcagttaaaagaaaaaggccatactttgtaagaataataagcaagcagatggttggagtgtacctatcaatatgggtacgaagaagcctccgaaagcacattcagagtctgaaagtatcaactgtaggggttggtgctatgggctacattggtaataagaaggattgtatggctaggtgatctcaactataggatcaacttaccatatgagaagacacacgaactcatatccaagcaggactggaacaaattgtttgggaaagaccagctgaaagtagagctgaagaaggggcatctgtttgaaggatggactgaaggggtcatcaactttcctccaacgtataagtacaaggttaactcagaaaagtacataagtgatgataacaaatctggaaggagaacacctgcatgaagttatgttcgtatatctaaagctactggtggcgtgcagtaacagcaa

SEQ ID NO: 25205 - DNA, 5240 bp, Zea Mays
gctgaacaacggagagaaaaagtgaggcggaagacgagggacatacttcaagcgcccgcggcccgcagcctgctcgcccaggtcttcgccggcgacgagcacccaccaggtccgctcagtccatctctccagaaatccccagatgttccacagcaagtcgctccctaggcccaaggacacatcggtggtggtggtcgtccttgagacgacagaagtgtacattgtgatcagcttgtcgacgaggagagacacccaggtcgtatacgtcgatccgaccaccggcgccctgcgctacctggggaagcatggggaggacgtctttgattcggaggcggcggcgctgaaccacatcaccaacggatcaagggttctatccaagagcactacatatgccaaggcagtgctgggatacgcggtgttaggaagccatgctctgctcttggtcgcgacacagttgagcgcgtcggtccccaatctgccgggaggcgggtgcatatacacattggcagagagccagtggataaagatccagctgcagaatcctcagccccaggggactggagaacagaagaacatacgtgagctggccaatctagacattgatggcaagttcttcttttgcgagacaagggatgttaccaggcccttcccgagtcctattacactacgggaaccagatgaggaatttgtttggaacgagtggctgtcaaagccctttaaggacattggtttgccaggacactgtgtcattcttctgcaggggttcgctgagtgccggaactttggaggtgctgggcagcaaggtgggttagtcgcccttattgcacgccgaagtcggttgcatcctggaactcgctatttggcccgtggactgaacgcatgttcaggcacaggcaatgaggtagagtgcgagcaactcgtttgggttccacggaagggcggacagcgcatcccttttagctcgtatatctggcgccgtggaactattccaatatggtggggcgcagaaataaaaaacgcggtgtcagtggaggctgaaatttacgttgccaacgatccttacaacggaagcttacagtactaccaacggttgggtaaaagatatgggaataaatcatctgaagcgaacgtgtccaggcaaaaaagttctggaagggttcccattatttgtgttaacttgctaagatacggcgaaggaaaaacagagtcagttcttgttgatcatttcaaagaatctatacggtacatgaactctactggaaagctgggaagcacgtggattcagttaataaattatgactggcatgccactgtgaagttaaaagggcagcagcagacagttgagggcctatggaggcatcttaaaccacctacaatggtcattggcttcagtgaagggaattactatgatgcaagacagcagcttaatgaatgtaaaggatcagttatctgcaatgacgatgtaaatggtgggttttgcatggaatctattcaaaatggggtgatacgattcaactgtgcagactctcttgatcgaaccaatgctgctagttactttggtgcacttcaagtttttgttgaacagtgtagtcgattgagcatctcgcttgacatagatgcaatgtttgggttgtcaagtagatattctgaatatgatggtagaaacactcgttctttgccccctggatgggaggagcgctttgactctgtaacagggaaatcattttatattgatcataatacacgtactaccacatgggaacatccatgccaggaggctccacagaagccctggaagagatttgatatgacatttgatcagttcaaaggctcaacaatgcttgctccagtgaaccagcttgctgaactttttcttttggcaggcgatatccatgctacgttgtacactggctcaaaagctatgcacagtgatattctgaacatattcaaggaggaaacaggaaagtttagtaaattctcagctgttgagaatgtgaaaattacggtgctaagaaggtaccaaaattttatgaatgatagttcccgtcaaaagcagttagagatgtttcttggtttgaggctatataggcatctcccgtccatccctatgttccctctcaaagtgctatcaaggccatctggatgcatgttaaaaccagttcctagtatcatcccaatggctgatggtggttccagtcttctgagcttcaaaaggaaggatcttatttgggtgtgtcagcaaggtgcagactatgttgaactttttatataccttggggaaccttgtcacgtttgtcaactgcttcttactgtctcccacggtgctgaagattcttcatatccagcaaccgtagatgttagagttggctcaagcatcgactccctcaaactcgtggttgagggtgcttgcattccacaatgctctaatgggacaaatttactgattccagtcactgggagaactgatccagaggacttggctgttacagggaaaagtgcgaggcccaatgttcaagagagctcctatcttcctttgttatatgactttgaagagctagaaggagaattaaactttttgaatcgggttgttgcattatcttttcatccatctgctgtatcaagaacacccattactcttggcgagattgaagtacttggagtttcccttccatgggcagacatgttaaccaatagtgaacgtgctcctgaatttatggagtttatcaataaaaaatcatcaagtgctcactgtaatctaggttccaagtcttttggaaattcttccatgcctgggaatgattctcatggtattgatgagtcttatactaaaagttcatcattagttcaaccgtgtggttcggaaaatttgttggattttctcacaggtgattttgacatgtcggagtcccatataactcaaaatacttttggtgctggagaacaaacaaacttcttagatgatggatttgatgttaatcctttcgcccctgcattggaagtgcctgttcctgttgctaaagtaaacaaggaggttgaagaatgtggcagcacccagctttatattaaattttttgaatccctttctggctataataagggaaagggtcttgactttgagcaaacgatgaagcttgaaataaaacgtctccgtcttggtctttcagccgctgaaagggaccaggcgttgttatcaattggtgtaattcctgccacattagatccaaaccgtttaattgattattcttacctattgaagttatccagcttagctgataatctagcactgctgggccatacagtccttgaggatcgcgctaatgcttcaatagggcttgaaaagggcagtgaacatgctatagacttttggaacatcagtgaaaatgatgaattctgctatggtggggcatgtgaagtccgtgctctgtcttcattacaagctttagcatctagagaaaatcaatcggtattcatggaatgtttccagtgtgaaaagacagtttgcaaagcttgctgtgctgggaaaggggccttccttttgcttaacacctacagggagttgaagatatatggtgggagtcaaagtggtggctactcagcactcacagatagttttgtgtgcaaatcgtgctgcagtgaaattatcaaacgtgcattgtatgtggattatgtccgggttcttcatagtttgcgcagaaaagatcgttcagagaaagcagcactgagtgctgtgaatcaggtctgccaactggagtacaagaaagcatctgatttatctcaaagtattcaatttggtcagagacaattgaagcagatccttgatggtgaagaatcccttgcagaatttccatatgcaaactttttacaaatggttgaaactgccaatgactctgaaccactgctttcattactggcgccttttggtactggagagtatacgtcttactggaaagctccacaaggtatcacttcagtggaattctcaattgttcttggtggtttatcagatattgcaggagtttccataattgtcagttcttgcggttactcagcatctgactgcccaattgtagagatatgggcgagtaataaaatacaccgagaagatcgtacatttataggaaagtgggatgtacaggatataatatcttcatctccacagcttcgtggacctgaaaaatctagtagattgagtgaagaaccaagacacattaaatttcacttcccaaatcctatccgttgtcgtataatttcaataaaaatgacactttcccatagaggttctcattcaaccaagtttagtgaggagtttgatcttctatcattgaatgatagctcatcttatgaatcgaagccaaccaatttacataattcatttatccatgcaaaaagaattgtagtttttggcagtttgttgagaaaggagatggagcctgacacatcaggggggataatgagaatgaaaagttatttagacagatcaccggccttggggagatttaggatcccagttgaagctgagaggctgagagataatgatcttgttcttgagcaatatctcttagctaattcacctggaatagctggattccggcttgattctttcagtgttataagacctcgtgtgacccattcaccttcttcatcagagttggacatgagggagttttcattgacacgaatggaagatagatttataaacccagcaattctgtatatacaggtcacagttgttaaggagtccggcaagttggttgtagaggaataccgtttaccagaagtaaaagcaaacacgccactatattttgatttcccagatctacaacaggatgcgcgctgtgttatctttagattgcttggtgacgtcactgcctttgtcgacgacatttctgagcttgagaacttaaacttgcggaatcttcctttggcgtcgggactgtctttgtcaaataagatcaagttgtactactatgctgatacatatgagatgggaaagatcggcagtctctcagctgtataatgtatgtgaggtcgtcgtacatgccaacctgggatggtaacccgtccctagaagattgttgtaacctactgtttctacgtgttgttgtggaaaatagccggaaattcaattcgatcgcagtccacgaaactgccagctacgtttgtcgatacctgtattgggacctggattattgtatagagccaagaacttgcattgatattttttgtttgtttgttaataa

SEQ ID NO: 25206 - DNA, 232 bp, Zea Mays
taattattagagaagaaattatatacccccaaattcagggtgttacaaacctattccccataaaaagaatctcgccatcgagattcagggttgcctggcaaagagcccgggatatttagctttcagatcatcttctctttccctagttacttcttcctctgaatgatggccccacttgactttacacatcctgatggtgcttcttcaagtgactctgtctgctgtctctaga

SEQ ID NO: 25207 - DNA, 283 bp, Zea Mays
tgtatttatatagcttgtgatatttttcattgtattcatacatatgcatcctgcatctcaattaggaccgagaggtgacgaccgtgcgagtgatgtggtgtcaaccacaagatgcagtcggtggacgacccaaggaaggatggacttaaccagtggatgctcgccaagcgagtacctccccagcaaacactatctaagtgttaaaataaaggcaagccccggttttatgcataaccgttatatatgctattttactgcacttaatgtttgtaggcttgtactg

SEQ ID NO: 25208 - DNA, 2594 bp, Zea Mays
atgcgcggcgcgtaccctgtcctgcctactttgctctgctctcgacgctttgctctcctcccttccccacccgcccacccggacttggttcttccgccattcccgttatcgcggagcgcaggtgctcctcgtcttctgcggcggcatcgagaggctggtggatggcgaatatggattcggttgttgtgatggaggtggcgccggtgccgatcccgacgttcatggacgccactcccctgaaccccccactgccgcttgtggtggaggagctcgtgctgcgccgcagtgctcgttacctcaacaggccaacccggcctaactacgcggaccaggagcctccaaaaaaccccggcggccggggccggggcaagcgaaagagggatgaggagaagccggagctggcggcgcagcagggtaccaagaccccaggcaggaatgactccaatgttgaggcgggtgagaggaagccgatgcccgtgactgcggcggtgccggcctgttgcgctggcgttgctgcggaagacgatgcgacgccgactgggaagagcgccaagctgagggtgaaggagacactgagggcgttcaacagccactacctccactttgtccaggaggagcagaaaagagctcaggctgcgatacaggagattgaggctaagggtggcctcaaacgtcagaccaaggggggtaaaaagaagagcagtaagcaagaggctgaagctgaggagaaagagaaacgcccatcaaagcgacctgacctgaaggcaatcaccaagatgcaagaaatgaatgccgtgctttatcaggagaagacgattgggcatctaccagggctcgatgtcggagatcagttttattctcgcgctgaaatggtagtgttgggcatccacagccattggctcaatggcattgactatatggggatgaaataccaaggaaagaaggagtatgccaacttaactttcccattggccacatgtattgtaatgtcggggatatatgaagatgatctagacaaggctgatgaaattatttatactggtcaaggaggaaatgatttacttggtaaccaccgccaaattggctctcaacagttgaaacgtgggaatttagcattgaagaatagcaggaagaatggtaatcctgtccgagttattcgaggtcatttatcaaagaatagctatactggaaaggtctacacctacgatgggctttacaaggttgtagatgactgggtgcagaacggtgtgcaaggccatgttgttttcaaatttaagttgaagcggcttgagggtcagccatcattgacaacttctgaggtgcgatttactcgtgcagaagctccgacaactatttctgaattacctggactggtttgtgacgatatctctggagggcaagaaaacattccgattcctgccactaacttggttgatgatccacctgttcctccatctggtttcacatacttgaagtctctaaaaattccaaaggacatcaagatcccatctagtattattggctgtgattgtgaaggagattgtgctagcaacaaaaattgttcatgtgctcagcgcaatggttctgatctgccttatgtatcatataagaacattggcaggttggtggagcccaaagcagttgtatttgaatgcggggctaactgcagctgcaaccatgattgtgtaaacagaacatctcaacagggtttgcagtatcacttagaggtatttaagacagcttcaaaaggttggggagtcaggacttgggacactatcctccctggggctcccatctgtgagtacacgggggtgttgaggaggactgaagatctggatggttcacagaacaactattgttttgacattgattgtcttcaaaccatgaaaggtttggatggaagggagaaaagagctggatctgaaatgcacctgcctaatctttatccagagaatgactcagatgcaccacctgcacctgagtactgcatagacggcagttccattggcaattttgcaagatttataaatcatagttgccaacctaaccttttcgtccagtgcgtcatgagctcacacaacgatgttaaactagcaaaagtgatgctttttgctgctgacacaatacttcctcttcaggagctatcctatgactacggttatcgcttggacagtgttgttgggcctgatggtaaaattgtgaagctgccatgccactgtggtgctccagattgccggaagcgcctctactagacctgcagtgtgtttccattttgattttgcaggaaacaacctatattgtaggaaagcattcatgttatttatgtagttggcatgctctgatatatagcgaaagaggagcaacttaatctccttttagagcattcttattttgtgataattggaggacatgctggtcatggtagcatattttgcaggaaatcaattaactgatatgtctgggcatggatctatgttttttctattatgtgctgtcgtgtttttttaatcaatggatactacattactgttatggccactgaattgatacaatgttatcgatttatatagcattttctcctgttaaaataggta

SEQ ID NO: 25209 - DNA, 1124 bp, Zea Mays
ctggttttctaactgtaggacattatagtgcatgtttatcaggcttaaacccttgacaacatttcccacaaggtatggcttctatgatgaatgcttgcggaaatatggaaatgcaaatgtgtggaagtactttacagacttgtttgattatttgcctctcacagctcttatagaaaatcagatcttctgcctacatggtggtctctctccatcactggatactttggataatgtccgctcccttgatcgcatacaagaggtcccgcatgaaggacctatgtgtgatcttttgtggtctgacccggatgacagatgtggatggggaatttcaccaaggggtgctggatacacatttggccaagatattgcacaacaattcaaccatacaaatgggctaagtcttatttcaagagctcatcaacttgtaatggaagggttcaattggtgccaggataagaacgttgtgacagtgttcagcgcgcctaactattgctaccgatgcgggaacatggctgcgatcctcgaaattggcgagaacatggatcagaacttcctccaattcgacccagctccgcggcagattgagccggacatgacgcgcaagaccccagactactttttgtaatcagcatgctggctttctttcaacttgtctactgcagcgccagcacctgtagatctccttagaaaatggtgtttcctctagccgccttgtacccccatcattcttttggtgtggagattttattgccgcttctcagaacattgaggttgttgaaagtacatggcattgggtcttcctttttttttgccgtcttgtatctccattttgtatgattctgagacaaaagagaagagaagctgcaatagaattgtctcgaaatatattgtcctgtccagaagaacaggtgtggctccaaaaaaaaaagggaaaaaataaaagagagacaacaaggaaagatgcaggaaatggacccgatgttccgttgtgtctgttgtgatgcttcatgcttggctaggggagttctttcagtgctgtttgactccgaattgaaggaaccttggttgttcaacctacatcatcagctcaccgtcgaatgtctgcccagaccgatgaggacagg

SEQ ID NO: 25210 - DNA, 1465 bp, Zea Mays
aaacgaaaagggaaaaaaccccaaaacctagctcctactcggcctgtcggcttaccagtgttccttgctgattaattggtaactcgccttgataagtcggtctacgatgttgattagtcggtcctaaccgatggaacgactgggaggcccacgcccacaccatcccctcgcactgctgctcctactaggctactactacgccgcagccgcacaggcagacgcgtcgattcaaccacactgctgccagtctgccacaactatttactgccgccccctcatcaccgccacgggcccggcgagcaagcgccagccaggggagggaagccgaggcctaggacaggaggccatgtcaggggaccgctcgtccacggcagagcgccggcgggggatccggcgcctcctcctgcatccgcgcggcgaggcctcctcgcctccgcctccgccgccagcgccggcgccggaggaggggagaaggaaggggttcgcctcggcggcgctgcgcggcctgggctgcacgtcggcggcggcgtccaaggcgtacgcgcccggagcggccgcggcggcggccttgcggtcgtcggcggactggcacgggcggcggcggaggaggggcaaggacaggaggaaggagcgtggcggcggcggagcgggagcgggcggaggcctcgtcaccggtgggatcggcgccgatgtgtggtgcgcacccgggatacccttcgccgcggaggcgtcctcggtggactgcgtggtggcgcggcaccagacggtggggaggggcggccgcggcgccgagggggagaggtcccacagagagataatgatgtttcagacaagagttttactgggaggaatgaacatgtacgatcgctaccaggattggcgccttgatgtagataacatgacatacgaggagttggtcgagcttggagacagaattggatacgtcaacacagggctacgtgaggacgagattgctcgcagccttaggaaggccaagcacccatccttcggttccttgcgattcgcagcagaagtggaaaggaaatgcactatttgccaagaagaatttcagtcaaatgaagagatgggaaggctagtctgtggccatagctaccatgtgttgtgcatcaagcagtggctctctcagaagaacacttgcccggtttgcaaaactgccgtcagcaagaattgaaatgcaaactccaggcacgctgtctgcatgcctaaggtgaaatcaatgtgaaattggcaaattatgttgtcgtgtacagcccgtcatatataatattagggggtgtttgggagtgaagttttttcacagttttggaagaatactgcagtattcttaaatactgcagtattatatacagaatggtgtttggcaagctggctaaaatctatgttttcaaaactgtagtattacaaatactatagttgttttaaggtattctaaacttaggtctgg

SEQ ID NO: 25211 - DNA, 2052 bp, Zea Mays
ctttctccatccacttgtgtactttcgacgtcgtcttcctcagtagcgcccccttctttctccacccgccgtcgacgcagctgccttccagccatctccatatccgtttcgccgtccccttcctcctcatcaggacccgcgcaagtggctcgtcaagcgcgtcgtcgggatgcatgggggctccgtcacctaccttgtcgaccccggcaacaacgactcctcctccagaaccgtcgtggtcatgcatttttcctgtagtcaaggatggtgaaggtccaatcatgtgcatatcattggtttcctcttgttatgatgaagagatctggattcaatacttgatttttcatttgtttttaaatatttgttaactgttatggtgtatgtcaatggaatttgggcattggttgctttgactgtttcttggaatgcagataaactacgcctatgctcgagacaatgaaacactatttgatattattagtgtgaagatgaacctctcaattgacaagcgatgcaggataaataatttgtccacaagcatgattgcattatcctaggtgcttatgaaagtttttaccttttcttcaatatgaagtctgaatgtgtggtgtggcttgtctgatctatctagcaggtttagtggtactcgcatcagctaaaccttaaacttgttttcttcttaatgcctccgtgatcggtttaagttctttcgttgcggagatggcagcggcggcggggccgtacaaagagatgctggaagtggtgaacgcgtgcgcgacccggatccggtggcgcctcagtccagcttccaagcgccgcctcctcaacggtcagtgcccactcgcttgctgctttctcttagtagttgtagtcgttttttaacgggaaatacaacagggaagccaccagcccaccactatgtaggattttattaattgaaaaatagtgttgtagttgttattatctctatttaggacttgttgttggcaattgtcctatttcttgcttaattcgctaccgccatgctgtctttctgttctactgctaaaacacttattttttgtggtcgttgaatgaattgttaaccaaactcaattgcagaagacattcatccactaatcgtcacatgatccaccttagttcataagtttataccaccgtagttataggtcacttggtcagtagctgcaacttgcaagtgatttagggtttaataaaaaatttctggtagtaaagttgaaaggtatggtttgaggagagtgaatggtatcatgtcgaattacagtacattacaatttacaagtaaattgattagtcctctggtcttttgattggtagcatgtttttcctatgtaattgcctctgttcttctttaggggctaggttcgttgtaatcatttgaccgtggggatgtttgtactaaattcttatttctcttaaggaaaatcatgctaatgcacgaccacgaagaaaaagtaaattcatgaacaaatctacctaacttatgatttctgttggattttaactctagtctacctctttgaaattaaaaggttgtgctgtggttgttgatgaacaaacccagttgttgccaaatatcctgtttctctgcactaggttgcgtcctgtggtactggtcgactatggtggcacaatgcctcagctacaagaaaatctttgtggcctgctatatcttgcccgacagttcaagctctacaaggttaggtctgttcagtttggctagaaaggcatcccctacctgaacacctacgacgaccgcaccatccgctaccccgaccctctcatcaaggccaacgacaccatcaagatcgatctggagaccaacaagatcatggacttcatcaagttgtatttgccctttcatggacttcatcaagttatatacttagttaggctcaatgttagcacaaacagttgatgagcaagtttaaatttagagtacacttatgtatgagttatttgacaatgcttatttatgagatattgaatattatttatctatattatattaattatagtgttattaaatat

SEQ ID NO: 25212 - DNA, 4205 bp, Zea Mays
gagatatgggggaaatccagacaccctaatgttgagttgagagcattttgctcaaagcattctgcagttggttacaccagttctgtagagaacagtaaccttgcttccgaactgaatcctagaaaatctggcccagacaataccaccctcaattctggaaaaattccaatactaaggttcacgcgcaaaaacaaggataaattcaccaattgtggaaccagtacctctagttctggtaacctgatcagagtcaagactatagagcaaggtgctttagctaacacagttagaaatgcaaatactcaacctattcaaatctgggaaagaggtactggtcatccctctgttggtggggatcatatgggaagttctggtgatattgctgtagtgcttagaaagctaattgacagcggaaaaattagtgttagtgatatagcatctgaagtcggcatttcttcggaatccttggaagctgctctcgtgggtgaaactaccactttttcccatggtttgacgctgaaaattatgaagtggctccaaaattatgtgcaaatgcatagtgctcaaggagatgtttgtaaagggagctcagaggtggtgcaagagagcaaatcagacagattggtcaccacagatactgtcgatgtgaaaaatccattggtcctagatgatgacaagggtgtaggtgtacttgttgatttgctggattcctctgtaactgaacctgcacaaacaagatctgaaagcaatagtaagattttgaatgaaaatagtgcaacatgtgcaactggtgtgactattttgcaaaatggcaaaaagaacatggttaaagaaggttataatcctgagtgttctgctaaagaatttgcaaacgaatctactcaggacttctccccaatcagcaacaagtatgttttaaaggatgaacatggaatattgatactgaacgccacctctggaaacaaagaatttggtacttccacagagataccaaatgaaaaccaaggtgcattacgtggaagaaaaattaatgacttaactgatgttgaactgggcccatgcttggagaaaggagtatcttcacatgatcattgttttgttcggggtgataatggtagagatagggtagattcagttgaaaatagcttcaatgctcgtgattgtgattcaaattgctctcatggacaaccttttttcaactttgatgattcacattcttatattcatccattcattcagaaaaagatatctcatcattgggacattactttcaatcagaataaggaagctctgaatcactatatacaagagtcatcatatccttcccttgagaaagtaccaactgattcctcggtagaagtagagggtacagccgatacaactgcaacaggtcaagttttgaaagcaaggtctttaaaaattcttgagcattcacctgatgatgaagtagaaggagagatggtatacttacaatctaggctgcttgacaatgctgttgttctgaagcacagatatgaaaaattgatagcaatggttgtccaaaatctctctcgcgagctggatgccctcagtaaaagaaaatgggatcttatttttgtgaatcagttccttcgtgatgtcagagaagctaagaaacgtgggagaaaagaaaagagacataaggaagcccaagctgtactagctgcagctgcagctgctattgcatcctcctcacggaactcaaccgtgagaaaagatgcaaaggaggatgcaccaaagagttctcccaaacttgctgctggatcttcaagggttgggcaacggacttcattgccacaggctaatgattcatcaaagtcatccaacagcaaaatatcatcggataaaaaatctggaagttttcttctgccaatctcctctaaagaaaatgggttatattgtgatgtatgcatgcgaactgaaacattgctgaaccgaatatttgtctgctacagatgcaaggctgctgtgcacataaattgctacagaaatttggagaattctattgggccctggaactgtgaactttgtgaagatcaagacatttcatcagaagctgcaaccgttagcgataaatcacattgtaatggcaagaaattaccctttgcacagtgtggcatgtgccatggcacatcaggtgcatttagaaagactgtagatgggaagtgggttcatgctttctgtgctgagtggttgttggacaccaagtatgtaaggggacaagataaacctgtagaaggaacggaaagccttgtagagggaaaggacacttgttgtgtctgcctccacaatgttggcgtgtgcttaaggcagtggggattgcaacattacatttcatcctacttgcgctagaagttgtggtttttacatgaacacaaaagggtttggtactacaccacagcacaaagcatactgtggcaaacacagcgtacaacagaaagaggctgatgcacagcaatatggacctgaggagctcacgagcatgaaacgaatgagggttgaattggaaaaactacgcctgttgtgtgagaggataattaagagagagaaggtgaagagagagacggttttgtgtgatcatgaaatacttgccaaaactaaggacacagttattttctcctaccttgcatgcggagcaagctcagaatctgcaactacttcagttaataacaggtcgtacagtggagcagcacaaagatctgatgatgtcacagtagatagtactatttctgggaagaaaaccataaggttttctctgaataacagaggtgctgatagaaacacagctgacagctcgaggacattgctatcattcaaacgcaagttgagtgagaggggaccacgagctggtaagcaacttccgcagaggccaactattgctgcagagaaattagaagatgaagacaagaagacaactgataagaagagagaaatgtttcaaaaggagctcattatgacatctgatcaagcttctacacagaacctacgccttcctaaaggatatgcttatgttcctcgggactctttatctaaagagaagctatggaaacaaaatacacagccccataatccacaggagcctggtggataggatcagttgaaatcaagccggttcatttctatcgaggaaggccataaaaaacttgtgcaagcttgttctttgcaactgaaaactacaagcggcaagcagggcaggccagcgctattgccacaagggtaacagcgaatccgtgatcttttttggaccgaagttgcataatggtgcagactgtgctatttgtgtgaacgtatggtgtggcaccataacaagaaggctgcctcccacccacccacacaccaggtaccttgaatatgaccagcaatatgggtgaattgacctacctgtgctataccaaagagagcgtgccaactgtatatatgagtttaatttgtgcgcagattttgtaaatttgccctgtacattcttttcctttgcatatgctagtttagttgtgcaggaaaaagggaattatgaatccttttaggttggataagaaaaggaattagcttggttctttatcatggttcagaagaaaatgcggtggtgcttgcggacaacattgggcaggagtgttggtttgatacatgtactctgtagggatggtgaaggtgccaaaaataaggtcatgccactgctttaacgcaactatttgttgttggttactgggaagtggtatcgtacaggctgagaaacaatgttttactgttttagataattgtcgccggtggctttccatgtccccttatgttattgggaaacactagtccctttagggctcgtttgatggacatgaaaatggagatcattgcctcattgggaagggatccccttgctattcaattttgaataacaaggggatctccttcatttcactgtccaccaaactaacccgaactggtttcgagatgtcaagatagcaacaatgttgaaataggcctgtaagttctttggtcgagaaggtatggtagctgacattattttttaatttatacatggggtatattgtatctgggacgggctgttttctgcttgccgtccagattatagccttggttaggcgtatttagtaatttgctcataatttagtggttcatgttttgaattcttttgctcgaaatctggaaaggtcgtgtctggtaaatataaa

SEQ ID NO: 25213 - DNA, 268 bp, Zea Mays
cccccaggtcaaggacaggtaccgcaggatgagacgcatcgaggatgctgtgatgagttcgtgagaggtctaggccgtcgtctcctagtcaacttgggttgcttgatcgttgtctccttatgatgtaattatttatttgttttgtacagaactcttattatatagtaaaaatgtggtattcgtttctgtaccatgatttatcatatgtgtgagacttggtccagcacacctggtgattatctcacgcccgggttttggggtccctgga

SEQ ID NO: 25214 - DNA, 2221 bp, Zea Mays
ctccatctcctcctcctcgcttcgcccaaacacaaccggctgctttgctttctcaacccaccagtcctcaatcacctcacaacacagcccctgtcagatcgtcccactgatcgggccgtgcaaaaccccccaaccttttcgacaggaccctgctggcgctacagtcttctcccggaggcagaaactctttgcttccgcctggctcgcgatgcttgtttgggtgcgcgggcctgcggcgaggtgaggcgacggcggcgccgggcggttgcatggtggccgatggagagtagacggggagggtcgggggcggcggcggaagatgcgggcggggcgatgccgagctttgggccaacgcagcacgccattcgcgcaggcgcagatgtgaacagcatgcaaccttctcgagttactgactttggggcacttgcacagtctgctggattccgaatagaagatcttgctaaccttaatgcaaatgccttgttcaatctgaagccaaattctcatacgattgacaacagtcctcttcagtttggaaattacggaaagtctatttctcctcatataaatactacagaagcaacaacagctgcaacaagaattgaccctcagctgtcagcacagcaaacaggagcacaaccaattctggtggcgttaccaactggtaacatggagaattggggagagtcagctatggctggtagccctatgactgacacatctacagatccagacactgatgagaggaaccagatgtttgaacaaggacttgttgctgtccccacagcatctgattctagcgacaaatcaagggacaaactagatcagaagacacttcggcgtcttgcccaaaatcgtgaagctgccaggaaaagccgattacgaaaaaaggcatacatccaaaaccttgagagtagcagactgaaacttactcagttagagcaagagcttcagcgggctcgtcaacagggtatttttatttcgacatcaggagatcaacctcaatcaacaagtggaaatggagctttggcatttgacatggagtatgcacgctggttggaggagcacaataaacatgtaaatgagttgagggctgcagtcaatgcacatgctggtgataatgatcttcgttgtattgttgatagcattatggtacattacgacgaaattttcaagctcaagggtgtggcagctaaagcagatgtttttcatgtgctgtctgggatgtggaagacccctgctgagagatgtttcatgtggttaggtggcttccgatcatctgagcttcttaagttactggcaggtcacctagagcctcttactgatcagcagcttgttggtatatccaacctgcagcagtcctcccaacaagctgaagatgctctttctcaagggatggaagcattgcaacagtcgcttgcagaaactctagcatctggatccttgggccctgctggaccttctggcaatgttgcaaattacatgggacaaatggcgatggctatgggaaaacttggcactcttgagaactttctacgacaggctgataatctacggctgcaaacacttcaacaaatgcaacgcatcttaactacccgacaatcagcacgagccctactcgcaataagtcaatatcatcggagggaagctctgtaggaggcatcgaacttctcaatctcatcaaaacatgccggaaggtggcagcatgacgtatcttcctgcaccaagagcaatgttcagaacgccatcctcccatactactcggccccttgagatcgtgatctccaccattccctgcacgaacgaaatgaacattagtacatgatgcaccgagaagttgcaagttccacattaagggcatatttagtttgttgctaactatgtcacattttgcttaaggttagtcgttcgaattgaagaactaaatttagtcacaaaagtgtggtaaattagccagcgaaccaaatatgctctaaatactgctgattcatatgtgcaaaaaagaaccgacctttcctctccggccctcgtactccctccatctacatgatttagttgttttagatttgtcctaagtcaacctctatcagagggagtacacattagtgttggacggtgtgtgtgagctgagaagggttaagtatttgtatcattgttgtttgccaattgaacaatgcattttgatacgacaaactgctgctaaactaaaccatggttcgag

SEQ ID NO: 25215 - DNA, 4323 bp, Zea Mays
gcaaaagagcaaactgccaagtgcaaagcgaaaccatcaaaccggtgccgatgctctgccggcgcccgtgccccggcgtgttcctccgcctcttcgccacttcctgccgccgcagctccctccacccctcgcagccgcacctccggacagctacagctctcccgacgctgcctgtggcgaagaaggtccccttcaatgtgtcggcgcacgggaggtcgtggagtgacccgtaccactggatgcgcgacacctccgacccggacctcgcggtcctcctcgccgctgagaacgcgtacgccgacgcgttcgtaggatcggcaggtggcggcggcctccgcgcgcacctcgccgcggagatgcgcgcccggctgcccgcttctactgccacaccgcctcagctctggggaccttggttgtattatcagtatgttccagagggaaaggagtaccctgttttatctaggaagctgaggccctctagtggtctggtaggaactctgcttgattacctttctggttctgagaaggagcaagtgttgcttgattggaacgaggttgcagaaaaaaatggttatgtccacattgggagttgtcgaatctctccagatcataggtttcttgcatatacagttgatacatctgggggtgaactattttcccttgaagtgaaagatctgctgtctgagcatgtcatctttagttcaccagacaagggagtagttagtttagcatggtctggcaacaatgaaagtttattttacactgtctgtgatgagactctacgtcctaaccaggttttctgtaaaaagttgcaatcggatgaagcagggtttctagttttcacggagaaagatgtaaactgttgtgtggatattacaagcacaaaagattttaagtatatgactgtcaattctaacactaggacatcatctgaggtttttgtaattgaatctgataatctaagagaaggattatggcctatacggaaacgtgttgacaaagttcagtactttttggagcaccacaacgggttcttttacattcttaccaatgctcctgtaaatgataccgaaacgacaactgaaggctactatctggccaggtgtagggctgaaaagtcactggtggatagatggcagattgtgacggtacctgactcggactgcaccattcaggatatggacatttttcatgataatttagttctctttcttcgaaagaatggtactcctcttttttgctccatcagtatgccaattgatgttgatgttcaggagccaaaggaacttgatgatctcaacccatggttttttcccataccgtcagagttatgcagcattgttgctggatccaacaatgatttcatgtcatctacttatcagctagttatttcatcacctgtgataccggacttaactgtggactatgatttgagaaaaaagactttcaccatccttcatcaagaggaagtaactaccatctctgcaaatctaggcggcctgggctttcaatccaatgtttcaagcatccaacaaaacatgcagcttgttaaaacctcacaaaattggagtgatctttccaagctattctcatgtgaaagggttgaagttatatcacatgatggtgtttcaatacctttagtgatcctgtattcatggggagcacattgtcatggagaatcacctgggatcttatacggttatggagcttatggagaggatttggacaaaagctggtgttctgagaggttaagcctcctctctcgaggttgggttcttgcatttgcagatgttaggggtggaggggatttatcatggcatatggcaggaaccaaagctaataaaatgcattcaattcaagattttgctgcatgcggcaggcatctcataaagcaaggctttgttcaccaaaatcgcctttgtgctataggctgtagtgctggtggtctgttggtgggtgccgtcattaatatgcttccagacttattttctgctgcagttctcaaggtcccctttcttgatatctgcaacacaatgttggatcctactttacctctcactgtcttggactatgaagaatttggtgaccctaatagcccagatgagtttgaggcgatcagcagttattctccttatgataacttagcacctgatgtgtgctatcctccagtcctggtgactgcctcgtttaatgatacaagggtaggagtttgggaagctgctaagtgggttgcaaaagtaagagatgtcgcgtgcccatcctgttcccagtcagttattctcaaaactaatatgcaaagtggccattttggtgagggtgggcgtttcacgcactgtgatgaaacagcctttgagtatgcatttctcatgaaggccttgggtttggatgacgtagctatgatgtagcgtactcatgcctgaggattttcacggaacagatttttttgtggctctggaagcaaaaactgagataattaccttttgtgatatgctcagggataagattgtatcctcataattattgattaaaagagctcgcaatggaaggtgatgcacccttgaggtgtgttctgtttggcattggcttttaatagtcaagctgtggatttctacatgcatattatcaacttatgctttcaaaaatagcacacttggatgctgctcatcaacagtgcaaaggtggcagatgagatccttattatggtgttcgatatggggcttttgaccaaaggataaatggttgatcatggatgttgattttgacttctacttcatacggcaggaatctacaggaacaacggctatctgatggtctcctgcaacggcgggcttaaccagatgcgagcagcaatttgtgacatggtaaccatcgcaaggtatctgaacgttactctcatcgtaccggagttggataaggcttcattttgggctgatcccagcgatttccaagacatatttgacgtggactacttcatagcgtcgctgagagacgaggtccggatcctgaagcagctgcctccgaggctcaagagaagagtggagatgggatccctccggtccctgccaccagtcagctggtccgacatcggctactaccgccgtcagattctgcctctggtaaagaagtacaaggtcgttcacctgaacaggacggatgcccggctcgcgaacaacggcctgcccgtggagatgcagagactgcggtgtcgcgtcaactacaatgccctgagatttacccctgaaatcgaggatctgggcagacgcctggttcgagctcttcgccggaacgggccctttgtggtccttcacttgcggtatgagatggacatgcttgccttctccggatgcacgcacggttgcagcagcatggaggctcaagagctcacgaagatgagatatgcctacccatggtggaaggagaaagtgatcgactcggacgccaagaggaaagacgggctgtgtccgttaacgccggaggagaccgcgctggtgctgcaggcgctcggcattgaccgcggctaccagatctacattgccgcaggcgaaatatacggcgggcagagaagaatggctgcgctcacctcggcttatcccaacgtggttagaaaggagacgctgttgccttgggaagtcggcctgttccagaaccactcctcccagatggctgcgctggactacatggtgtccctggagagcgatgtcttcatacccacctacgacggcaacatggccaaggtcgtagaaggccatcgcaggtacctggggtttcggaagacggtgctgctggaccggaggcgtatcgtcgagctcgtcgacgagtacaggaacggcacgttgcgctggaccgacttctcgtctgccgtcatggcgtcgcacaccagccgcatgggcgaaccgtccaggaggcagacggttcctgacagacccaaggaagaggactacttctacgcgaacccgcacgagtgcctgcaccagccggaagatgtctccgccttgtgatacccgcgctcccgcggtacaatacagtacagtggatgatgcgcgggctttcggagtccagaaccacatgtatatgtaatagactaatagcgcattcgacagcgttgcgttggcagagggtaaacgtaaacggacgaggagggcctcgcgttcggtccggttgaacgagcatgtgagttaggattcggtacacagattcatggaacggtggttcgccgattcttttttctgttcagaataagcagaccctttcgttgttgttcttgtgtacagcagacgaagtcgtgaagataataacaacagcagcagaatcgtcgtgaaaaag

SEQ ID NO: 25216 - DNA, 607 bp, Zea Mays
actctccgacggctcgcggtcgtcacgggtgcttgtcaagaatactgacaataatgttgggaggattgtcaaagcagtattgtttggtaacccgtcccttgacaagtcctgctcagaacatactgaccaagtggtctctggtcatgcaatgggcttcttaccttgtcgcacgttccctgctactggttttacatccatggatgaagatgttggttatgttagcccacttttggcattcaacttgggattgcctgtttcttgccttaaactacttattcaaagagaagggcagcctttcaagttctgttctcgagctgaagagatggatgcaactgccagttctggaaataaattcatcctttggaggaagtgagtaccaagacatggtagatcaagctttgaacgagtactttaagtttgataggttcctagcaagaggagatgtttttggtatacaaaacagttggaagtgtggctcaagctgctgcctggcatgcaataagcaggataataaactgaatccccgtaatatgatctactttaagtaccattgcacagtgaagtagtggagcatttagcatctgtcattgcaccagcattgtgccct

SEQ ID NO: 25217 - DNA, 2181 bp, Zea Mays
ggcgatcccatattccccttccgatcccatcccttccgcatcgtccccgaacgacgcagacggacgcaaggcacggcgccgacatctccccgtggcccgagggcccagacatgaaggccctgggcgcgcacgccgccgacctgctccgaggcccgcacctactccgcgccgccgtcttcgctttcgccgttgcgctcgccttcctcgttggctaccactggcccaacgcctccccgcgccttgtcttcttctcgtccgatgcctcctcgtcgtcgcccaggtcgtcctcccgctctccttccgtcgtgctctcccctaactctaacgtctccttcgacccatccctgatccctacccccagcaccccgcctgcttcttctactcccaatgcctggtccccgcccgcactaccaccgccgacatcggcgccgccgcctcccctcccccctcctccaccaccagcgcgcctcggcatcgtcggcgaggacggcgctatgcaggacgacttcgacatcggcaacgtcggcgccaacgacactgatctggccaccgacgagaccgcgccgcaggagcctagcgacgtgggcgccagcggtggaccacctagggtgcggattgagaggttcccggtctgccccgagagcatgagggagtacataccctgcctcgacaacgaggatgatatcaagcggctgccctcgacggagcgcggggagcggtttgagcggcactgccctgccaaggacaagggtctcagctgcctcgtgccggcgcccaacgggtacaaggcgcccatcccctggcctcggagcagagacgaggtctggtttagcaacgtgcctcacacaagattgattgatgacaaaggaggacagaattggatcaccaaggtcaaagataaattcagatttcctggaggcggaactcaattcattcatggagcaaatcaatacctagaccagatctcccagatggtatcctgctcctggaggttaatagattgcttagagctggaggctactttgcttgggcagcccaacctgtttataagcatgaagaggcccaacaagaggcatggaaagagatggagaacctcactgcccgactttgctgggagtttgtgaagaaagagggatacatcgctatgtggaggaaacccttaaataactcttgctacattaaccgaggtcctgaaggaaaacctccactttgtgatgctgatgataacccggatgatgtctggtatgttggtctgaaagcatgtattagtcggcttccagagaatggcgaagcaccaactcctgttcaatggcctgcacgcttaatggagccaccaaagaggcttcaaggcgtcgaaatggatgcctactcatcaaagaatgagcttttcaaagcagaaacaaaattttgggacgacataattgacggttatatccgtatctttaagtggaggaagttcaaagtccggaatgtaatggacatgagggctggatttggagggtttgcagctgctttgatccgccagaaactggattggtgggtgatgaatgttgttcctattagtgagccaaatacactacctgtaatttttgatcgggggcttcttggagtagctcatgactggtgtgaaccctttgatacataccctaggacgtacgatctacttcatgcatctggtcttttctcaaaggagcagaacaggtgtaatatctctagcatcttgctggagatggaccggatactcagaccaggtggtaaagcatatattcgtgaccggaaagaagttatacaggagatcaaagaaataacgaatgccatggggtggcgtggtactatacgtgacactgccgaaggcgcgtacgccagtaggaaggttttgatgtgcgacaagcctatggcgcgttaggcgatcaggtgaagacaagcaggggtaattttaggtacttttgcaactgaaaagagctgctgtcgggactgacatttgtgctgtagatagggtaggtcaaggactaatttgtaactatttgattgatcatccatttgtaaaatgatgatctgtgtagtttctgacatgtgccaatttcttttgttgaaacattgtcatggaaaccctacaaaagtgggggaaatacgaagagaccgttttaaactaaacaatatcagagtaaaaattaataataa

SEQ ID NO: 25218 - DNA, 12921 bp, Zea Mays
cgagataccaccggcctttttcagggagaagccactccatctttctttttttcctttttccaactttcttcttcttcctcctccttctcattctgatctggaacaatggcgacagaagacgaagagcgagaagcagcagatgggacggaagtcccagtggaagctgtggttttgggaacattccatttgcatgcacacccagaaggcaagctttcatctctgatggatatcaagagcatgggagaaaccatcgattcaactgaaggaacgttgaagattccagaggatcaagttttagtagaagcaccctctgatgtccaacttcctccagaacataatctaaatggtgaagcatcttctttgaatggccatacagacaaagaagagaaggtttcagtcgagcagccacatgacaatgatcaggaagaagcagaactagatcagaacaacagaatcaacaaagaagatgcggctgatggtttaagtcatggagagagcacaacagaagacagctgccttctgaagcacaagaaagatgaagaatccaagggtgatgaacaacaagatttaggtgttacagtggatgatgacttggtgcaggaagacacgctgaaaactgacaatgctattgagcaaacagatgatggtcagcaagaccaggatcaagaacctgaaaaggcaaacgagaacacagaacctgcaagcatcgcaaacaatgacgatgttgagattgtagctgagacacctactggactccaagctcctgtggagtcacgtatgaatgattctgatggcattccggagactattgatgaagagacagaaacagatgaaccagctcaggcagatggcgttgttcatcctgaagacgtggccaaagtagaagatcaacagagtcaacaagatgacacggtggatgcagatgtggccccagaagaggttaaatgtgaagaaactgatcagcaggaagagaagcccaaatctgaagctcatgagccaacgattgatactcgagaagcgttgaatcaagaacctgctgaagaaactgatgactcgatgaataaaaagattgaagaaactgcacaccagaggaacatggcagctccaaaggagacaacactagaacatgaagcaacaatgagtgctacaccagtaaatacacaagtgcaggaccaggaaccattagaagaaatagaagataccgaaaaaggaatccaaccaagcagtggttctggggatgcaattccagaagatcaatctaatttaagtgttactatagacaatgacactgtgaatgaggatacagtgataggtattgagcaacaggatgatggtcagcaagatgaggatctagaaccagaaaaggcaactgaggatacacaacctgcaagcatgacaaacattccccaggttgaggttgtaactgaagcatcttctggagtccaaactcctggggacctgaatctcaacaactctgatgctgttccagatactattgatgcaaacacagaaacagatgagccatctaaagcacactctgttgttcatcctgaaaagaaagagagatttctagaagacgcaaccactgaggaacctacagaagaggtggtcaaagtagaagctcaacagagccagcaagcagatgtgatggatgcaaacatggtgcaggaagaggtgcctaaatctgaacatgctgatgagccagcaactgatgcttttgaagtgctgaatcaagaatctgttgatgagccagcaattcaagcacctgtaactattcaagtgcagaaccaggaaccattagaagaaatagaacttgctgaagcagttgatactgaagcaacagtgcaacaaagcagtgctgcttttgaggagtcggttccagaacatcaatgtaatttaggtgctacacataacacagagcaggaagacacgctggaagctagtgggcaatcaaaaggaggtcaggaataccaagacctaggaccagaaaatgcaactgaaaacacacaacaagcaagcatgacaaatattcttgatgttgaggttataactgaaacaccctctggaattcaaactcccatggagatcaatctggttatctctgatgccattccagatgcaactgatggaaacacagaaacagatgaaccagctaaagcacacactttcgttcatcctgaaaagaatgaagtctttccagaaaatacatttaccaccaaacctacagcagaggtagtcaaagtagaagatcagcagaaccagcaagatgatgcaatggatgcagaagtggtgctggaagaggtgcctaaatctgaacgtgctgatgagccagcaactgatgctcttgaagtgctggaatctgttgaagaaactgatgacccaatgaatgaaaagactgaagaaacaacccaacagagcaacataccagcatctgaggagacaacggcagaatatgacgcgacaagggagccacctgcaaataatcaagtgcagaacaaggaaccagtagatgaaagagaatctactgtagaagaaagagaagttgctgaagcagttgatactgaagcaccagtgcaacaaagcagtgttgcttttgatgaggcagttccagaagagcaccataatttaggtgttgcaaataacacagtgcaagaagacacaatggaagccactggacaaacacaagaaggtcagcaataccaagatctaggaccagaaaatgcagctgagaacacacaacctgcaagcacggaaaacattcctgatgttgaggttataaccaaagcaccttctgaaattcaaagtcctgtggagatcaatctggacatctctgatgccattccagatactaacgatggaaacacagaaacagatgagccagctaaagcaaacactgtcgctcgtcctgatacggaagagagctttgcagaagatacatctactggacctacagaagaggtggtcacactagaagatcaacagagccaacaagttgatgcaaaggatgcagacgtggtgcaggaagaggtgcctacatcggagcacaccgatgagccagcaaccgatgctgttgaagcgctgaatcaagaatctgatgaagaaacagatggcccagtatatgaaaatactgaagaaacaacacaccagagcaacatgcccgcatctgaggagacactaccagaaaatgatgtgacaacaagggagccatctgtaactattcaagcacagaaccaggaatcattagaagaaagagaagttcatgaagcagttgatactgaagcaacagttcaaccaagcagtgcttcttttgaggagtcagttccagaacatcaacataacttaggtgcgacaaatgacacagtgcagcaagacacactggaagcaactaagcaaacaaaaggaggtcagcaataccaggatctaggaccagaaaatgcaactgagaacacacaacctgcaagcatggcaaacattcctgatgttgatgttataaccaaagcatcttctggaattcaaactcctgttgagatcaaccgggacatctctgatgccattccagatgctactgatggaagcacagaaacaactgaaccagctaaagcgcacagtatcattcatcctgaaaagaaagagagctttcaagaagatacatctaccgcagaacctacagaagaggtgatcaaagtagaagatagacagagccagcaagctgaagcaatggatgcagacgtggtgcaggaagatgtgcctaaatctgaacatgctgatgagccaacagctgatgctcttgaagtgctgaatcaagaatctattgaagaaaccaatagcccagtgaatgaagagactgaagaagcaaccaaccagagcaacatgccagcatctgaggagacaataccaaaatatgacgcggcaacaagggatcaacctgtaaatattcaagcgcagaaccaggaaccagtagatgaaggagaagctactgtagaagaaagagaagtggctgaagcagttcatactgaagcaccagtgcaacaaagcagtgttgcttttgaggaggcagttccagaagaccaacataatttaggtgttgcaaataatacagtgcaagaagacatgatggaagctactgggcaaacaaaagaaggtcagcgataccaagatctaggaccagaaaatgcaatagagaacacacaacctgcaagcacggcaaacattcctgaggttgaggttataaccgaagcaccttctggatttcaaactcctgtggagatcaatctggacatctctgatgccattgcagatactactgatggaaacacaggaacagatgaactagttaaagcagaaggtgttatccatcctgaaaacaaagagagttttctagaagatacatctaccacagaacctttagaagaggtggccaatgtagaagatcagcacagccagcaagctgatgcaatggatgcagacgtggtgcaagaagaggtgcctaaatctaaagccgatgagccagcaactgatacccttgaagtgctcaatcaagaatatgctgaagaaaccagtggcccagcgaatgaaaagattgaagaaacagccaaccagagcaacatgctaacatctgaggagacagtaccagagtatgacacagcaacaagggatccacctgtaaatattcaagcacagaaccaggaatcattagaagaaagagaagctactgtagcagaaaatgaagttgctgaagcagttgatactgaagcaccagtgcaacaaagcagtgttgctcttgaggacgcagttccagaagatcaacataacttaggtgctacaaataacacagcgcaggaagacacgcaggacgctattgggcaaacaaaagaaggtcagcaattccatgatctaggaccagaaaatgcaactgagaacacacaacctgcaagcatggccaacattgctgatgttgatgtaacaaccgaagcaccttctggaattcaaactcctgtggagatcaatctggacatctctgatgccattcctgatactactgatggaaacacagaaacagataaactagttaaaacagaaggtgttatccatcctgaaaagaaagagagttttcctgaagatacatctaccgcagaacctacagaagaggtggccaatgtagaagatcagcaaagccagagagctgatgcaatggatgcagacgtggtggatgaagaggtgcctaaatctgaacatgctgatgagccagcaactgatgctcttgaagtgctgaatcaagattatgctgaagaaaccaatgacccagtgaatgaaaagactgaagaaacaggcaaccagagcaacatgccaccatctgaggagacaacaccagaatatgacacgacaacaagggagccacctgtaaatattcaagcacagaaccaggaatcattagaagaaagagaagctactgtagaagaaagtgaagttgccgaagcagttgatactgaagcaccagtgcaacaaagcagtgttgctcttgaggatgcagttccagaagatcaatataacttaattgctacaaataacacagtacaggaagacacacaagaagctattggacaaacaaaagaaggtcaacaataccatgatctaggaccagaaaatgcaactgagaacacagaacctgcaagcacggccaacactcctgatgttgatgtaataaccgaagcaccttctggaattcaaacttctattgagatcaatctggacatctccgatgccattccagatactaccgatggaaatgcaaaaacagatgaactagttaaagtagatggtgttatccttcctgaccacaaagagagcttttctgaagacacatgtgttgtagaacctacagaagagatgatagaagtagatcaacttggtcaacaagctgatgcgatacatgcagaggtattgcaggaagaggtgcctgagatgatagaagtagatcaacttggtcaacaagctgatgtgatacatgcagaggtattgcaggaagaggtgcataaatctgaacagtctgatgagccaggggtcgatgctcaagaagtgctgaaccaagaatctgctgaagaaactgatggcctggtgaatgtaaagactgatgaaactgagcacaagagcaacatggtggtccctgatgacacaattccagaacatgatgcacaaacgagagagccacctgtaaatattcaagaacaaagccgggaatcagtaggagatgctgaagcagtcaatactgaagcagaaatgcaacaaaacagtgttgcttttgaggagacaactccagaaaaccatgtagcaacctcagagccatgttctgaaatccaacatgcacatcatgtggaaccagaggaaatcaatggccctgaagatggcaaagatgatgagatcaccaacatgagcagcagagaatatctagttcgagataatgttctgcagagtggaccaataatagatatacaaccagttcaggagttggaacaaattaaaacggatgaagcttctaaccagactcatgctgttatcttcaatgacctagctcaggaagatgctacagcaacaagtgaaccacaagtgactgaaacagaactaaaggacattgaagccactgaagctgaagaaatcaccaaacttgaccatgttactcattccaaggaacttgcagtagaaaatgattcaacagcagatgaaccacataagggtgaaatccatcaaactcttgaacaagatttagttgaagttaaggacactggaacttaccatgaaaaaacaatatctacttcagaggacacagtacaagataatttgacagaagatgagccaagttttggtagtcaagaagtagatgatgcagagtcaacagaagaaactaagcaaaacatagctgagaatattgcagaagtctctgatgtggcgattgttgatgacgcaattgaacagaatgtgctacagactgaggatatcgttgaaatgcataaacaggagctggaacgagaagaaacagagagaatagaacctgttgaatcagaggaagcttctgatcagaggaatgatgcaccattcgattattcagctcgagaagataatacaaaggaaagtgagatacagcagacagaatcagcaacggaaacaaatgaaattgaacccactgaaattgaagcagttcctcgagaaagcaatacctgtgtttcagaggagccttctcaagaagatcatataaaagaaagtgaaacaagttttgacaatcaagaagtgaacatcacagaatcttcagaagtaaatgatagtcacaaagatataatatctggaggaatctctgacccaagcaacacagcttctgctggggattcatctgaaggaagcaatgtccctgaaggcgagccacctgaacaggctgtgcaggaactgggatcagaggagataaagaacactcaaattgatgaagtgaatgaaacatcccttgaaatgaatgctactgtctttcagataccaagtcaagaagaaaatccagacacaaccaaattgcatgaatcaacagaggtgagcaacattgaagccacagaaatgcacggaaacccccaccaaagtgatctggctgctcagtcagaggagcaaacaacagaaggaatatcaagtggtctgaaaccagaatcaattgaaggtaatgatacagaagccaaaaaatgtcaaagtacctctcaggaaaaaacaatctctgcctctgagtctgtcccagaagatgcaaccactgaaccagatgttgatcaccaacaacttcaggatcaagaatctgccaaactcaaggaaaccgaagctgataaatttcaagaaattgtctcatctaacactctttcttctgaggagttcacatcaacagaaccaagttctgacaccgaagcagacaattcacagttagcagaagaaactgaggacaccgaaattgtgaaaagtaatactgctcttgctgaggcagcagctccagaaacagatgcaactgctgatacatcatctttccatgagacagatctagaagagaacaaggacacaggaacaattgaaacagaggatggtatggtatcaagtgactatacatcagaaaagatggacacggaaaccatggagactgaagcagtccctcatgatagtagtgatgcaaatataaaagaacacactgaagacgatacttcaacaccaaatgccccacatgctggtactgaacctgttcatgagctagaatcagttgaagtcagcgctgacacaacggaacatccaggagagacccatgactctgcttctgatgagcttactccaacagaagaaaatacagcagtaacagaaccatcttttagtacacaggaagtgcagaatctgacatctcaagaaatcaaggacagcgaagatgacaaaactgatgaattctcagatatcaatagctttcctattcctggagaggcagaccaagtaccaagaagtgaaacaactcctgatgtccaagaagtggaagaactgggtttaacagaagaaacaagagacattgaagccatagagcctggagatcagcaagaagacatagtttctacccttgagaagccagaaatagacggtgaaccaagtgctgataatcagcaggttcatgaggacaaactaccagaagtggaagacaataaagcaattgaagctgaagcctccaagcaaagtaatattgccactcctgataatgcagctgaagaaaggaatgaactggaaagtgatccagatccatatgcccagccagcagaacaggtagaattatccaaagacaatgagaacagccagcttgtgaagacagaagaaacctcagaccaaagcaattttgtcgtccttagaaggactacagaagattctgttgcaagagaaattgacccacctgttgccattaaacaagagcaaccagtggaagaaatcaagggtgtcgatgccactgaagctgaagaagactttcgtacaacccaagctgttgcaatagagaaactagcttcagtcaataaaatagcaacagtagaaccgacttatgatattcagcgaatggatgacttggaagcaacagaggaaaagaagcacgctgaagccattaatgaaggagatcaatccaatattgctgtttcagaggaacaaactccaacatataatggagaaacaccagaagatcatcatgtagaatcaaatgaaggaacgatggggaatgaaactgacaatatcattttggcacacggaatcaaagatgaaatacagaagtcagcagaactaaaggacggtccatgtgatttgtctgaaactgttttaacaactcggagaagtgagaacatgattgatgaagataatgttcaaacttatggcaatgatacagtagaggcttcaaacagtatccatcaagtcaaagaagagccagatgctggaaccgaacataattcaagccaaatgataagtgaatgtagtggagagaacgaaactcatgtccaagatagagatgtagacatgtggattctcacagaaggtgtcattgcagaagcatcacaggctttattggaaaatgatcctcaggcagcacaagatactatagaaaaggatgatacaacgaaaagtagtgagccaatcagtgatcacgatagcaggcaacattgtgatgtagaagcacttcaacaacaaagttgtgagacagaggccttatccattttggaacaagatgaggctctgcaaaagattgactcagatcaaaagcagaaagaagttgaggagattgaaagtcagaatgatgaacttcaggtagatgaacagaaacatgaagacaagagggatgatttagccaaagaaccactagtggagtaccagaatttcgaaaacagagcttcaaacaacacaaaagacaatgatgcattcaaggatcctgttcacatcattcaagcatcagagaaagagatcgcagatgaaatagaagaaagtaaagaaatacatgaagacaatgctatttgtcatgataaattacagacaaattctgaaaaggaagagtcacctcaaccgcattccaatgaaccatacaatgtggatgctaaaattgatgatacaacatctctatgcgaagaaataatccatgacaatacaagtataaatcctagagaaattgaagagataggagaaaacaaaggaccagacttcacttctgaaccttctgtagaatcatccatacagaacaatgttgaagactcaagcagtcatcacaaggttgaagatgaaaagctttcaatgtctgagaaaaatgatgtagatactgaagctatgcaagaaataaatgatgaatctggcgcggatataaaccaaacagaacaatgtcaagaagaaattactgcagatgatgttctgcaacttgaaacagaaggaaattcatttgacaagattgaagagactgcttcaaatgaggaaacagagactagtacagcagccactgaagcagtaacgttcaatgaagatattactgacaaggttagcggagctgatggagcaccgtctaacggaagtctcaagacctttactgacactggaagggatattgatgttccattggtaattacaacatcaaaggaagaaagtgtgaacgacactatggaaaacctcaatcttgaccttcctggacatcaggcacaggatggcaacaccgctgaaaaggtgctcagcttagaggaaagagaaagagagatgccttcatcagagaagctccttcaaactgaaccaggagagaatcaaattcccaatgaacaggatgaaaaggacatacgagatgagaatcaaactctaaaagaaaaggatgaagatgacatgcaagatacagaatttggagaggctaagaaagaagttcaacaagaattacctgtctcccattttctgatgaatctaatattgggaaaagagagcagtgatgcaaatgaagattcagaatctgaggctgcaaggaagcaaggtgaagcgacagaagatgacagctgcacgttcatttctgaacaagaagaaagtctggggtcacttcctacagaaaataaggtggatgacaatcccacctttgttgaacaagaaaaacatgaagttaaatgctctgaagaaacacaggaaatggtcgaagaacaaagtgatgatcagctgcacacagaaagatcaattgaaattgatgaggatatcaaaaagaacactcgtgctttagaaataccagcataccaagacaatccccaggatggaatttctggtgaattgcagacagaagaagcagctggtgtttctacaaaaatggtaactagagatattgatatttcgagtgttgtgctggacaacagaacagttggtactgtgtgtcaggaaaaaatggaggtatcaacaaaaaatgaaaatggaagcttgaggagcagcctgaatgactcaacaaacacaatggctccccaagacgatactctaggagaaggacaatcaaggctcgtgcttgaacctttacctgaagacaaaagtgttgatgtagtttctgagcaagcacctttgttgacagaatcaggaatgactgacgcgaatgacttatctagcgatactacaagtgctcaaaaccctgtgtctacaaaacccactgaatctgccagagttgaggccacatattctactgatattcaactggagaatgaagaagtagataagaaagaagaggaccagcatgcaaacacaaccaaagatgaagtttctaaagagattgtagaaagttcacatataaatctgcagaaaataacaaggcctgaagaaaaatctaatgagctagaaactcaaattaccgaaccagtttgtgacagtcaggcaattttggcccatgaaaaggaaatatctgaagaaaactttccaacagcagtcgaaattcaggctgatggtccaaacatgcagatcaaccaagataagcaagatgaagctgctgacatcgaaactgaaatgaagccagaaaaattaggggaatctaattttcaggaacaccaggacaatggtactgagcaaaagtctcctaaagagactgatgaaggagaccagcaacttgtggccaagaaagagattctgacccaagaaatggatgtgcatgagacagttgaaagacctcagcaagcagttgaaagtcctcagcaaacagtgagcataacatccaatgaagaccaggaactgtttgattcaaaggtccaggaacgtgatctcaatgtagtttcacccagagaagcttctgaggctgaagaaaactttgtggacgtaaccaagccagaattcagcacagatgaagaacaaagtccaaaggctgatgcagaagagaagatttatgacgagaagataaaggacatagagggaactaagaatttaactgatgaagcagcaataaaaactgaagcaccaggagcagcccagaagacacgtaaaaaatatagcctattgtctggcgtgggatcgaaggtaaaacaccaactcgcaaaagtgaagaaagccattgtaggcaaacctgggcacacaaaaccagtatctccgacggcataaaactccagtcaccttagaacatgtacattattgtattgtttgtagtcttgtgagccatttatttcggtggtagtgtttgcgatgggctaggagaaggtcctcttcacaaccatagcattggaattctatgatgttgcacatgaaacaccccccccccccctcgagagtatgttgaagatgtttgtaaatatgtctagtgtgtaaattcaagtttccctgaaactttgaggtagaatcaaggacatgtaattggtcaattgtttgtattcttcgttgaaatgcacaagcagtttgtggtcatgatgcagcttgcagcat

SEQ ID NO: 25219 - DNA, 3743 bp, Zea Mays
cgtcccaccaccacgccctctcccctcttcccgcaccgcagcgcggcaccggcacctgccaccagcggccatggatctgctcccgccgccgacggacgcgccggatgccggcggccccagcgccggcgggtcaggccgggggctgcgccgcgggatcgggttccggtcgctgaagctggtcagcgttgccatggacgagaccctgcccgtcgaccccgtcggcgccacctacggccgcctcgccaacggcctcacctactacgtccgctcaaacccaaagccacgcatgcgcgccgcgctctcgcttgccgtcaaggtcggtggtagaggaggaggacgagcgcggtgtggcgcacatcgttgagcacctcgccttcagcgccaccgcgcgatataccaaccacgacatcgtcaagttcctcgagagcataggggccgagttcggtgcctgccagaacgcgctcacctcatcggatgagactatttacgagctgctcgtacccgtcgacaagccaggcctgctctcccaggctatatctgtcctcgcagagttcagctcagaggttagggtgtcagcagaggatctggagaaagagaggggtgctgtgctggaggagtacaggggtggacgcaatgcagcaggccggatgcaggactcccactgggcactgttgtttgatggttctaagtatgcagagcgcctgccaattggtactgagaaggtgatacgaactgttacacatgagaccgtgaagcggttttatcagaagtggtaccatctaagcaatatggcggtatttgcagtgggtgatttcccagatacacaggctgtcgtggagttgataaatgagcattttgggcacaaagctccagctccccaccctcctccagttataccagaattttcagttccatcgcatgaggaaccacgcttttcatgttttgtggaatctgaagctgcagggtcggctgttgttatcagctgcaagatgcctgctggtggaattaaaacagtaaaggactacaaagattcactggcagagtccatgtttcattgtgcgctaaaccagaggctcttcaaaatatctcgtagaaaggatcctccttatttttcttgctcctcagctgcagatgctctcgtctgtccagttaaggcttacattatgacatctagttgtcgggaaaggggaacagttgaagctctcgagtccatgcttcttgaggttgctagggtacggcttcatggattttctgaccgtgagatatccattgtacgcgccctaatgatgtcagagatggaatctgcatatttggagcgtgatcaaatgcaatctaccagcttacgggatgagtttttgcagcattttcttcgtgaggaacctgttgttgggattgaatatgaagcacagttacaaaagactcttcttccccatatttcttctgcggaagtggcaaaatttgcagaaaacttttcaacggccagcagctgtgttatcaagatagttgaacctcgagctcatgcttctttggaggatctgaaagcagttgtgctgaaagtcaacagtatggaagaagataaatctatttttccatgggatgaagaacaaattccagaagaaattgttgcccaagctccagagccagggactataattgctaaagtggagcacccaggcataggtgctactgagatgatactttcaaatggcatgcggatttgttacaagtatactgattttcttgatgaccaggttgtttttactggctttgcctatggtggtctgtcagaattatctgaagctgagtatacttcatgctcaatgggttcgaccatagcaggagaaattggcacttttggctacagaccttctgtcttgatggacatgcttgctggcaagagagccgaagttggtacaaaagtgggggcctacatgagaacattttctggcgattgctcaccttcagatcttgagacagctttgcagcttgtttatcaactatttacaacaaatgtggagccaagggaggaagaagtaaaaatagtgatgcaaatggcagaggaagcaatctatgctcaagagcgcgatccatacacagcatttgcgaatcgtgttcgtgaaataaattatgggaactcatacttttttaagccaattagaataagtgacttgaagaaagtggatccaatcagagcgtgtgaatatttcaacaattgtttcaaggatccatcagcttttacggtggtaatagttggaaaaatagacccagccatctcacttccactggttctgcagtacttgggtggaatacctagggtacaggatgctactcaaccacttagtcgtgatgatctaagaggattgccatttaagtttcctgcaaccatcattagagaagttgtccgcagccctatggttgaagcacagtgctttgtacaactagcatttcctgttgttcttaagaacacaatgatgactgaagatattcactatgttgggtttcttagtaaacttctggaaacaaaaatcatgcaagtacttcgcttcaaatatgggcagatctattcagttaatgtagctgtcttcttggggggcaacaaaccctcaagaactggagatgttcgtggagatataagcgtgaatttctcatgtgatccagacatatcatctaaactggttgattttgttctggaggagatatcatgcctacaaacagaaggtccttctgaagaagatgtattgtccatcctcgaaattgaacaaagagctcatgaaaatggattacaggagaattacttctggttggatcgtattctacggagctatcaatcaaggcttttttctggagatattggatccacctttgcgttccaagaggaggggcgtataaaggttagggatgctttgacaccacagagcatgcaatcagccttgcaacgagttatacctttcccttgcagaaagcagtacactgtggttattcttatgccaaagtcatcctgttgggcgtcagtgaagtcaatgcttagctggagttctaatggggtcagcagagatgctaagatcctcgctggcatggctggtgcactggtgttggcagtgagtttgtggaggtactctcgtagttcgttaaaatcttagtgtttgatacaactgaccgctttttggggacttccagtcagatctgaaaatggatcaggttaggaactgatacgagctgtcggtagatagatatttgttctacctgagcaccgacccggtgttcggagatctggtaacaaaagaggccatactatgacaaatttggtagctaacagattcgttgccgcatgtgtgcgtgcagtcctgtaatctcattcgttgtaccgcggcacatgtgcattagtcgtcggtgtatagtaatgactatcctcccatttgatttcataggcaggactgaagtagtggtcactgaccaccgtggcgggacggtcgaaactggaaacccaacattgtgatagctttactggtccaatttctgtggacggctttgtacctgtacgtttttccgtttcctatgacccagaacgaggaaaaatctataatgagcaggaaatgtgatattcctttatgctgctccgttggttttcatatattggctaggacagcgtccaagggtagcgttgggaaccgcgacgtccaagaaaggatagtgttgaaacttgtgacgtttaaggaggtgtttgtttgagattataatccggc

SEQ ID NO: 25220 - DNA, 2704 bp, Zea Mays
caactgttaacagagcagttgcattgcactgtacttgctttgaaatagatctatgcattgatatgcctttttttggttaatcacgaaacaaggcctcgacctttccagaaatatacataccgaggatataaggctgtttcagatcgaagtgggcgagaccctacaggcggtttcaaaggccctgtaaaaaaggaaccagagatgcaagctccactaaactcatcagccttggatgtcaagacaagtgacactacagaaatattttctgctactatcaatgttgcccagactgatgctaagaacaccacttctcagcctttatctaaagtgcagcatggttggggtggtattccaggtcgcccttccatggctgaaatagtgaagatgggcaggcctcaagctaaagttgggagcagatctgttgcaagtagcactgcgttgccaaccgttggtgattcagtcatttccaatacaccaaatcttgtgcctgaggaatataacagaactgtttttgcatcagaagcaggccatgtcgcagcagataaattgccaaacggtgctgttgaggtgcactctctacctaaagatgcttccgcatttgatatgttaccttcagctgagggaacagatgttgaagccccttccatgagtgctaatgcacaagggtcatcaacgccagatgccaatgaagatgacattgaaaaatatgcaaatttggaagagggcaatacagaaagcttgatatctcctggacaagtttctgcttctggtaaagatatacaatcagaatatactgaagttgtcagccatgtggatgaaggctcgatagagaaaacaaatgactttcagctcaatggccttccatttgagcacaaccaaaatctgaatggagacgtgtctacagcgacaacacaatttgatcatttgactctgcatgagggaccaaaattgtccgatgataatccggctgtaataattcctgatcatcttcaggtttcgaatgctgattgtgcgcatttgacgtttggtagttttgtgtctggaacacttgattcatccttgacaacaaaacctcttgaaagtcatggggatgctgcggcagttcctgatgatgattcaattgaccaatcagatggcaggatccatgacgatgaaggcaaggtgactttagctactgatgttaatgaatatgttacttctgcggcaaacagcaacgaggagaatcttgatattacatcagtacagcaatctgaagtcactagagctgatttcttggatgtcacaagcaatactgaatacaacctaacatcaactccagattatgcaacttcaagtgcaccgttgcaagattctgcttcacagagtttacaggaaaaccgacaattccagaacatctctcctttctcaagcttcatgcaaatgcaaaatggtctcctgccaccagcaattccaccattgcgtgaatttgatccagcattttcactattgctcacccatcctcctatgatgcatggtacaatgtcatcatccatgagcaatacaactgtttctacgcagccccaagagaatgccaatccagttggtttacccaaccctcaattgactcaatctcagcaaagcaccagcattgcttcagggcctccactccctcagcatcttcttcatccctatgctcaaccaacccttcctcttggctacgcaagcatgattggctatccatctcttccaccaagctatgcatatctcccgcctgccgcttttcagcaaccatacatgaacagtggcttgttccaccaggcagcagcggcagttcccacctcaagtgtgaaataccctctaccgcagtacaaaagcaacattgcccttgctagcttaccacagccaggctctttgctctcaagctacgttgggggctttggaactgcaagcaacatgcctggaaatttccctctgaatcaaagcacagcagcagcaacaacaactcttgggtttgatgggacggtcccttcacatttcaaagatggaaatcaatttatttctcttcagcagaatgagaaccctgcaatgtggatgcatggtgctagttcacgagggatgcccccacttgcagccagtaccatgtatggctatcaagggcagagtcatcaggccggccttcggcagggccaactaccttcacaatttggctctgcgcttgggcagtcacagccaggcctgggccctgaacaccgaaaccctagcgatagtaacctaagtggcgctgctcaggctaaccaaatgtggccaaatacctactgatccatcccccttgtcgacttctgtggaaggcggtcctgttgtgtgtgcaacgccggtgaggccatgcagtgcttgtgttctgatccaggcacgcggataccagctgtgcctgtgcgcatgagtcgctgtcgtgacattttgaggcacaagagacatatgttcgagcatgctctacctgtagggtttctaggatatggcaaaagaaaatgtagctcgatctatttattcaaattctgatagagaaaggacttcctcttttctattttattctcttttgtcattcacatatcatgtgacaaataaaaccgaaatatctaacagcagcgccattagttcccgaggaagtgaaactttacatcacaggtattgcgtgcctcttggcttcaattttatgattgaggtgatt

SEQ ID NO: 25221 - DNA, 5768 bp, Zea Mays
gccaaaataataaaaatagaaacaaactcgcctttttttctctctcctcccaccccggcgctccctccctcccgctcctccgccgaggtctgtgatcttctgccgctcctccgattggattcctcctcctccggcgttgcccggccccgcgccaccgggctcctctcctctcccgatcggaccggaccgcaccgcgccgggcgtgccctttggcgctgccgccaaatgcccggcgcgcgcggcgctgccgccccgcccccgctgcctcgctgcgacacgggtgcggggcgcgacgtaggattctgacaccggggatctttgcgcggtggagttctgggcccctcctccgtggaccgtggcggtgcctcgattagcaagcggcgcgcgcctgtcgctcgaccgatcctgctcgcgcttcctcggattccgatgcaatgcgcaccgcgggccgcgcggctcctcttctgaccgatctcggaggagctctgagatttctgtcgcatcagatgaggatgcaagtatgaaggtttctttgaggtggtacagttttagctgccaatggaggacccaaataaaacgttttctgacgtagttaagcttttgacatcatggctgccgcgacgctccaacccagataatgtctcccgggacttctggatgcccgatcacagctgtcgagtttgctatgactgtgattcacaattcaccatattcaaccgcagacatcattgtcgtcgctgtgggcgaattttctgtggtaagtgcactgcaaactccatcccagtttcaagtggccctgacagaaatgtcgatgagggggacaggatacgtgtctgcaacttctgcttcaagcaatgggagcaagaaagagtcacttccctcaaaccggtgctgccggtgctcaccccttccctgtctgagacgagtttgttcagcaccaagtcagctatcaccatcaatagtgttaccacaacggcaggctcttactctaatgggaattatcagcatgtgagctgtgttaccagcactagtcctccaaagtgttgccatgacaagacctcccataatatgcaagacactcatgctcctgagaaatgtatgtccactgtttcaaacaaagatgactcttcagttcagtttggctactacacaaacaggagtgatgacgaagatgaagaataccctgcttactgctctgataggcaggtacaacatcaacaacagagtggacaatattatggcccagatgagttttatgagcttgatacaccctacaattcaaaaatgtcgatcgttgaagaatctatgacctctaaagaactatccccacatgtgcttgatcaaggatttccgagtgcaccgaccattacaaaatcagacaatgaaccagaacattattatagttctgaatgtggtgctgcttcatccatttatgctttagaaagtaatgatacgaaccctgttgattttgaaaaggatgaacttttctggcttcctcctgaaccagaagatgaagaagatgagttgcaagctgaattgtttaatgatgatgacggtgacgatgacgatgacaaatctgtagctgatggtgaatggtgtcgaattcggtcgtcaagtagttttggcagtggagagttccgaagtagagatcggtcgggcgaagaacataagaaagtaatgaagaatgttgttgatggacatttcagggctttgatctctcagctactagaggtggagaatattccgttgcatgaaggtgatgacatgggctggttggagattgttacttctgtatcatgggaagctgccaacttcctcaggccagacacaagccagggtggtggcatggatcctggtggatatgtcaaggttaagtgcttagcatgtgggcaccgcaatgaaagtactgttgtaaaaggagtagtttgtaagaagaatgttgcacataggcgcatgacaactagaatagagaagccccgtctcctactacttgcaggagctcttgagtaccatcgagtcacaaatcagctgtcaagtattgatacattgctccagcaggaaacagatcaccttaaaatggcagtcgcaaagattgtagctcaaagacccaacttgcttttggttgagaattcagtttctcgatatgctcaagatttgcttctagaaaagaacatatcgttggttttaaatatcaagcagcccctcttgcaacgtattgctcgttgcacaggtgctcagatagttccttctattgatctcctaccatctcagaagcttggttactgtgagttatttcatgtagataaatacgatgaacagtctgttagctcggttaacgtgtcaaagaaaatggtgaagaccatgatgttctttgaaggatgcccaaaaccattgggttgcactgttctgctaaagggtggtagcatggatgagctcaagaaaattaagcatgtggtccagtatggtatttttgcagcatatcacttggcgttggaaacatctttccttgcagatgaaggtgcaaccctaccagaacttccattgttgtctccattgactgtagccttgccagataaacgatctactgcagacagctccatttcagcagtgccaggcttcacaattaatgtttcaattagccagcaaactgatagttttgaccacattggtaccgactacatcatgtcaacccaaccaggtgaaaatgctgtggctgaagcaccagtatccagcgaatgctttagttctcagaatacctactctcattctcttggaccttggtgtgctaataacagcaatttcaataacggcactggtgatggagatggattagctaatgtcactgcaactccaaattctgtttccatatcttctttgtctacatctggtgcactcacaaaccatacttctagatattctagtgtagagaaaaacagtatgcattttggtgattatcatgatggttcaatgaggttacatggtaagacggtgacaatagattcaaccagcacagcaagccattatcaccagagcacagtcaaagctagcactaatatcaatgtcaatgagtcattagaaggtccatatgctttggctaatgtgaaaaccatcaacgagaacaattctattgtagtccaaccagtgtctactgctgctgtacaataccaagagaccagtcaaggagatgatagcacatcaaataaggatgaagtggtgccttctgatcatcaaagcatcttagtctcattgtccacacgttgcgtatggaaaggtactatttgtgagcgttcccagctgttacgcatcaagtattatggtaactttgataagccccttggaagatttttgcgggattacttgtttgatcagggctatcagtgtcgttcctgtgataagccacctgaagcccatgtccattgctatactcatcgccagggaagtctaaccatttcagttagaaaacttaccgaatttgttttaacgggtgaaagggatgggaaaatttggatgtggcacagatgtctgaaatgtccttggagtaatggatttcctccagcaactcagaggattgtcatgtctgatgctgcctggggtttgtcacttggtaaatttttggagcttagcttttcaaaccatgcagctgcaagtagggtagccagttgtggtcattctctccacagggactgcctccggttctatgggtttggcaaaatggttgcatgcttccgatatgctcctattagtgttcactctgttcatttaccacctcataaacttgattttggccaccagcccttggattggatacaaaaggaagcaaatgaggttattgagcgagcaaaacatctatttgatgaagtattgcatgctttacacatgatatctgacaaaaaggttcaaggcagttcgattaacatggaatttagcaattacattgctgatcttgaaatcatgcttcgaaaggaaaagtcagaatttgagggatgcttgaataaagtcttgagaagggatatgcagaaaggccaaccggacattcttgagatcaataggctgcgaagacagttactcttccattcatacttgtgggataaaagactggtatttggcgcaagatcagatagatgtcgtcatgagaagacccattccatagatagtgtcgctgagcaaaatgtaatactaaagcctcaaagtgaatgcagcgggaataggtctgccaacaaagatgctaaatatgttgagtgccttcaggaaagtatttatggagggaatcacactggagttgatgtgggtactgtcaattcgaatcatgtccatcaaatggctacaggcgaattggattcgcttcagagagacatcaaagctcctctatacagcagtgttagtgtaaatggtgagtcgattcccttggaaccagatcttgttgctcgacgcaccctttcagaaggtcagtttcctagtgtattggatgtgactaatgcacttgaagcgaaatggaccggtaaagatgatcctgtttctagcaaggtaaccatgccagaatctacagcatcttcagaggactcagaagaacatatgggtgataatacaccttcatacgcctctatattgctgagcaagctaggggacagtgcagcagatcattctaattggatagagatgcctttcttactattttaccgttccctcaataagcaatggaatcgatcaaaccgatttgatgcactcaacgaatatagtcccgaatatgttcctttcttaagggaagtggagcgtcatattggacctaaatttttctttcctataggaatcagtgatactgttgttggagtttatgatgacgaacctactagcattatctcttatgcgctggcctcccatgaatatcatcttcagatgtcagatgaactggaacgagaaatgacagacacttcactcccactatgtgactcaagaagtgtctcgttaactgaactggatgaatgtacttctgaacttctaagaagtgttgtctctacagaggacattatcctctccatgtctggaagaaagaacccacttgcttcagattcacttgtgcctcgaaaagtaagtcacataaaagtgaattttggggatgaaggtcctctaggacaggtgaagtacactgtgatttgttactatgccaaacaatttgatgctctgaggagattatgctgtccatcagagcgtgattttgtcaggtcccttagtcgttgcaagaaatggggtgctcaaggaggcaagagcaatgtattctttgcaaaaacaatggatgatcggttcataattaaacaggttaccaaaactgaattggagtctttcatgaagtttgctccagattacttcaaatatgtatcagagtcgatttgtactggaagtcctacttgcatcgcaaaaattcttggtatttatcaggttaagagcctcaaaggaggtaaggagatgaggatggatgttcttctgatggaaaatcttttgtttgagcgcgatgtgacaacattgtatgatttaaagggctctgccagatcaagatataacccagactcaaatggtagcgataaagtacttcttgatcagaacttaattgaagcgatgcctacatcacctatatttgtcggaaacaaggcaaagaggctgctggagagagctgtttggaatgacacgtcctttcttgctgacttaactgataggaacagacataccaggccagctagtggaagtattgatctattggtgctatctagctcagg

SEQ ID NO: 25222 - DNA, 3901 bp, Zea Mays
cgcgtacgaagaaccccacgacccacgttcttttcttcctcttttcgctgccatttcctcccccaccacaccagggcccaggccaccgccgccttcatcccctatccgcgtaccgccccccgggcgatcgatcgaacgcggctagcctcgccgccgacccgtcgaggcagccatggcggagatcgccgaacgggccgtcgcgggcgaggtgccggaggagccgcggccgccgcacggggaggaggacgacgaaggggaggaggagggggacgtgtgccggatctgccgtaaccatggcgacgaggatcacccactgcggtacccgtgcgcctgcagcggcagcatcaagttcgtgcaccaggactgcctcctccagtggctcgaccatagcaactcgcgccagtgcgaggtctgtaaacatgcattctccttctcacccgtgtacgctgataatgctccgacaagacttcctttccaggaactgatggttggtgttggaatgaaagcatgccatgtgtttcagttcatccttcggcttgcctttgttctctcagtttggctcatgattatcccattcataacctattggatatggcggttaacatttgtgagaagtctcagtgaagctcaaaggctgttcctcagtcacatcagcgctcagttgatccttagtgattgccttcatgggttccttctctcagctatcattgtccttatatttcttggagccacctcattacgagactacataaggcatttgcgtgaacttggtggacacgatgctgagagggatgatggtgggcgtgaaaggcatggtgctcgggctgttaggaggctagctggtcctaataatagggttcctgcagatggaaatgttgatgaattagcagaagcccaaggaatcggtgctggtgaacttctgaggagaaatgctgaaaatgttgctgctcgattagaacgacttgaggctcaggttgagcagatgcttgatggtctagatgatgcagatggtgcagaggacgttccttttgatgaacttgttggtatgcaaggccctgtcttccacttggttgagaacgcaataacagttttggccagcaatgctatattcctcattgttgtgatctttgttccattctcattgggaaggattatcctgtactatctatcctggtttttctcttcggcttctactcctatgctggcaaaagtgatgcccttcacagaaacagctatttctatagctaatgatacattaaagagcgcacttaatgttgtgaagaatttttcttctgacagtaataatgaaggtgttatcgggcatgtgattgaggttgttactcaatccttgaagataaatgccactggacttagtgtaattcaaggcactgggaagaacagtctgatgaaaggaacaacaattgcctcatcttatctttcagatctgacaactcttgctgttggatacatgttcatcttctgtcttgtgtttttgtatattggatcactggctttacttcgatatgccaggggagaacgttttaccattggaagactctacggtatagctactatattagaggccatcccttctctatgcagacagttctttgctggaatgaagcaccttatgactatggtcaaagttgcattccttctggtcattgagcttggtgtatttcctcttatgtgtggttggtggcttgatgtttgcactctaaagatgctgggcacaacaattgcgcagagagttgaattctttacaatgtcacccttggcgagctcatctatccattggctagttggtattgtgtatatgcttcaaataagcatatttgtgagccttcttcgaggggtgctgcgcaatggagttctttattttctgcgggaccctgctgatccaaattacaatccatttagggatttgattgatgaccctgtgcataaacatgcccgacgagttcttttgtcagttgcagtgtatggaagtttgattgtgatgttagtcttcttacctgtaaaagtggccatgagagtagctccttcaatgtttcctctggacataaccatatttgacccattcactgagattccagttgatgttcttctgttccaaatatgcatcccattcgctattgaacatttcaagcctcgtgcaaccattaaagctcttttacatcattggttttctgtggttggttggggccttggcttaaccgatttcttactgccaaaatctgaagaaaacggtgggcaggaaaatttgaatgcaagggcagaaagaagagacagaggacatggtgggagggaaatggtcgccccacaggttgaacaactcatgatacaacatgttgccgcagaagataatggcaggggggattcaaatgaagccaatgatgtaactgaggactctgatgtagatgaccagggagactctgagtatggctttgtgcttcggatcgtgctcttgcttgtactggcatggatgacattactaatattcaatgctggaatgatagtttttcctatctcacttggccgtctggtttttgaggctgttccccgcctgccaatcacacatggcatcaagtgcaatgatctgttctcctttagcattgggtgctatattctctggagtgtggcagctgggaccagatatgcgattgattacatcacatcacgacagctggggtttttggtacaacagatctgcaagtggtgctcaattgttttgaagagctctgttctcttgtcgatatggatctttgttattcctgtgctgattggactcctttttgagctgctggtcatcgtacccatgagggtgcctattgatgagagccctgtcttcctattgtatcaggattgggctctggggttaatattcttgaaaatatggactagactgttatgttggatcagatggcacctttggttgatgaaagctggaggtcaaagtttgagagagttagagacgatggcttctcccgtttaaagggtctgtgggtcctccatgaaattataatgccgatcgtgaccaagctccttactgctctctgtgtcccatacgtccttgcaaggggcatcttcccgttgctgggttacccactcatcgtgaactcagcggtgtaccggtttgcctggcttggaagcctgatcttcagcgccctcttcttttggggcaagagatttcatgtctggttcaccaacctccacaactctatcagggatgaccgctatctgattgggcggaggctgcacaactttggcgaggactcacactcacctgagcggagtgaatctggagcaagtatagggtcagatgatcaggacagagatattgtactgcgagatcaggaagaggaagtggggttgaggatgaggcgcaataatatgcatgcaaaccaacaacctaggtttgctttataagtaggaagtagttttggacaaagagctcataaccatggtataagcttcggtctgcaggttctgcttgtgctttgtaatgggcgttgtagagtgagtttatgtgttagtgataggaaatagtctaaggactgttctacgataaagcctggagaaagctgaagtggctggtgattacaaaactggtggcaactcccattcctgtggtagtcctggctaactgtaaatatcgtttgacagagcattaccatgccaactcaatctgttgtgatcctcttgtaatgactagtgagttaaggtgaactgttgggtagatacgagatactagattattatcgcgttcactcttttttttttgggtcccatctttgtttttttagaaactgcaattgcattctgtttatatcatggagcatctagcggcttgaaatgaacaagaacaagatgcatgggcagtgggcagtattggttgtgg

SEQ ID NO: 25223 - DNA, 964 bp, Zea Mays
cttcgcgctcaagacttgcccgccatttcctttccctccctcagcccgcgcctgtgcccatatctctctgactgtcatggcgacgcggcggcgcctctctccgactttcttcggcgggctccgggcccgtgagctcggcggcgccagtgtctcctcccgcgccacggcggggctcccgtatctcgctgacctctcctccgaccccggcggccgcggcggcggggtcatagccgtcgagcactccggcgatcccgccatccccttcgccatctccttcggcaagactgcacagacctgtaacctcttggcggtcgccgacgaagacgggtacgttggcctctacgacacccgccggcgcctcccttccgcctcctcgtcactagagaagtcagctgaaacgagggtgtgcgactgggttgctcacaacaatgcagtctttgacgtgtgctggatcaaggagggatcccaaatactgactgcatccggcgatcaaactgtcaaaatatggagtgtaggaaacaggaaatgcattggtgtcttgtcagggcatactgggagcgtgaagtcgctgtcttgtcattcttccaatcctgagctcattgtttccggttcaagggatggttcatttgctctttgggatttaagatgtgaccctaaatctccaaacagccatggtgaaacgtgtctcacgtcttctgctgttgtcagagaagcccacagtcccatactaaggagccgaacacggtctcgagcaaaggcggcttcaacaagtatcacatcagttctttatctgaaagatggtgtctccattgctacttctggagctgcagacaatgttgtgaaaatatgggatacacgaaacctgaaagtgccgttctccaacaaaaactctcaagcaggggcccaacctttgctcaaatctggacaatctctgaacaaacatactggtcttttgtctctgaag

SEQ ID NO: 25224 - DNA, 1755 bp, Zea Mays
aggaatcaaggaactagctgaggtctccttccctcaagatgacaaacaaacagaaaaaactaccctcaaggtgacctaaacacaaagggagctacataataccctacaagactagaccagccgacccccttccatcctcagtgccctcctaccattggcggcatgggatctcggtgatggaagggcaggggcagcacaggatctactgcattttttacaacgcagtggcagacattggagacgggttcgtgtgggatgccgactcctagctctactgccacgccaggccaatttatgctgggaatgcactttgtactgtgaaatataccgacgaggatccttgcatgatgagtattagatcaacttcattttcccctactgctgatgctatgtctgaaacaaaggttgcacctatcacccaggttgatctctctttcctcagtgaagggaaatctacatgggtgaatctgacatcccaagacacaaagcggcatgatcttgcaaatgcatgtgtagtagtcacaggaggcagaggtttaagaagtgctgaaaattttaagttgttggagcagcttgcggagaaatttggtgcagcagcgggcgcgactagggctgctgttgaagcaggttatgttccaaatgaccttcagagttgcaggagaaggctgcagcagcttgaatctcagctaatggaagcgaacagaatcaaagaggaaggcaacactggaagtatccgatggaaggagaacatattagaccaagagaatgaattacagaacataaaacaagagaacgacgacctgcagacaaaggaatcagcggcttctgagaagattaaggaactctcttcccagcttactaatgcaaaatatggcatgataaatagtaacaccaaggagataatgagaaggggggcactgaagaggacgatgaacctgttgtagtagttgccaaaatatgggagaacaacaagtttgttgactatgattcatctaaggagaaggagaatgatggtgactcacaggttgatttggaatcaaacaagggggatgcaggtcttgatagcaacgggttgcactcaactaaggagaacagtggcagggcatcaccaactaaacaacaccagcagtataagaagaagtctctgctgaagagattcggtggtctgctaaaaaagaaaagcgaaaattagcataaaactgtctgatgatattctttgttctatcatttgacatattttttgtaaaccctctcagagatgctgaaagccaacttactattgagagtactatgaaacctctcgcgcagtgtgaaataaatgacagaaatgaagtgtgtgttggtgttggtgctggtgctggagacactaacataaccggtggtattatccaattgtattggagttctattcttgaaaggtgcttggatacaaacgatcaaagcttgaaggaggcttgagtcaattgaatcatctgtaagtaatttagaagaaatattgtttttgttggtgaagcgagtttgttctttcctttgggctctatttatttatgaattgataacccaacaggattgtagtttgtagccatttagatttgaatccgagctatgactgagacgaatacaacatatgcattttgtagccatgtatatctgaatcagagctctgtgattgagatgaatatggttttatgtgccgtcgcaacacactgacattgtactatggtattataagtatcaatatgaagtatttctttg

SEQ ID NO: 25225 - DNA, 1544 bp, Zea Mays
gtggtggtgtcgtggcgtgacgcgaatccgtgcctaatttggcgcgctcatgaagctgtggcagctgtgttgcgtttcggtgcagtaggatgcaggggagtctgattctgatagtgaagcatcggatgttagcggctctgatggagaagacacctcatggatttcatggtattgcaacttaagagggaatgagttcttctgtgaagtcgacgatgattatattcaagacgacttcaacctttgtggtctcagcagccaagttccttattatgattatgctctcgatctcattttagatatcgagtcatctcatggtgatatgttcactgaggaacaaaatgagctcgtagaatcagctgcagagatgctttatggtctgatacatgcacgatacattctgaccagtaaaggactggctgcaatgctggagaagtataagaactatgactttgggcggtgcccgcgtgtttactgctgtggtcaaccatgcctgccagttggacaatcagacatccatcgatctagtaccgtgaagatatactgccccaagtgtgaagacatctactacccacggtccaagtaccaaggcagtatcctaaccatactcttatcagactgtcttaatgcgtatatgtttcaaacttcgacctcttggtgagaactcaaaccaagggtattttttgtaccaagtctgacacagaatgggctgcccatgttctcagatgtgttagcacccactcacccacagctctcgtcggttgaaacaaaacattaaggactagcttgggaacctcatttttccaagtgattttcatttttccatggaaaatgaactatttttttgggaaaatgaaaaccccttgggaaattgaggttcccaaactagccctaaacatgaaatctgtctagtgcgcccatcaatcaccatgtgttttcaacccccatagattaatattgtttagtacctgaggtgcacaagctctcttctgtgttattgtggttctgtagttgcagaatgtttgccattttgttatatcctgctattttcttaaccttgttcagacatcgacggcgcatactttgggacaacgttccctcatctgttcctgatgacatacgagcacctcaagccacagaagctctcgcagcgctatgttcctcgtgtctttggcttcaagctccacaagccatgaacctcatgtatttgtcttttaaactcctcaagacgtggcactgggggcatgcgggagttttgcaatccttgaagacttgcatataagagcgccattggcaggtcagtggattggtaaaattctatcatgctgcagcgtgcttgtaccttagctggctggcacctatccaacatttgaatgtagctctaaggatatcaatgttgtaacctaactgctattgttctttgattagtaaaccaggagccccccctacaatgtagaatatggcaattatttatggctttgcagaaaataacaacccttcatctgcttggttctccaaaaagctatttatctaaaaaaatatcaaaa

SEQ ID NO: 25226 - DNA, 747 bp, Zea Mays
ccactaggaaaacccggctggtctctgattcgtgctgaagcttagatactgcaaaaccgacgggggaaattacacattttcgacattatttgctcaacattacgaaacacgcattcttccttctcttctcagggaactgaaaacgacgaacaccacggttgagagtttactaaaatcctctccaccacaattccacaaaagcaaagctatgacaacgactgacgcagcagcaccgaacccgagctgccggagatcggagaggagacaagcaaagcaactttatcttcacgtgggtttgaggtcctgaaacatggagtcccacttgatgtcgtcattgccggtgcccgcgccgccctcctcctcctcctccgttccgcactcctcgtcgtggaacatcaggctcgccttcgccgacgacagcctcgcgccgccgccgccgctgaggatctcgaggcggtgcttggcgacggcgatgcccatgctcttgagcaggtcgtggtcgaagtgcgccgcgtccccgggctccagctcgttccggctgaagaggcgcccgtactcgtgcgccagcgccggcgccagccccgtccgcgccagccacgcgcaccagtcgtcgtccatggccttccctgtccaccaacctacacttcccgcgcggctgagcggccagtgagcacacaggacaggacaggacaggacaggagtacaggacccagcgcccgcactcactgcaggccccctcactgcccg

SEQ ID NO: 25227 - DNA, 880 bp, Zea Mays
ttacagcctacggtcatcattcaccaattgaatggaaagtgatggtgaattccagtatggaagctacagaaaagaggcagctgatttgcgctctgtagtattacatttctcagaacagaaatatgacataattgctcttatcgggcatagcaaaggaggaaatgctgttcttctttatgcttccaagtaccatgatgtccctgccattgtgaacatttctggccgctttgcattagagcgaggtatggagggacgccttgggaagaatttcatgaggagaataaacgaagatggatacattgatgtgaagaataaaaaaggggagttgcagtaccgggtgtcgaaagcgagtctggatgaccggctgagcactgataccctattctccagccgtgccataagcgaaggctgcagggttctcacgatccacggcgccaaagacgagatcgtcccggcggaggacgcccggcagttcgcggcgaacatccgcaaccacgagctgcgcatcgtcgcagatgccaaccaccgttacaccgggcacagggaggagctggcctcgctggtgctgggcttcctcagctcccatccctaccagatcacgtcgcgcttgcgtccgagactctagatagagtagagcacacccacttgaccgtttgcgaacaaaaaaaaatcccctgtaccaatctaagagttgtgggtgtggtgatgtgtttatccagaaccagaacacgagcacctgccgtccaaatcagcgtgactcgctctcgctctagaatttcaaaaaaagtcagtgccaggcatctaacagcaatctcctcatcattgcgttgcgtccaaaagaagtgacaatggcaggtgggccccgcatggcaggccatcc

SEQ ID NO: 25228 - DNA, 1410 bp, Zea Mays
cgtttctttacccagcgaaggcactgcatctcccatcttcgtcttccacgcagcgccggcgctccatcttccgcaggcgacggcggcggtgctcaggcgcgggctcttagccgcggcggcggtgctcaggctcgggctcgtagaggcggcgtcagcgtcttcccctcccgcctctcatcagtcacctcgcgccttcgcctccggtcctccgcacaccggccggtgttctgcggggagctccaaacagtttcttggtttcagtttcttcctatcgaacccgatgcaagtgcagcgtctgagaaaagttcaaaggtcgagcagaaagatgctcttaatagcattgtgctttcggcttatcttcacttacaaagtgaaggttttctaagtacttggactaattcctttgttggtccatgggatccatctcaaggagagcataaccctgatgagaagatcaagctctggctgtttcttcctggctgccactcatcggtatctgaaatcgcccaacctgctgtaaacaagctgagagttgcttcaaatggtttatgggtagccccaggcaactcggaagaggtagcagctgcactatcacaggctttaagaaattctttagaaagatcactgaaagggctttcatatgcaaggtttggtgatgtttttacaaaatacaacccccctacaagaaatcaaaacagctttaggagagcacagcctacagtcgagtttgtctttgctgccaccgaggaagcaatatttgttcacgttgtaatatctgctaggtatgttcggaacctttgtagtgatgacatagagaaagttctcgctcattctcctccctccatcggtgaaggtcttccagttgttgttgctcctagtgggatgctgggtaggcttgtcggttgttgtccaagtgatcttgtacgacaagtttattcaagcaaatcattgacgcctaatttaccaggttttagtcaacctactgtatgccagctgagaggccaaagttactatgttgaagttgcgcttggctttccagctgcttcagccaaaaaagtttctgagtttgagcatattcatataaaaaaagaattggatccagtgaaggatgctatggtcggttctgatggacagcgtaaggtagaatcacctgatggccttccaattcttgagaggacatttatttacccacctgaagctgttttggtacctatggtccatcaagcatttgttcgcttttcgagcaaacgaatgtgtttacagggctcgctgggaagttcatcatgggaggcatggccattctggaattttgctccgtcttcttactttcagaacaggtcagtctcaaattatttgtttctttggcatgctgtatcaacaatactaccaagaattgattattcgttgtaa

SEQ ID NO: 25229 - DNA, 181 bp, Zea Mays
ccctgccgtgtgctcgcccggcagtacgctcgctctgctcggccatagtgaatccctccccggtatggaattcgctgctcggtcctgctcccttggccgtactcagctccagttccgtgttttgtctctggctgcgcgtgcgtgcttccctgttggttgtcgttgtgcaagctcctctttt

SEQ ID NO: 25230 - DNA, 1334 bp, Zea Mays
tacttgtacagcaactggattgtatggacggaggagcctgagttagattctggttctgcatgagcaataagttataaactgttcaggattccctcgtaggcttttcatgttctggtactggatgtgcagttttgggaggcattgctacagagataggacttctagctgaaattgttgcccattgatcacgctttatcctattcctaagttatttgatgaatgttcatgctgtttgtgttctcagttgtcactatcaaataggtagttatccgagggtggtctcattgactgcagatctctaggtgatagctgggcatgaaggaaccagtttgcatctattcagacctacaaccttcaacttgcattgtgtttgttcagtgtcttctaccttgaagtagttaatgattagggtcattattgcaggtcttactgctattttttgcttgggcttgtcatcgtggattatgtgttgggggggaacttggtacagccatccatggtatcagaatatgacctgggaggagaaggggacctgttcaaagctccagaagccatcatcgaggaaccgctgctcctgaactgtctgtctgattctgttcatttgttgttgtgtaggctgggcttgtgccaagcttgaatcctcttgtgaaggagtttctcaatgctgctgatgacaagcggaaggaagtcctctctaaaatagaagaggatgttgctaagctcagcggttctgcagccaaatctcgcgtctagaattgccgctagatgggggaggtgagcggctcctggtctcttcgatccaatctaagaagctacaagtgaatgccgaggagagcagcgatgacttggctaacccaccgaaggtagaggagaagcttggtgctgtccctcatggcctgtccaccgactctgaggttgcccagagggaagccgagtctatctctaggaagactctcaggagctcagccgagaagtttgagttccaagctgaggtttccagactcatggacatcatcatcaactcactctacagcaacaaggatatcttcctgagggagctcatatctaatgcctctgatgctggataagattaggttcctttcccttactgataaggaagttctgggtgaaggggacactgcaaagcttgagattcagattaagttggacaaagagaagaaaatcctctccattcgggataggggtattggtatgaccaaggaagatcttattaagaaccttggaacgattgctaaatctggcacttcaggaacaggagctgctcgagtctcttgtcgaagctgatacggaactgtataggatgttctctaacc

SEQ ID NO: 25231 - DNA, 1432 bp, Zea Mays
ccccgatgttgggcttgggctttacgtccgatggaagtaggaatctgtggaagaactcatggacaattggtgctggtgtttcaaatatgtttgcgctgccatcaacactgtttaggtgcatggcttcaagtggctctggtgatggtgattttgctcggtctacattgactgacgaagcagcaccatttccattatactcttggccagataagcagagaccacgagtgtgcattttaggtggtgggtttggtggcctgtacaccgctttaagacttgaatctcttgtgtggcccaatgataagaggcctcaggttcttctggttgatcaatctgataaatttgtatttaaacccatgttgtacgagctattgtcaggagaagtggatatctgggagatagctccatcttttacagagttgctgaaaaacactagtgttcaatttgtgagagacagtgtaaagcttctgcgcccttctgatcacttaagaagaaaacctggagaaccatgcactggtggagttgttcatctggaaagtggcactgtcattgaatatgattgccaggctcgttctagctttaggggctgaagctaaaattgatgttgttcccggttctgctgaatatgcgcttcctttcacgacattagaggatgccttgagggttgaaagcaagttgaaaatgctagagaggaaaaggtttggtaagagttcccctactattgaggtggcaattgtgggattgggctattccggtgttgaattagctgcgactatatctgagagattaaaaaacactgggactgtaaaggcaataaatgttcaaacaaccgtatgtcccactgctccacaaggaaatcgtgacgctgctctgaaggttcttgagtctcggaatattcagcttttcttgggatattttgtgagctgcatcaaagaggctcctacatctgatgagtcaagtagcacagttacatactctgaagttgacggtgatcataggaaactaattttggaccttcaacctgctgaaagaggcctcaaagggcagaccctcgatgccgatttggtgctgtggacagtgggttcaacatctcagattccacggttacagcctcctgatgctccctatgttattcctctgaatggtcgaggacaggtggagacagaggaaacccttcaagtaaaaggccatccccggacatttgcgattggcgattcagcagctctaagggatccatcaggcaaactcctcccggccactgcacaggttgccttccaacaagcagattttgctggatggaatctctgggcggcaataaatgaccggcctctcctgccgttcaggttccagaacctcggcgagatgatgacgctcggtagaaatgatgccgcggtaacagcaagtttcattgaagggctgaccttggaaggacctt

SEQ ID NO: 25232 - DNA, 2779 bp, Zea Mays
cccgcctagttcatgtgctcatgcacccgcacatcattataaataccagttttgctgtttacccgttccaacttcgcctggcccgagaggccgagatcaatactagacctcgactcgagtctcgagtcacgtttccgccgttatctgcatcaacggggtcaggcgactgaacagtacaggcccttggccgccgccgccgccgccgccgtactccaggtgcccaggtcttcgtccgaccctttgccagcgacgagcacccaccacaccaggatttcatcatggttgattctgttcatgacaatattgtgctgaacaagtgtatcaaggacatccttgcactaatcaaaccagtagaggatgatagaagcaagcggttatccacaattcaggagctggaaaattgtatccattctcttgcatctctgtcaggtgctgctgtcaaaccgtttgggtcttttgtatcagatctttactcaaaatcaggtgacttagatttgtcagttcagtttgggaatggttcaaaccacccaataaacaagaaaaagaagcagaatgccttgagagatgttaggaaagctttactaagtcgaggtgttactggatacatgcagatgcagttcatcccacatgcaagagttccagtccttcaatatgtgagcaagcaatttggcatctcctgtgatatatcaattggcaactttgctggtcgaattaagtccaaaatcttctactgggtcaatactgtagatgagcggtttggtgatatggttttgctgatcaaggaatgggcaaaagcacaaaacattaacgatccaaagagcgggaccctcaactcttattcgctttgcctacttgtcctctatcattttcaggtgttgtttcttatacctaagtatctctctatgtgttcctacttatttatggtttcactaatgctacgtttggacgtcgatattggagaggatggaattgaattgggttgaataccaaatcatacatggtattgaaatgagatgtaattccaattctattgtttggatgtcactgaattggagtttggaattgtgcggtctaattccacgcaataccgtggggcgaggctttgtattgggagagggggtttctagtcatagtccaattccagggaattgggcctctaattccaaatctcaattccacgtgcaaccaaacaacataatttaggaaagctgtttcgaattctcaattatgtgcttctatttctacatccaaacgaggtataaatgacttgcttattaacttgtatttttagacatctgagccaccaattctaccacctctgaatgagatttatgaagggaatattgcaggagatgttacagaagcagcactttttgatgagcaacatcttgatgaggtttgtgctgcaaatatagaaagatttagactccagaacaagggccgaagaaatgaaacttcaacttgtcgtctacttgggactttttttcagaagtttgctcatatcaatgccttaacagataatgtcatatctacttactcgggccagattgagcgaatccagaacaacccaagttggatgaggaaatcttaccatttatttgttgaagatcctgtagagagacctgataatgccgctagagcagttagtatgaaaggccttgacctcattgctattgcattcaatgatgcttgtcacaagtttaagtctctggaacatatcgatcggaatgaattattggcactgttgtgtacccctgttgttcgcttgaaacttggtgtgagagtcagagagaactcttacccaaaatctccaaggaataatgtgcatagcaggattagaggacagatgtggcgtgatcgaggccaagcacccagcgcgagagggtttactggaaccagatcagtccatgaaaatccactagcgaacactacagcacatgaaacagcagtgcaataccacaaccatgtgcagccgacaacagttcggcaaacagccatccgcaatcaagtaacaaatactgcagtgcatcagaccgcgccttaccagaaccatactgctcgacaggtgtatcctacttggtcccagacagctgaaccctaccagaatcataatcagcaggtatacgctactgggtttcaaacagggccataccaaagccataatcaagtccatgcttatagagcagggttgccacctggaggaatatatgagatccacaatcaacaggtgtataatgcagggttccaaaccgacggtccgcaccagaatcagcagcggcgaaagggatacccatcaaaccatcagaataacaggctttctgcgacggcagcgaggtacgagcccgttcgtggacagtttaacaacggatcgacatgggactcaaggtcccaagcaccgggcagtgcagctctgcgaaggtagccgtcagcatctcaggaggatagtagtaacaggcaaatcggctggattttgactgctgggcagctcttccttgtgtaaaaaattctagcacttctttactggtggacaactcttccttatgtaaaaattgctgttagcagtcggttcgtagtatgtgtcaattaattttttttaaggtgtgattgggtttatttatcgtgtctcagaaattcatcgcccttctccgtatgctcacgtatcatgtaaataaagtacaatagctggtccatgacacgcagaaatattcatcatgtaaaaagctgcctcacgccatatatgagcttttaagattttttaggaatcaattgttttttctct

SEQ ID NO: 25233 - DNA, 126 bp, Zea Mays
gtttcaagttactgccacccaaattgaaaattgggccaggaagaaaacgaaagaacagatttaaggcaagccatgaaccaggtgcaaggaaactggacaaatgcaaaacatgcgacgaagttggac

SEQ ID NO: 25234 - DNA, 2416 bp, Zea Mays
cactcctccaaccaagcgttctgcttccgtcctccaatgcccacagtttctgagagaaaagaaaccgacagctcgacccggatcatctctgactccctgcagaatcaatcatcggttccacactatctcttccaaaatttcgttgataacacctggcaagttttttatcgcacctaaaattctatctgtctgttgtctggcgctgctgtatcactctgaatttttggttctggcccaaatcttgttctttttccggttcttctgatcccgtctttatcctctcaaatccactaaaccactccaaagatagaatttttctgcatccgaagcccagatatttttttccttcggtttgttccggcggcaggggtgcgaaatccctcaagctggcaaccccggcgcggccatggacctccccgagagctctgtcccccgcgcagacaagggcccggcccctcgccgtctttgccccgtcgaccgcgaggagctggtgcgcgccatggcacagtcgctctactcgctcgggtacaggcgggcggcggccgcgctcgaggcggagtccggcgtgccactgtacccgccggagcatgaccgcctgctgctggaagtgatggccggtcagtgggacgcgtccgcggagatcgtccgctcggtcgccggcgtcggcgaagcggaccgcacggtcgcggagttcctggtgtggaggggctactacttggagctcctggggatgcgcggtgacgctggcctgcgccgggcgagggaggtgctacggcgtcggattgcgccgctcggcgtcgacaggaggtgcgtacacttgctggcgcgcgccatggtctccagcgagggggccgttgcgccggaggccgtggttgggtggaggattgcggtgttcttggatttggtcgaggtgttgccaccatggttccatgtggctagtgggcggttagagcatttggtggagagtgcggtaaccaagcaagtagaatcttgtatatatcacaatttgccggatgagatcactctgtttgaagatcataggtgccatgaagagcatatcccctcccaatgtgcacagatattatgtggtcataataatgaagtttggtttgtaaggttctcaaataatggaagctacctggtgtcatcttcaagtgattgcactgccataatttggaaggtggaaaatgatgatacattgaccaagaagcactgcctccagggtcacgaaaaaccaatttcctttgcttcctggagcccaaatgacagaatgctgctcacttgtggtactggtgaatcattaaaactgtggaatgttgatactggtgaatgtaaccttaaattcagaggctcagcagactgcatcatcagttcatgtgcatggtttcctaattcggagaaaatagtatgtgccagctcggagcctgcaagtgctccaaataggatcttcacttgtgatctagaaggccaaaatctggaagtatgggctggagatagaataccaaaagtcagtgatctcgctgtgacacctgatggccgacacctaatctttgtatcttgcaacgatatctggattagggaacttccaagggggcgggaatggagatttcgtgagaagcagacgatttcatctctttctctctcaggtgatgggcagtcactcattgtgaaccttaacagtcaggagattcatctgtggaaaattaatgaaagttgtactgtgcctgaaaagttcatggggcacaagcaagacaagtttgtgattaggtcttgctttggtggttcaaactcttcgttcattgctagtggcagtgaggattcacaggtctacatttggaagaggcacgtggagatgccgattaaggttctacatggccacacgatgattgtgaactgtgtaagctggaatcctgcaaggccccacatgctggcttctgctagcgacgaccgcacggttcgaatatgggtagggcgcaaaaatgcaacaaagtaaacgctgttgaagtgtgaagttttgtatgtctgtgtaaatagttgtacatctggactgcatccacaaacctgtttgggacaatgctctgttcttcacccctgatgaatatgtcgtcgtagctatttgttcagaaataaacctgcaacagccataggtagccggtgctgctgtgtccagatgtgtgcctggctaaccggtgactttgcaacctttggcatggtcaacaaatatgtataagatttgtaacagcattataattggctagaatcgtgcactagcaaactgtccagcacctcttagcacattttatgtacttgtagttttgctagacagttttggggtgatatcttttcacccttgagagaggggatgaatagatgatattgtaaattttgctcaaaacaacacaaacttggtttataa

SEQ ID NO: 25235 - DNA, 4436 bp, Zea Mays
tgcccgtgtgccaggcgaaaaacgtagcctcgcactctcgcaggcggcggcgcatcgagaaacagggctgcggctgttgcttcttccacctctccggccatccggcggtccatcgttccgtgccggcggcctcccctcctacgcccctgccgattcttcaatcttcaccaacgtctgcgcgtagcaggctagcagtcggcacggcttcctcagatctgccggacgacttgctgttcgtcaccgactcaccagcaaccaacgtcagccatcagccggcagcaggggaagctgggcggagggtcattgcggcacggcgtccaggcgtacagaaggcaccagcaacagcccatggcaaacgccgcagatgaccctatggcagatgaagccggagtagaagatgccttcacacaggagatcaatcattcgtacgtccctagataccatgtgttgagttggatggaaactgtggaggggatggtggccggtgtggcgtcgcttccgccggtgtatttgatactgaacagagagatatatgatacatgctcctgcttgctcatgatgccggtttggtgccaaagctatcttcttgagacgggatggggatggaagaggctggtgccctacagacctggttatgttgagttgcatgtgttcaagaaataccttggggactatttcgaccataatcgtgaagcttttctttgtgccgagcagaagcctgatccatttggatggattgttgctgaaaagagtgccctgattgctgcagccaaatcgtgcctcaagatggagaaggcacttctcaggtactgtgctagctttctcactcctgacgacaaaaggctgatcctccggatcaaggaccaggcaaagcaaatgatccaatcagagggtgatcaatctttgattgtaactatatgcttggagtgtattgcgaaggaggccgagttaatgtacaattatttgccttgtgattttgacaccaccgaagaagtcgccgtctgcaataaggttcggcggtctgccttgaatcttatgctctacaaaggttctgaatctgctgttgctgctggtgccatgatgggtatcacaacagaggctaagtccatttttgacttgcttagtcgagaccatgacgtggtcatggaagtttttacttgtgagagtataagggaacatacagcatcagttctgacccagcttgggaaggaatttgcttgcgagactgctactgtgaacagctcatcagcgcggcctatgggggtcagtgatgttagagatctgaactctgaagtatctggttcaatggaagactgtacgagtatggatggagcaaggttttaaagtcggctagtcgactctagtcgcctaagcaccgataaggtgactaatcgcgattagtcgtcgattagctcgattagtcgatcctagtcgactccctagtcgtcctatagtcgtccatctataacaggaccatatatatatatatatatactagattgcaaatctattgacaatattacaatgaaactgtagaatgaatgaatgatcatgttttcactaaaaggtaaagatcacttagacacttaccttggattggagtatacaacagcacactgcaagattagtaggacaacacttctggtatatctccagcagccttactagtgcaaaacgtcatatatctccaacaaagcaagcagaggagggcgtccagcaagcagaggagggcggcggcgcttacagcagcagcaagcagaggagggcggcgctcagagcagcagcaagcagaggagggcggcagcgctcagagcagcagcaagcagaggagggcggcggcgctcacagcagcagcaagcagaggagggcggcgctcagagcagcagcaagcagaggagggcggcagcgctcagagcagcagcaagcagagaagggcggcgacgctcacagcagcagcaagcagaggagggcggcgctcacagcagcagcaagcagaggagggcggcggcgctcagagcagcagcaagcaggggagggcggcggcgctcagagcagttagcagcaagcagatgaagcggtggcgctcaactccagctaggttaaagactgtaacggcattggcacagtttcaggcttttcagcccccctggtgggccggcccaaatagaaaagagcagcctggagcccaaaacaaagcacctagtcgagaacaaccctaatcggacgactaatcgccgactaatcgcgattagtcggacgactaggtttctagtcgccctaatcgcgtcggtggccctaatcggccttgcagcagcgataagtccgactaatcgcgactaatcgcgattagtcggacgactttaaaaccattccgatggagacaatggaaacaatccagttgttggagggggtggctaagaactcgaagaatttaaagttggtggagaaccacgaaaacgagaccagggttgccacgtaagagaagactgcatcagcatcactacttgcctgttttgaaatttaatgtacctttcacggaagccctcactaacattaattgtttgtatgtttcatctcagcttgatgactgaaaataactagggccttgcagggaaaccttcgttgacttctgaggtactgaaggttagtgaagaggcagatgattacgttccaaataggaagtcttgaatactgctgtgacttgtgttttgaaatagatatagtattttctggttctcttgcaaacctcattgttgcagccctaacatttcatggtgtgtttgatttgtggggtgggggtggatgggagacggtcaacccattttttaaagttgttcagttagatgggatgcccaaccagtggggatattcccccgagatcttggatgggatgtccatgcaaatctggtggacagagtagtccatggccttgttgaatacttattgcgcgactggttgtggtcacctaatgtgccttttctttttgctccaattgttcccaatctcatccctcattaacctgtttctgactgggatgcgcacagcaattgggaaccagcaggccctctgtccagacgctggtgctttgtgctccgttgttgtgctgctgctccactggcgtttactagttctagtgccttttcactgatttgtccgcacagggatcctggtgctagtgcttggctgattgctgctgcccctgtgttctccctcaattcgtactgctcatgcaattcctggaggccctaggaattggttctgcagttgtacctgtaggctgtagctgccaatttagttcgattttgaatttggcaggtagttgttgtgcttgtttctagatgcaagagtgcttattgtttgtggtgtttgttattggaaattttggttggtggtagttatttgtccggaaaggttaatgcaatgctgtggcttgtcttgcttttagtcaatggtagtaagttgagtaaaatgttcatgtgtatgtgcagcttgtggtcggcagtgtgaaattttgacctctaattatttgttagtaatgtaattttctcagcaggaatccaattcatgatgatgagctacattattcaagtttagcaactattgattgtgtttcccatcatgccttggatgtgtcaaaacttgaacacaccaatttgaagattatcataccctgcttatctatccacatacaaccaaccaaacaaaaatctgctggatcatcccatttgaaaacttgcaaccaaccaaacaagaatttggctcatgcaatccgtccaacctaatgagctaatacatgtaggagcatcattctatgattctatcctaaatccatggatggccctatcccatccaaccttgcctctccaacccatacggccatacaaacttgtgaccattcattgtaattctcatttcattgtcataagtgcgcctcgtttgacactgttgtttctctcgtcatcattggctttgtgtcggacacgttcatgataatttatctgcagcaacggtcaaatttatgaagctacaaggtgcaagttatgagctgctgtaactaaaaggatctctggtttcttttgagcagctgtctgttgtgtcaagttatgtgctacttgtaacactaaagtaccattttaccttatgacatgcagtgcttggttgttctgtcgtagttaaagaccgtgttgcaataagtgctagttctgtatgtttcctgggtttatgttatcaaatggttgcctggtttgcccactaatgtcatgttgctataagtattcctagctgttgagaaatgcgtgcgcgcgtgccgatcgttgtatcattgggtgcaacatcataggtcattgtagccaagggctatgaagaggggagtttcagatagtccaaaaacaccagggtacatagcaaatacgaaggttcttaggaaggaacagaag

SEQ ID NO: 25236 - DNA, 195 bp, Zea Mays
gtaaatttgttgactaatactattatttagtcaaagacgcatatccttttcttgttttgtcgataatggttacatttacattacttcctttgtctacagactaatcgtcgcaatactaagtgtttgttttctcatgtcgaattgattagcgctttccctttacagatttattagtggttaaagtatgttctttcg

SEQ ID NO: 25237 - DNA, 2427 bp, Zea Mays
caaagttggaaagtaggccatgtttacttgacaggaaaatcctgcagggttgcccctccacacttggggcaaataagagaaatgcagacttttttgaaagagttccagcaagagataagcaagtcagagatcttttcaatgagagggtaataagccagattgagaaagatgtggggtgtaaaatcagaatggatgagaagttcctgtttgtcagtggaaaggatagattaatattatccaaaggtgtttctgctgtgcataaaattattcaagagggtaagggtaaacatagtccaagcagtccgaaacacgatcgctctaggtcgcctgtacgaaacactactgagtttcgttccaaacactctgattctcatcgctcacctagcccaagaaattttgattctcaatggtcccatagtccaagaaatgcatcactctctcaaagtaaaggatactataatgaaagacatcgagatggtcgcttacacaacaatatgcccaagttttcgaaaggatctccacaaggtagggcgctcaggcacactggtataatcatctattgtatgagcattaggaggcagaagaaaatgacaatttgagctaaaagaaaatatctctggtcccttttctgttggttattgctgtgctagagtattacttgtttggtccttttgcagctcaaggtaagttcaagctttatgtgacgaagcgtttctccttgatcattgctcaaacaagactgtctcgaatatgtgcccgaatatgaagtgtttccgccttttaattggtcagaaaggatgttttgaacacatcatgctgtataagttggatggcctgcaatttttgtattgcatctggcattaatcctcctttcactatgcaataaaatctacttaggtctgaaacaattttagctatctggaactaaaatgcaatatgttgcatcttcttccttttgctgaagctcatgccaactttggagcaaaaggccgtccagcccaatcaaaatctccacgccatacctcttatcttgatgaattacctagaacacatggcgagaataaccaatttgctgcatcacgagtgcccaatgattggggaattgagaggcatggagcagatgccagttcaagtcttaggtttgacatgccatcccaccaacagaccttggaagaacttgagatggagtttaaaaaagaagctacacaattagctagagctcgtgaccaagaggaggatgaagagaactataggcatcgagagtcgctgagagtgattagagaaaattacatggagagagtgattaccttgaggaatgtgcatgcaaagaagtgggaagaatttcttgacacctttaaaagtcaacaacaagcacagccttcatacatacaaaccggatatctaggttttgagcagagaacggcacatatttcagctacacatcaaccaatggattcgaagagcacatatccgtatgcttctgatagctattcagccccaaaggctcatgcagcatatggtgagtttcaacatgagaggcatgatgatcttgggagggcctataggcgatattagctgtgaatagtggtgagttattgagttaattacccatttcagatttttgatgttaagccctgcagttctaatgtagctagagataatcatttcgttgtttgagcaattggtgtcctgctaggtaagctaattaaagagctgtgactgttaatagctacaggcttgggaagcctccgtcttattagaaaatgttgaccaaatgttcccttcctcttttgagtcctaaaagaggttccaaattttcagggcgattttgtgaggaatcagtgtcaatggtgcgcttagacctacttatcacccattgctgttatgtagcttgaggaggtaagcattcatatataggcagaactgtctcccaattactttctttgcagcgtctacaaccgcaacggactgtggagctgtttcaggcatcgtaacaagctgctttccaacgaactaaactgaaatgctataaaaaaacattgacctgtatgactgttttatctgcttggaaaaaatctccctgagttggcgtttatgtgaacctagtattttttttgtcaaacctggtatatcgctatgctgggtctatccgaatggttgtttgcatcatcccattgttttggaaggtttggcacacgatatgaaagttagaacatgtggaacagtcagctatttcgtgaaatttggtcagaacttgatggcactcgttgctgtagtggtgactaggccagtgccttcggattggtactgttttgtgtcaatctcaacaggcactgcactgtcccatatacattggaatgtttgattggtggatggaggttgtattgtaaatcctggctgagtgaaaatcgaattttagaagaaaaa

SEQ ID NO: 25238 - DNA, 1083 bp, Zea Mays
atggggagtgaggaattggaaactgctttgatggagatggtcgagcatgacaacagacgtatgttgagtgcaaaggttgagaagcttgaaacagaggcatatgaactgcgcaaagctttttcagacaagcaagagcaagagcaaatcttgttaagaatggagcaagaacagaaagtggcagaagatgcccgcatagccgctgagcgagatgctgctgaacaaaaacacgctgctcacttgctccaggagaagtatgaagcagcaatgacagcactttcacaaatggagaagagagctgtaatggcagaaacaatgctggaagctacaaagcaataccagttcacctcgtgcagaccatgttcctgcgaagataaatcaagaaccaaaccaaactgcacctatcaggagaatcggcctgctttctaggggacttggatggcttgacaagggcaagggaaggcagaattccaatgaaacatctggagcctaaactcatctaaagtccaggatgaagtcatagctcccaacaagatctggattgttcattaacgcttggattgcttgatcaccgtaagagtgttgaaatcagcatcgatacatgttttctcgggaagattcagctggtatattccatgaagttttgcaggaagtgtatcttgtatcatattgagttcaattgtcagataaagttttgttggtaggtcagaaaggcttctgcaagtcatcggtgtaaattttcttttattagttccattaagattgtcaatagttagtgttccaaataggagaaagaaaagaacgacttactacacacaagaaaaatttctgttagattagttacagtatcatggagttgttctggagaagagcatgttttttttatctcttcagaaatgtcaaaaccaccgaagagattctctctctgtatttttgtctgatacgtgtggctcatacattcttcagtcacagttgacatgtttgatgtaaggcaattattgtcacgaggattctgattacgaatacaacagcagaaactccactatagggaggcgttttggaaagttaattgttgtcagttcctca

SEQ ID NO: 25239 - DNA, 123 bp, Zea Mays
agcctcttgccaatggaacaatgtaggcaagggaagtcggcaaaacggatccgtaacttcgggaaaaggattggctctgagggttgtgctcgggggtcccggcccccaacccgtcggctgctg

SEQ ID NO: 25240 - DNA, 2222 bp, Zea Mays
aggtatattcttgtcatgtgctttagttgtagtgtttctgttctccacctctccttgtaagagtttgcattacatggcattcattcttatatatacctatatggttatatttagaacgcgaagaagaagtggaagtccctgaagagaagacaacaccacctttggagtctcaggcagggtctcgtctctactttagcatctgcgggcctgagactaactcatctataaacaaagatgaatcaacaagaagcccctaccggagttggagagtttctacgagattttggtgttccagtggtcctgtggcgactacttcaagaagtcggatatatcgaaacacccaagtaccagtggtcgcgcactgttcttagaggacaaccatggtatgaggtggtagtgcgtattccagaacgtgctagaaagccatcttggccacattggatgttccatgctgaaggaatgactccttgggaaggtgctcaagtagctgccttagaggcgctaacaaccatttgttaccagaaatgggaagaaatacaagccacatctatgaggttgttccctgcagttgccttaagtgacccatttgtgtatcatcaccaggcccgattaatggaaagcattcctattgggcaggattctgttgaatcggcatctgctcgagttttgatggccgtgctagagttgcaacttactcgagggcacagtcgtcaaaagtggcagcagttgtacactggaagttatgcagcatttaagatgatggaaatggccaagaatagggcttgtacccaggcacaagaacgacttgaggaaacaaaggttcaagcagaacaggttattggactaaagcatcaggtgacagaacttcagacgcaacaccaagctgatcagaatcgcattaaggcgcttgagcatcagctagctaatgctcattctaaatcaaaagttctgagtcagcaacaagaagaaattcgcttggatgctattgctgttagcgaagaccttaaggaaaccctaagcttcataagccatcaggatcaggcgatctaggaattgaatcgtgctcatccaatggaatttcaagtagcacaacggcttgtcaaccatctgctgcaaacagtgcataggctcaatgttgccttttatcctactcctgcatcagcggactaagggttacttggaagaatggcaacaagcatctggcagatggtgtagccagagaagatatagtaggcaactgggagcgtagtgaagtagatcaaggtagtaaggtaggtgtaagatagaccagcttggtaataaaaacaggttaaactttattggaaagagtttttcctgtttcccctgggtcatgtaacatatgagcttttctatgactatggtgtaagaaacgactgccggtttcagaggcagcttttaatatctatagtagtttgtcaaaattccaagagttaaaatggctattcctttggatattccctgtggatgcacgtgtgtggataaataacttgccacacgctggtgccataatttctggttgtgtttcgtgatgaaatggtaccaccgtgatttcccatatgcatctgttgaacgagaaatggacgaatggctaggcgtatccaaaacaaattagatgcaatatcttgggtaaaacacacagaaagagatttatcttcaagtcattattggaagtttgtagcatcggaaacgagtgcgaatgttgatcgacatcgtggttaactcgtgattaagcgaaacagaacacctcccctgccttgtaagtgaaattaggaaataagtcagtgacgcgtttccttctctattactgagcctggacttttaaatctcgggacgagatttcttttaggggggaaggctgtaacacccctggtgttacgtaaactaaaactctgacatgtcatcacaagcatctgcattaatgtgtttgttacacctagaatgcatttactaggttaaaactttacaacaagtgtgatgttgtgtgttgagtagtggacttagttaagggcctggtttaagcaaaatgagggaagatcatctcttgagcaagtaatatgatgacttggagtcttaagtattaaaggaaagctttaagaacctggaattatttgttttgaagtgttagtctagtggaagtaacacttgagaagattggatcttgagctagagagtaactttgctctaggtggagggatcaaagg

SEQ ID NO: 25241 - DNA, 3234 bp, Zea Mays
cagccagcgagcgccccctccggctccggccctcctcttcctcttcccccaattcccattcccaattcgccctcctcaaatccggcgccgcattcccgacattccgcagatctgggatccgccgccgacggatcccctgccgcccgcaacgacccgggacgcgcgtgatcccgccgcctagccgccaagcggactaccgtggtgggatgcctgggtttgggggcgctggcgccggaagcatgctgtcgagcctgctcatgcagggctatgggccagaatcaattgaagaaaagcagaggctttatacgcttctgagaggtctaaattttagcggagagtctgtacccacatcaatctctgagccttacacaccaacagctcagagctttggtggtgggaaccctgtagaggggttttattcgcctgaacttagaggggatcttggtgctggacttctagaccttcatgctatggatgatactgggcttctgtctgaggatgtagcatcggaaccatttgagccatcaccttttatgccgaaggatattgatgatgatgatgaggatgtgatagcagggagtcagcaagcctcagtagataattatggtgtggtgaccagtgaaaaagagaccactgctagagaaaataatgtagcaaagattaaagtagtggtaaggaaaagacctttgaacagaaaggagctatctcgaaaggaagaagacatcataactgtggaggattcatcatttttgacagtttatgagcctaagctgaaggtggatctgacagcctatgtggagaagcatgaattttgttttgatgctgttttggacgaacatgtttccaatgatgaggtttaccgtgaaacagttgagcccataattccaattatatttcagagaacgaaagcaacatgttttgcttatggccaaacaggtagtggcaagacgtacacaatgcaacctttgcctctgagagctgcacaagacatggcaactactgatgagggaagatggcaagaaacaagtttgcattgttggtctacaggaatttgaggtgtctgatgtacagatcgtaaaggaatatattgaaagaggaaatgcagctagaagcacagggtcaacaggggccaatgaggaatcatcaaggtcacatgctattctacaactggctgtgaagaagcatatcattgtaaaagataccaggagacagagagatcgtgatgctaatgaagctaaaaatacaaaggctgtggggaaaatatcatttattgaccttgctggaagtgagcgtggtgctgatactaccgataatgatagacaaacaaggattgagggagcagagataaataaaagtctgttagctctcaaggaatgcattcgagcacttgataatgatcagatacacattcctttcagaggaagcaagcttactgaggtccttcgtgactcatttgttggtaactctaggacagtgatgatttcttgcatttctccaaacgcaggttcatgtgaacacacactaaatacattgagatacgctgatagggtcaaaagtctttccaagggcggaaatacaagaaaagagcagtccacaggaccaactaccacttctagccgggattctttgtcagctttatcatattcattgcctgctgaagctgaagaaattcctaatcaagttcaagagaagagaccagtcgatacttataggaagggcactgaaaattttatctccaacccttctgtggagtctgaccgaaattcctttagtacgattccaaattattccaatagagggagagaagaaaatggtgcagcatctggtaatgacagggagagctatgatttgaagtccagccaacctgcttacactagtaagccacagttggttcagaattcagcaaacacacaggaggaggagaaagtcacaaaagtctcacctcctcggagaaaggcttatagagaagacaaatctgataggcagagcaactatatgaaaaaggataatggtcctgagacaagtcgggttgggtataagatgcagcaggcaaagcagctgcaacagcaacaaagaccagcatctgcttcagcctcatcaaggcaatctgaaaaggaaagttcttgtgatgatgtagaaattgatgcaattcttgaggaagaggaggccctcattgcagttcacaggaaggagatcgagaatactatggagattgtgcgggaagagatgaaccttttggcagaggttgatcaaccaggcagcctgattgacaactacgtgacacaactgagctttctgctgtcacgcaaggctgcaggtttggtaagcctccaatcacacttggcacggtttcagcaccgcctcaaagagcaagagatccttagccgcaagaaaccttccagatagtatgctcaacaatggctctggattttgcctggaaatcttattgcttggagctcaatcgcagtctattagttggttttctcctgtgcgctccagtaaatgttagacccaagcaaagcagtgatagagaggacacatgggagttgcttgagggtgtggtgatcttgatgttgaggatggtgtggtcctggttgatgtctccactttgtgtttgtcagggttgacaaccagtttggtagtagtcctttttacagtggggctgcttgggtgtttttttttggcagatgtcatgtatggcttgcccactttgcctttttttttcttttccccattttgtacgagaaactggaatgtctggaatgttgtttgcagacaccggtgggtcgatattcaccgagggggtctgtggaaaccgatacattgttgtatactagtcggttgaccgtgcgttacaacggcttacaacaatatccacgtaaactattcataaaaaatttttaagattttttattgattgtctccgcgctctctgtataatatattttttgatttggctaactgatgttattgtttactccatgcaaatatatcttggtacaacacggccaataaagtgagcgattagaagagagttcacaatgattgactgaatgaacagagattataaaatgacataattccatcataaggagaccaaataagagagtttgtgagatcaagtttctaaaaaagtcccatgaagtcaaacttataaaaaagatagattaaaatatggagtgattgctaaagtcaggcatcaataaaaactggatgcgctccatataaattatg

SEQ ID NO: 25242 - DNA, 2427 bp, Zea Mays
ttctaccactgtctcctctccgtgacgcacgcccgagatcctctccgcgacacacgcctccctctcctctgccccaccctcctccccacgccatcggcgccgccatcatcggatccggcccaagatgcctccgccccacgcgcccgagtcgtcgaggcacactccttcccgcctccgtcgtccacgcatatctccgcctcacctcggcgcccgagtcgtcgcacgcgttcgcggtggtgtccatcccggcaccggcctcacgcaccgtctacagctcccaactctgctcctctcagttctccctccgcatttcgccttctctcccttcctctccaagcagcgtcctcctcgcctagatccgtacaagcggcaaataacctctccggcggcgagacagatggagtcgacctccggcgaggatgctccgaagcacaacccgattccgtccgcgctcgtctccaacctacagtccgtgctcaccgcccgccgcttgtccgcagccgaggtcagcaccgccgccacagctagcgaggttgaggccttggcttaggaagcagaggcgttcgctgcccccacgggagatgggacgctggcgaggcccatcgtgctactgacctatgccggggggatccggtcggcgggtctcgcggcgctcgtcgacgccctcgttgccgccgaccgctgcgacgtccacgtgtgtgcccccgaatcgtacgtgctgcgacttagaaaaccaaaccacagcgggaccagtgctcggatagggtccgacgacgatgcaagcaaggagtggcgcgcggccgacggggcgcagatcggctcctgcacgtgcagcgcagccgcgtgacagtgaagcagggaggccgcgataggtggcgcagggagggtgcgacggaggcaaagtgcaagcacctggggacttcaggtaagtagaaaaccaacactgaatttgtcggttctctgttttgtgattgaccgattggtttgttgatctcagaaaattgtttcaccgttaagcaccaatttttgggtaggtcagtgttttgggatgattctcctatgcatcaatagtaaccttgtgcttggcaaagttatttgccctgataatgttgtaggtttagtgaaaagaaatatactgacatatccacctatccatcgatgcccaatggagattgacctctatcaagatttagttatgtgtctcagtagggcaatatttctgtgagttgtatactgtggattcctcatctgcatcatgaattgatcgcactatttatgccctatttttcaaaccatggtttctgtaattctttgcaccatggtatttttctcaaatgattttatctttcacaacccggactgaactcactgaagcagaaagaaagagtacaagtctactactgcagaaagcaaggagaatgccaatagaagcagatttcatgtatggatcgggcgcccaacaatgaatgatgtggtgaaggaacttgagatcatcagatagaatgaaggggcacaattgttaaactcagcgtctttatcagttgaacaatttggaaacaaaaagagaagagatccttatgcatttgtctatggatgatggaagcaacaacaacacttttgactacaacagtgggagttcaattaagttgttcacccaaataaaatcttgagcaaaatgggagaaggtttgggttttctgcaatctgtcgtctcctcttctgctgggtatctccattattattctaatgaagagggctacgagttggattttcgtaggtacatttgagcgtgttttggaatgctgggatcgtgaaacacgtgaatatgttgccataaaagttgtacacagtatccacaagtactgtgatgctgcaatgattgagatagatgtgctcaatcgccttgtagaaaatgaaaaatatagatttctgctacacttggggaatcaaagaaaagtgaaagtgccatgtcaaagttgatgaccagaagcttgctattggaaccctctctattgaaaaatacccctagatagaaattgatttggttttcaataaagagtgtgagctgtcacacacatcgaaaactacacgtgtatttttctttggttacaaggttgagcaaccaatcgaggaagatgaataatggatcttgattctgaagatgaagagaaggagctaaacattccagtaatcaaggaaaatggcaaaggtgatgggaaggaggaccagagaagtgaagagaaggcagttgctgcagcttcaaaatcaagtcttgggcttgaaaaaaagcaaggatgagtatgagtctgatgattctaatgagggagaaggtgaaaccggagaatgagcagatgcggctgttcatggacaacagcatcaagaaacctgcaacatgcaacctgattttaagaaatttgccacctgcaac

SEQ ID NO: 25243 - DNA, 1720 bp, Zea Mays
tcaccctcccaccacatccacaaaaaatcaccctccccacctcgatcctcttccgcgagacggcaaaccgatcggtggaacggaacctccctcagtctcaaggcgagcgagcaagcgcggctcacgtccacagggccagcgacagtaggctgtaggccccgcccgctccagatccataggcagccgcgcgcgatcgcggcgtggtggataaaagcgtgcgcgctgcgccgctgccacgaggtaagagaggcgggacgagcgtcagtgcagtgcgcgtgtggtcgggtagcgatccgaggagcgcgcagcgatggcagcggcggccgtggtgcccgggaggctggaggagcagccggacgagcagctgggcggaagccagctcgacatcggagggctcgccttccagggcgacgtgggcgggggcttcaccggcggcggagcgggctccggggcctccggcggtggcggcggcaacaagatgctggaccggggcatcaacacggccatcgtgctcggggccagcacctacgctctcaccaagctgctcaccgtcgaccaggactactggcatgggtggacgatcttcgagatcctgcgctatatgccggagcacaactggtccgcatacgaggaggccctcaaagccaacccggttctagccaagatgatgatcagcggtgtcgtctactcccttggtgactggattgcacagtgctacgaaggcaagccgatatttgatttcgaccgtgctaggatgttccggtctggccttgttgggttcacgcttcatgggtcactttcacattactactaccatatatgcgaggcactgttcccattcaaggattggtgggttgtccctgcaaaggttgcattcgatcagaccatctggtctgcgatctggaacagtatctactttgtggtcttgggtttccttcggttggaatcacctaccactatctacaacgagctcaagtccacattctggcccatgcttactgctggatggaagttgtggccttttgcgcacttagttacatatggtgtggttcctgttgagcaaagacttctatgggtcgactgtgtggagcttgtctgggtcacaatactgtcgacttattcaaacgaaaagtcagaggcaaggaattctgatagtacctccacaccagcggcttcaaaggacaactccacatagcaaccccaaagatcttggaaagttgcttcgcccttccctcacttcaggggttatgtaaattgtacagttagctgcagcaactatgcagtgaactgcacttgttttgggacgtaaggtactctgcaacttgaattatcctatggaaccagagttggtcggtgtactcctagcaaactagtttccataaatctgtcatattggaagagttgatacaatttcattactctgctaagagttctaccaagaaagcatgtacagatgtgtttaatgtagaggtttttaatgtgcttaagggttgatttggtgacaagtggatcacgggaggattgaaggggaaataaactaatttctctctcaatcccctccaatcctcccgaaatcccgaatcaccaaatcagctctaaaggggatatttattaaaaaaaatcgttggacctgtctctctgtgaagagacatattaacaatagacgtctatcttttactgtaggaatctgttatctattctatcgatatgatattgtaca

SEQ ID NO: 25244 - DNA, 902 bp, Zea Mays
gtcaaagactctgatttggtcccaggaaaatatgaaggtgtcaagtgggttgaagctttgggaaggttcattagacttggtgaaggccctgaattctgatatcaaagaatataaattgcgtgtagaaggcaaacacgtattagagcttggatgtggacatggactccgtggcatttttgcaggtctcaagatgaaaagcgtcatgagaaaggcaaagctgagtttaagaaggttgtagaatcactgggacatgtaatactcgggtggcgtctggttccgactgacaactcagacttgggtgaatctgcactcgagactgagccagtcattgagcaggttttcgttaccaagagctcaagatcagaggctgagtttgagcaacagggcggcggtgggcatgctgctcggcggcgaggacatgcacaggttcccggtgcgctccccgcggatggaccgcggcgacctcatctgcagtcccgccgcgcggcagatcgtgtccaactacttcagcatgttcgggccggtgcaggacgtgcgcatcccgtaccagcagaagcacatgttcggcttcgtcaccttcgtgtacgccgagacggtgaaggtcatcccaagcaagggcaacccgcacttcgtgtgctacgcgcgcgtgctcgtcaagccctacaaggagaagggcaagatccccggcaggttcaggaagctgcagcacgcgcaccatggcggagccgagttcggcgattgcgcgtcgcccaccagattgctggatttcagggacccctacgccctcctgcttctttcaggtgcccaggttttctcctgggcatgaagccattgggctatgatgtgtgaggtgcatagagcaaaaaaaggggaaggggggccctccattcctctaatctggg

SEQ ID NO: 25245 - DNA, 1770 bp, Zea Mays
atccggggccactaaacgcagatttcctcggttccttgtacgttcagggccggacgacggggacagacagcggtgtcgcggggccacctgcttcccaacgccgaccgcacctgctgccctgtcgtccgccctccttcccttctcctcccctccaactgtttcctcaacctcccgacccaaccacggccgtgcccgccaaggcgccaaccgcacagttttcaactgagaaaagaagtattctacctgttggagacatcagtcagacaatatctgatgataaagcggatattgcagtgctagaagagccagaacatcttacttggtaccaccatgggcggaggtggaaaagcaagttccaaaaagttataggtgttgttcacacaaactatttggaatacgtgaaaagagagaaaaatggatacattagtgcgtttatcttaaaacacattaattcttgggttacagacatctattgtcataaggttataagattgtctgcagcaactcaggatgttccaaggtctgtgatttgtaatgttcatggagttaaccccaaatttattgagattggcaaattgaaacatcagcagctatgccaaagagagcaagcattcttcaagggtgcatattatatcggaaagatggtatggagtaaaggttacacagagcttcttcagcttcttcataagcaccaaatggaattgtctggccttaaaatggagttgtatggcagtggggaagatgctgatgaagtaaaggcatcagctgagcgactgagcttagatattagagtctatccaggccgtgatcatggagattcaatatttcacgactacaaggtcttcataaacccaagtacaactgatgtggtatgcacaacaactgcagaagctttggcaatggggaagattgtgatctgtgcaaaccatccttcaaatgtttttttcaaaagatttcctaattgtcacatgtacaatactgatgaagagtttgtgagactaacaatgaaagctttggcagaagaacctatcccactgtcagatgatttgcggcatgaactttcctgggaggcagcaacagaaagatttattagggttgctgatattgcaccaactgtgcctgtgggacaaccaccaccctcctcacagcatttcatgcgcatctccccagatgaactgcagaagaacatggaagaggcatcggcatttttccataatacaatctctgggtttgaagctgtgcgttgtgtgttcggtgcaataccaaacacactgcagccggatgaacagcaatgcaaggaacttgggtggaatttgcagggatagcattagcttttcttgcgatgctgttgccatggaccatagaatgaaccagtctaactcaacggcaaaaagatgtgtcgctcggagaggttctcagattgatcaaacatacattctatgtggtgttctggtgtggcggcactgcattttttcttcatatatcaaaggcgttctgaagttcctggatgcatcgtatcttctgattgttaatcttaagcagtctgaagtgcacactagtattacagtctcatatatgtggactgtttttcatcgtgttgtttcccaggattgacgcgtgtgttgaaaatcttattgtataataatatgccccttgttttcgcagccatccatgctgaaacttttactacaccgcctaaaatctgtgtgctagttgatactacctgtgttctcgataaataaaaaagaacagaaaaagtaaaaaaaaaaa

SEQ ID NO: 25246 - DNA, 2279 bp, Zea Mays
cccctcccaaattccttgttaggagcacgattcttctctagatccgataaaatcgtagatcccctccccgaaaatgttcgtttatatgcttctatccagccgtgcgcaataactgtcgattgtggtggatccagcggccatggtgaagaagcccaacggtgtcgccaaggccacggcgacctctgctgacgcggcagcccagccatccaaggagaatccgtccacccctgggttggtcaaggcctcgaagtttaagaagagaaaggtcaaggccaaccgtgcgaagcaggcagtcgctgcagcagctattgacgaggtcgcccctgtaggtgcaggcactggtgatggcgatgcatctgcatcagcggctttaccgcaaccatccgatgttgccgaggcattacttgtggtgcaaacgccaaagtcaaccacttttgctgaggcatcacctgtggcacagacgcagaagccagccactgatgctgaaggattggtgcctgcaccaataccaaccactgctgtagcatcagcttcgtcgccaaagccaaaaccagctcaagctaatgctgatgctgcagctgcaatttctgccagcaagggcaatggtgtgggtgctgataatagtaggggtgatggtgagatgaagaacaagaaagagagggccatgagtgacaaggggaaggaggttatggaggaaggaggaagtaagggaaagggtaagggtaaggggaagaaggctgtggtcaagaaggaagaaaggggtgaccgtaaggttgcagggtttatattcatgtgcaatgcaaagactaagaaggagtgctaccagagtcgcttgtttgggatgcctagtgggaagattgaaatggtcaagaagattaggccaggggtcaagctgttcctgtatgattttgacttgaagcttctgtatggcgtgtacaaggcagcatcacatggtgggctgaaccttgtccatgaagcatttaatgggaagttccctgcacaggttaagtttaagattgataaagattgccgtcctctccctgagagtagtctcaagcaagccatcaaggaaaattacaatgcaaagagcaaatttgatccagagctcaccacaaaacaagtccaaaggttacttttgctgtttaagcctgttagtgcacctcaatctgtttcaaataatcaccttggagaaaggcgccactatgaaaaacgaaggaagccacgccattttgaagaaaggcggcctattgaagcagcgcgtcggccacgatttgatgaggaaaggcgccctgcggttagacatgttccttttgaggatccatacagggcaccacgctatgctccagttcctgttgactctcagcatggccattctttggctagtgatcaccacagatattatcaaccagcacttacacctgagcctcggcagcttcctcttgttctagagcctcgatatgttccgccggccctagatcatcatcatgtgccagagcttcgacatgccccacctgcatattatcgcactttggctccatctggtgattcatactatcggtctgttgagaatctggtgcctgagcgatatgcagacagaaccatggctgacttgaccactagagatccaattattagggatcacacagcactaccaggggaggcacttgctcgagcagaccgcttggatgatctctaccgttctgatcgtgtggaggaactctaccgttctgatcgacttgttaaccgtgctgtggaccgccctcatccagcctattttacagctgcttatgagaccaaccctgcttatgctgaaacgagcattaggcctgtctctgcaagggtcaatggacccagtgcggcagtttcgtcactctattccttcagtggtggcccagtatatcggtaatgaatgatcatggctctgttgaaagccttagccagactaagaagacagggtattcgtctctttaactgcaactgttgtttgccttagcttctattcggtattttcttaaatatccttccctggatgaatgacattcgttatcaagacttgatggtctaaactgtcgaaattatgtactgtacttggcgtgctttgaagctcacttcgttctgtgaatggatcgatgcacgtattggtagcatttgcttgttctgcccttcagattggttgctacttgctaaactgagtagggctacctcatgcagtggtcatttcttaggatctgtgtatatgcttatcctaatatacaggacgttagggttgatatctgacg

SEQ ID NO: 25247 - DNA, 1824 bp, Zea Mays
attctaaggagattcccagcatgtaacgctaaaaagaactacacaaattgatgctaagggcagttctatttcgaagccagtagctacgaaagagaggtttaggccaatgccattttgtttgccagtattatttccaacggcccatgctttggctttgcgaatgatacttcaacttggggtgaagccttcttggtttgaatgcaatagtagtgataaattaactggggacagctttaaggtagcaccaacatttggagatcttcgtagttacatgattgagacaacactccctcctattggtgacgccgttgtggctgaattgctccttaaagtgttggaaccatacagaaaggagggttgcattcttgatgatggaagagccagcctatattcagctatagtgaacaagggagcttgtgcaagatttgcatttgctgctgcgatttttggtgatttccaagaagcacttttctggctacagctgcctcaagctcttcgccacttcctgggtaaatccacaagtagatcaagagagaagatctcacaatcaagtttacatcctgattctgaacaaagctccagatttaatcggatagcttcaagagagagatctgcttctgaaaaaagttcaatctttgtgcagaattatgggcaattaagctcaatggcatttaatcaagagcaactatggttcaatgcaagtgaaaggataccttggcatgacaagctcgatggtgaagatgctttgcaaaagcatgttcatgagcttgtctctctcgggaacttagaggctgcggtttcattgttactttcaacgccacctgaaggatcaaatttttacccaaatgcattaagagcagttgtgctgtcatctgcagtctcacaatccttgcatgaacttgcagtgaaggttgttgcagccaatatggttagaacggacaaatcgctatctggcacacatcttctatgtgctgttggaagatatcaggaagcatgttcacagcttcaagatgctgggtgttggaatgatgcagctactttggccgcaagccatttgcatggatctgactacgcaagggtgctgcagaggtgggccgattatgttcttcgtggtgagcacaatatgtggagagctcttatcctatacgttgctgctggagcactgccagaggctttggatacacttcgcaagagccagcgcccagataccgcagccatgttcttgctagcttgccacgagacctactcacaagccttatcagaatcagagcccgaggacgacacttccgtgttagcactgacgccgacgccggagcagacggagaagctccggttcccttccaagaatgtggccgacgaggacctgatcgcagtcagtgaggtcttcgggcagtaccagcagaagctggttcatctctgcatggacgccgaaccgacgtctgactgaatcgcacgccttgtcgcatggcagactgatgcgggcgtggattctccgtttttgaagcttattattatcaacaggttgcaaattccttccaagtttctgcgaagctttttgttctgtctgttggtaggtaccagacgtccagacatgacatcgggactgctgatgtggcagaatctgatggcaggaggcaggaacagacatgcagtgctgtatcgtaggtgccaatggttggcactgtttatacatacgccctggagacatcgctgtcactggatccatcgtcattgccgatccgtgcagacattgttttggaggtccgaaagctacgttcttgtcgcattcaagccctccatgattatggatgatggataatgata

SEQ ID NO: 25248 - DNA, 4335 bp, Zea Mays
ggaactgataactcgaaggggacgattgagaaatttgtccgctcaccatctcggtcggcgacagcgggaaaccactgggcctcctgcacctgcagccagcagccccgccgcgacacgctcccccgagatctccagcgcccgacttggcagatccagcaagctgcacccaccgcaggcgtgatctcctctcttggatcccgaagatggcggcgggaacggaggcctttgaggcatacttccgccgcgcggatttggaccaggacggccgcatcagcggccaggaagctgtcgccttcttccagggcgccaacctgccgcagccagtcctcgcccaggtatggatgcacgccgatcagaacaagactggtttcctcggccgcccggaattcttcaacgcgctgcgcctggtcaccgtagcgcagagcgggcgtcagctcacgcccgacatagtgcagtcggcactgtatggtcccgccgcggctcgaattccagctcccaagatagccgcgggggcggctcgttcacagatgggtgctgcgggggcgcctaggcctcaggggagcgctgcgatgacgcccgggcaggttggagcagctcagatgaatccggctggcacaccaaggccccagggaagcggtatgatgccgacatctacccaagttagtatgctgcaggtgaaccctggtgctgctccaaggccccaagggatcagttctatgatgccagctgcgagtcagggtggtgctctacaagcaactcaatttgctgcaccaagggcaatgcagccacagcctcctaacctgggaattactcaacagcaaccttctagtaccggtttcatgcggccaccacaggttggaactccagcagcttcatttcaagctcaagcgcctggaatcaatcaaggtttggtccatggaggcagcatggaaggatctatcagttggcaaggcggtaatgctgcctcagttggaggcatcccacgagctataccaggagctgctccttctcagacaacacgtggatttggtccaggtttacctagcacaatgggcatggtgcctggacaacaggtacaagcaatgtcttcatcgccattgcctccacagagcaacagtgctgttttgcctcagaattcaaaagctttggtactgtctggaaatggccctgccagcagctctggatcaagcacagacatcttctctgcacttacacagccaaagccaagcttatctgcacctcagacaagctcgattccgagttcatccagttttatggccacgcctactggctcccagaacctgactaatctcactcagtttggttctttgcaaggtagcagccaacctcaacagactcagcctatcgtaaagtccattcctgctccagctacacctgttgtctctgctgggatttctaattcagcttctcaatggcccaaaattactcaaccggacatccagaagtacatgaaagtctttggggatgttgatagggacagagatggcaaaataactggtgcagaagctcgcactctgttcctcagttggaggcttccaagggaggtcctgaagcaagtgtgggatttgtctgaccaagacaatgatggcatgctttctttgagagagttttgcatcgctctttatttaatggagaggcaccgagctggaattcctcttcccccagcccttcctgactctcttaggcatgatgagacactgttacgagctacaggcttgccttcaacagcatacaatagtccatcatggcaacacaatcaaggaggataccacaaagaggccctggagcacctggggtgcctgctggtggtgtgcggccacccttgccatcacatttgcattcacaaactgatggagctagcagacaagggcaaccaagatctcacatgcctgggatggataatcatgtggtaattcaaggaaacaaagatgacaaaagtgcgctgaaccaggctgcacaggaggtggtggatgctcctaagaaggttgaggtggagaagcaggtcctggattccagagagaaattggagtattaccgcacaaagatgcaagatcttgtcctgtataaaagtcggtgcgagaataggctgaatgagattacagaaagggcgtcctctgataaacgcgaggtggaatcattggctaagaaatatgaagagaagtacaagcaagtagctgagttagcttccaaactagcagttgaagaagctgcatatcgtgatgttcaggagagaaaagttgagctgcatgatgcactgattaaaatggtacaaggtggaagtgttgatggtttacttcaggttcgagctgatcgaatccaatatcaattagaagagatggaaaaagctcttagtgaacggtgcaaacactttgaacttaaattcaaaccatctgcatcagttgagcttccttccggttgggaacctgggccacaagagggactcattgagtgggatgaagactgggataaatttgaagatgaaggttaaatacttccactgcattctcctctgctattactcaagcatccctgaagtctggttactttttaaagctggcaattgtctgtttatatatcggagtactctgcatggttgcaagctgagttttgcaatccagtgtttgccatgctactgttttaaaaaatatttgtgactttactactgtgtgttttaagaaattcaatactagtaactaatctgtgaaagagacaaaagatttcataccttttacacgtgttaacgtatactagcaaagccatatcctgaaataagcaaccttgactgtttctaagcttgatatttgtgtagctgatattatttattagtgccatttatggagataatttttctgctatgatatccttgtttaggttcctttcattgaacataccaagcccccgcctctgttctagtgaaccttctgttgttagaacattgtttgtgtgatatactgtacatagattttgatgacatgagctattgttaattttgtgtcttacacttggggcaattttttccctttcatttccaatttatcacatcgtattccttattgaatcatatgacatgacagggtttagtattgttaaggataatggtacaatacaggaaaacccagtttctgctgaaaatggaaaagtgccatctctttgggatgatggtgatatgtctcctgttgcatcctctaatggtcatatcaaggaagaaaggcgttacagtggaggtgatcaagtggctgagagtgaaatagcatatgattttggtgatgaatctgtgaggagtcctggcagtgctggaagaagtgcctcagggagtccatttaaatcttccggctttggcatgcatgactcatctcccagcaaaagagaaagttacagtgaccatggtggttctgaatccgtttttggtgacaagtttgctgatgaaacttcctggaactttgatgatcaagatactgactctgtttggggttctactgtactgaacactgaggccgaccaacgcggtggcacgcataactctttctttgggtcggaggcaggctcaccaagtggcgctagtgtatttggaaagaagaggaattcattcttcgacgattctgttccaagttctcctgcatacacatctgggttctctccaaaatttggcgaaagccgtgacgatagctcctcttataacttcgggaggtttgattccttcagatcccaagacactggatccttccctcaggaaagccgtttctccaggttcgactccattagcagctccaagggcgagaatgtatcaggatttgacacagggaatagctcacgaaattttggccggtttgactcttttgatgacgccgacccattcggttcaagtggaccttttaaagcatcgggaagccggtctccacccaagttctgatatgctctctgctctgattagggttttgtgtcttgcgtcttgatttgtcaatacaaggtttagattctttgagcgaactctggcgtaacatggatttttttacctgacatttcttccattttccttatgtgcaattttcgagtccatctcacgcacaaagtggacaggtttgggtttatatctttgtttttgtaaacattttttctgtatcttgtaaattacgccaagtctgtctttgtttatatagtttacatgtatgaaacaacttctcgccatataacctattatttccttcactatattaacgttgatatggtatagcagcaggaaatgctgtacttacgttgctatggtcaaagatattagggcagttgccccagcaaaactccacaagctagcctcct

SEQ ID NO: 25249 - DNA, 2855 bp, Zea Mays
ctcttaatatgttgtacagattagccatggtcgattgtcagttcgctataccagtagtgattgactgatttttgtcactttcgtttttagggagtaggaacactagattcgtagactgtcgggccgcatcatcgccgatatgtggcctcacccgtgatataatcccttgcttgggttgggtgaacggtgaaaaagcgggagcggccgatcgggagctgctgggagctagttgggagccaaggcgtcgtcgtaggttgccgtctcgctgccgcccgccggccacagttgctgcggtgccgtcggccatatctgacggctgaccccttaccggcagttatcctcgtccctcacgcttccattcctgcgcctctcgaatctcgatggagggccgcctcttcgataagcccttgaacccgaataagctcctcaaggagcaattcgtgagcaacctgacggggtcttccctgctggagatcgcggcgctctccactgtcgttccggcattggtagttctcagaaagtggagcagcagagataattctaggaaggagtcagcaaagaaaaatgatgatcaagttcatactgttcgtaaagattggatgcagtacttctctacactaggtgtagattatctcactgttgtattgccaattattttggttttcacagtcttatcggaatgggtttttatgtgtgctatttctcttgtaatcctgatatccatttacatcatgtttaaaaggtctcagtttcatcttaaagatggattcagtcagctgcctttgctcagggcagacatatcttcttaccgtgtctcagtggttctggtgacatgtttgtgcatattagctgtggacttcaaaatatttccaagacgctatgctaaggctgaaacatatggtagtggcatcatggatcttggagtaggatcttttgtagtggctaatgcactggtatctagacaagcacgaaatatagcctcaatgagtttcaaggcagttctttgttcgataagtccactcttatctcttggctttgctcgcattatatccacatggggtgttgattatcaggtccatgtaggagaatatggtgtgcattggaacttctttttcaccctcgcagctgtctctatccttacatccgttgtcagaattcatccaaaacattgtggcttagttggtctgcttatccttgctggataccagatttggctgtcttctggattgaatgagtacctcatttctcacaaaagaagtgctgatataatcacccagaataaggagggcatttatagcatccttggatactggggtatgtttctaattggtgtttctttgggtttctatctgttcgttgacactagttcaaagggcaagaaccggaacactcaagtcatgcaaatctgggttcttgctgcttctttttggattttggcaatcatctttgatagctacattgagagagtttctcgtcgaatgtgcaacttcgcttatgttatgcttgtttttggccagaattttcagaggacatatattggacttctctttaacaatatgaactttatctgacagtgcctacaaattaacctataatgaggccaaagaaaggcaaggtgttaggtgcatattattagatgcattcttatatgctttaaatattttgtaatctttcagtcagtatgtcgtacatgtttccacttgatataatgtgcacagaatggttcaaaattccactattgattgctttgcctgctaatgttactgttttatgatttgggagcaactttgccatattatcagacccatggatagtagcaagggggtttgcaaagccatgaaatttactacttacccaagtaaataaacctgctttcctatgagtaccaacaatgggtttgtctggtttttttctttagttgtttggtctattatttttgttcacgcttcaggttagcttcactgttcatgctgactgattgtccaatataggttttatctatcctcacattagctgggtttgcctcatataaaaagaacttggttcttgaagatgcattcaatgaaaatatgcttggctccttccttctggcaaatatccttactggtctggttaatctctcagttaacacgctctctgcctcttccttcactgccttcatgattctgtcagtatacgcctttactttatgcatggttactggccttacccatttttgtggtgttaggatgaaattctggtgaattgtaagctaccatttgatatgatgtattcattcattaacttgtcaacaaactggtagctagcttgcttgaaatataatactacgtctgttcttgaatatttgtcgcccggtagtttatttttcaactaaaacgtgacaaataaaaaagtctgaataatttttagggaaagaagccaaattgctatcctaattagttgatccagttattaactctgcctagactcgggagcttacttctttcatgtgtgttcaaggttctttgtgtctcatcagaaacttcctagtttccttcatttcatggtacaacgtgtctgctggtattaatcaataccgctatttacttttgacctaaagacgacacatccacccacggtatatgtgttgacgaattgaagatggtctgtcaagagtttgctgtttcagtatttaatgtcagtcagaatcaggcttgaagtaccataggttcatactgctacagttacccacttgtcacagataaaacagtgggtccaggaaagcagtgctgtagtcgaatgttacttgctggatttctgcagatgacagagagaatttgagcactatgacattcatgacagatagtacatactcg

SEQ ID NO: 25250 - DNA, 2784 bp, Zea Mays
caaaaatctaagtacaagattcaacattcagaaaaaaaaacctcatgctcagtcactccccgtctcacaaaacgccgcccttggatgagccaatcttcctctcgcacggcccactccttacccccgtctcacaaaacgccgccgccgccgtcgacagccaactccccgcgcccccaccgcctccgcgcaccgccccacacctgattgcgcgtccagaggtattcagagctctctgctgtgggagcaacgagggcagggatgagggaggtggtgacggtgcaggtcggcggtttcgcgaacttcgtcggctcccacttttggaacttccaggatgagctgctcgggctcgccgacgaccccggcgccgacccggtattcaggaccgccgcgctcgacatggacgtcctgtaccgcgccggcgagacacaccagagcgtcgccagctactgccctcgcttggtatcagtcggttctcgagggtctcttggctcgttaagttcctctggcactctaggttcgagcagtgcagctgcagatgagcccaacatcttcacatggtctggaaaggtaacaaaatcagtagcaaaacctcatgagcgaaacttgttcctacaaagtttatctgaagaagaacagaacccaagctctagcgatggccaaaacaatgctagtgttgaagataaggacctggtcgcaaatctggagaatggagtcaaattttggactgattattcaaaagttcagtatcaccctcagagcttatatgagttgtatggatcatggacagactttgacaggtttgataactatggaactgcaaaggaggtggtttcagaatggtcccaaatggaggaaatgaatgagaggctaaggttctttgttgaagaatgtgaccatatccagggtatccagtttcttgtggatgattctggaggctttgccagtgtagctgcacagtttttggagagtattgttgatgattacacaaatacccctgtaatgctgtattgtgtgcggaatccagactcctatgggtcttccagaaatcagtgtgaaaccatcataagatctttgcatgatgctgtatcgttgtcgaaactttcatactactgcaatctgatggttacttgtcacctttgctttctataaaagatgagaagcacttccactccagtgccatttgtgcagcagcaatgcattcattatctattccattcaggctacaacacgtgggcccggcctcagattcagcgcattcatctggtaagcttgatattggtgagcttgtgcacatattatctgatcaagggaggcagaacatgatcactgcgctggatgtagcaatgcctgccccttctttgacagatagaacagatttgaggaacatacagaggagcttgcattctctgacacctgaaatcagcgacgaggatgaagatccttacgctgttgaatccatggtggttcatggagtcctagatgcaggcgggaaaagggcttccatatctcaggtgaaggaatccatctgttcagcactggaaggcagggcgacgaaacccaagttctcccacctctcggtatcgcggtgccccctcccaatcccgctcccgttcccgtcaatcttcagcagcagtgttggccagcagggcgagatcctcggcaccagccacgcaggagcccggccaaagggtccgcttgccgtcggctcggtgccgatggcagcgcgcctgaggtcgagcagcgccatagcgccattcatcgagaggaggtcggcgagcctccagaggctcggtgtcgccaggggcacgctgggctcgcaggtcctccacgactggggcttcgggagggaggaggtcgaggacatggctgagcacctggcgaagatgttgcgcccgttttacccggaaatggacctgacgtcggattctgatgattaggtttcactgtcattgtgtctcgtattaccggatggtaagcagctgggttttagtctgtgggaactagaaattgtgatgcagatgcagctggcgtgagacgccgtgctgcgatgcattcctctggtctgtgttgaagggatgcagagtactggaaacgagatctgagagagcctgggcgtgtgaccgtgtcattcagcgctccgcatgtgatgcacatgcatttgggcgacgacgcggacgtccgccgccatgggcagttgttgttgtggtaacattgtgcaatgatccagccctgatgcagatgtccagatctgtgctgtacttacctgcaaaccacacagctaatgaaactaaagaacagtctttctggtctgagatgttttctttgttcgttttaacttcgcgagcaccagaactgtaaacctggcattttttctagtatgaaaaaatagcattatttggctcgacaaaccgcattgttcagttggatcttcatatcatcacagccagaacaagagggcaaatgcagcattcttgcatgtgttggggttccctgaaattttgtatggtagtgtcaccgtaattgatctctggaatatgtaatgtaaccccctctgttgtcgtgtgcatgaatttcttcagtctgtgcatcgctcgcacgcatgcacatggtcgcaactcgcaacattctgcgatctgatgttccagacaagctcaagatccagatcagatacccaaccaggccaccttttccaatttatttcctggggacaaaaagagaaaaggcttgtactgtatcactgttcttctcatatagtacaatgtatcggtatggtctcaatggacg

SEQ ID NO: 25251 - DNA, 475 bp, Zea Mays
tcactctcacttctctactcccgatccttgccgcggtcgagccaggcaaccacccagatgccccgaggaggaatccatccgggacctccatcgcctggcacagcatcggcaaatgccgctcgatagaatccgtaggcaaaagctagcgcagagagtacgttgtaaatgcacaaggttctttttttttctaacctcgacgaacgcggcgaagagggagaagtcaccgacgcgagccgatggagcaagcttctactggcgcgttactgcaggacggcacgcaggtgccacgcgaggtttgtcttgctggtctctggaaccctaggaacggcggtgcggcactactatgattcacggtggggcacagggttccatgggggcacaacctcgatcttgggttgcgattcgaggaggggctgtggccttggcttttatagcctagcgaagatcatctcggatccggtagacacggtatgcg

SEQ ID NO: 25252 - DNA, 3141 bp, Zea Mays
catgaaccaaacacatagtcagttccttctcttcttaaggctgtggatcacgcggatcgaggcgtttcttcgattctagctggggtttgggggaggtgttcgtgaactggattcaaggcccaggcagtgaagatttctaatctggatgtacttaactgcaggctaaggcaatgaagatttctaatctggatgcacacttaatcttgtccagttcttgatcttgggctttgctgcttcctctcaagttagtttgttggccaatcgagtccagaggcgcagatgagtgaggagtacaatatggatgtggccctaaaagccaaaaatgttgctgagaccaagttccatgcccgagacatcaggggtgctcggaagtatgcactcaaggcccagaatctctgcccaacacttgaaggcatattgcagatggtctcaacgcttgaagttcatcttgcagctgagtccaagattgatggagagagtgactggtataggatattgtgtctaggtgcctttgcagatgaagaggaggtgaggaagcaatataggaagctagctctgctgctgcacccagacaagaacaagtctgttggtgctgaggaggccttcaaactgatctctgaggcgtggagtgtgttgtcagatactagcaggaaggtagtttatgatgagaagcgaagaaatcattctgttgtcaatgtaaccaatggcatttatacctatgataagaaggcaaacaagagggctcgaaagaatgctgctgctgcagctgctgccgctgctgctgccgctgcagctgaggctactactcgtcctgttgggattgatacattttggacatcttgcaaccgctgccggatgcagtatgagtacttaaggatttatcttaatcataacctgttgtgcccaaattgccataatgcattcttggcagtggagactgggttcccttgcaatggaagcagctcatcattctcatggtcaaccaagcagcagccgcagcagaaccacaattcaaccaagcattcatatggctcaacaagcaggacttctagcatccctggtacagggaatggggggtaccagcaagataatacttatgattcttacaacaatcaaggcttccagtggaatcagtactccaagacaacaactgcagctgttactaatgcttatagtacacaggccttggagaaacagagaaggaagcatgacgagagctacagctacaactattctgaaagcggcaacacatatgttcatgagaaagctgcttcaaggcgcggtcgcttctcaaagcggagaaggcataactatgatgcttataccactgtggattatggtggcgataacaaagaaacagttgctgcaactgcaagcacagaaccaactgctgtttttactgatgtgggacgggtcaatggtacttcagtggaaaggtttaaatctgcagtgagtggaagaagagcaaatattctgggtgagattacccagattgatacacgaaatttacttcttgagaaagccaaggcaactgtctgtgaaaaattgcatgaattaaacatcacaccatcttcacgagctgcagatagaagaggatctgaaggaaagctgtatccttgtgacaacaacataaaggtcaacggtgtcctctctgacaaacctggcaagggagtcaagctatgcaactcaagaagcatggaaatccaagtgcctgctaccgatgacaaaaatccagagcaacgccgtgtgcctgtgtccatcgatgtcccagaccctgacttccatgatttcgataaagaccgaacggagaaggcttttgatactgatcaagtatgggctacctatgactgcgaggacggcatgccccgcctatatgtaatggttcagaaagttctttcaacgaggcccttccggatccgcatgagctttctcaactcgaagtcaaatatcgaactggcgcctataaactgggtcgcctctggtttccaaaagacatgtggtgacttcagggttgggagatatcaggtgagcgaaacggtgaacatattttcacatagagtgaggtggactaaaggtccccgtggcatcatcaggatcgttccccagaaaggggacacgtgggccttgtaccgtaactggtcccccgactggaacgagctgacgcctgatgacgtgatatacaagtacgagatagtggaagtcgctgatgatttcactgaggagcgagggctgactgtcatcccgttgctgaaggttgccggattcaaagccgtcttccacagacacgtggatcccgaggaggtgaggaggataccaaaggaagagctgttccggttctcgcaccgggttccttctcgtctcctgacgggcgaagagggcagcaatgccccgaaaggctgccatgagctggaccctgctgccactccagtggaccttctcaaggttatcacggagcacaaggaagacgcggtggcgcagagtcctaaataggagtgagcgactccgataacagcgaagataaggtagctggatgtctgagtgaccagatccccacttggttaatgacagcgtgccagcacatgatggtgtctaaagctctactacgccatcttattttcggctgatggcttggacaacacttccagggcaagcagcctgtgtgtgtgtgtgacggacttctgaccttgttaattcttaggcattcctaacatttgattctatcactacacaagccaaccgccacgtagattaaatggccattgggaggaggccggccgcgcacggcaccgagatgagatgaggaggttagtcacggaggtagggagggtgaagatgttacttgtttgtgttgctcactctgtaatgtaggaggcaggctcgagccgagggaaagagctgcttggctttgcttgcccatgtaccccgcatttctgtacctgtttttttacttatgatgatgatgatgtatttccttcttgttttatagtagtaagtaattcacggccagtaattgtagactctggtaaccgtttcggaaaatctagtgctttatctggtggatgattctgtctgaccctgtgctgtttggctgtgcaccgagctacttggatggattggctgattcgaggatgaattctttgt

SEQ ID NO: 25253 - DNA, 1800 bp, Zea Mays
ctctctatatctaatttctcgtggaggcgagcagatagacaggagagagaacgcacgcaagaacgcgctctcctcgcgattggacagggcgcgaacaccccgaggacgcgcgcgatccccgaggacacgggggtgacagcctcgccgtcgccggggcggccgtttcgagctccgtcccgcctcggcccggctcagatttggtgggatccggccaagaaatcccgcagttggtgaggaggagaggaggggagaggaagggagggcggaggggatgggcgtcggtgcggagcccaaggatcaggcggcgacggccgccgcggtgtcctgctcgatctgcctcgacgcggtgctcgctgcgtccggggagaggtccaccgccaggctgcactgcggccacgagttccacctagattgcattggatcagcatttaatgccaaaggggttatgcaatgccccaactgccgcaaaatcgagaaagggaattggctttatgcaaatggttctcgatctgcccatgatgttagcatggatgaatgggcccatgatgaagacctttatgatgttagctactcagatatgccatttcgcttccattggtgtccgtttgggcgcttaacccaacttccatctttatttgaggaaggagaatcatcacctccagttacatttcatgacttcatgggacaacatgtgtttacggagcaagtagctgtatctgctgcagcagggacaactaatccttgcccctatgtggcatacttgcatcctcttacaccattgacgtcattgtcaagctcccatgtccctgacagaactatggatcgtcctgcataccatgatcattggaaccccatggctgggccatcagatgttaggtccatgcaaacaatgcaacctgctgattttcatcatagccattgggcacatgtgccccattcttatggtcaacccaacagcaataacgagcagccaggaatcccttttggagcaagggctgtacgggtcgatggtgatagccaacgccgagcatctgttgtctctccatcttacttcagtaatggatctggttccagatctagacctcccaatgttcctcctctgatgcctcagttcatgagggctcatggcagcatcagcgaacagtaccaacagaattcatcatctagcttatttgctggggcccataggtcaggaggcatgcgacctgccccaacacctctaccagagaaccccacctttaccttgttcccgccaggttcatctggccatagctcgatggagactgatgatgctgggggaagccggttctacgcctgggagggtgaccggtttgccccatacccgttgatgccggtagactgcgagacaagctggcggacctcacagcagcagtcccaccagagcacatcagagcctacatctgctccaaggaggctgtttgggcaatggctcgctgtcggcaggccatccccatcacccgaggggtcttcgtatcgtcaattgcactcaccgcggatgtagaccctcgccgctgaaagaaacgatgggaagcccattgtattaagttaagccgggctgtgccgtgaaactttgggacgatgctcgaggggacagaaactggaaacgatccggctgaggatatttcgatttggtttatgtgaattccatctcgtacatatttgaaatcaagttgggatgctgggagcttcgaatgtaacgtgatttcttatgctgcaattctgttgattgacggattttcaaacgcgattgaatttccgttgcaatggtacctgttgaac

SEQ ID NO: 25254 - DNA, 1865 bp, Zea Mays
agaggccagtgtcaccatcgttggcagacttcgtgaatcggtcagcagaggaacggcctgtctgcttgcttagtgctccaggtttcttggccccgtcgacttccagtgagttcagtttagctcagtaagcatctgatcaacttcgaggtgccagacagatcctatgctgccttactgggatgaaagcaggagcaggaacatcttggagatgatggagcaaccctagctggatctccaggtccagcttccaggagccgctcgcaaaaaaattgcaactacgcaaaggggaagtggatagaagatgataagcggccgctgtactctggtaatgagtgcaaacaatggctgtcaaaaatgtgggcttgtcgaatgatgcggcgcacacatttctcttatgagaattaccggtggcaaccacatgactgtgagatgcctgagtttacagggcctaagttcttaaaaaggatgagaaaccgaactcttgcttttgttggtgattcacttggcagacaacaatttcagtcaatgatgtgtatagcaactggtggcaaatacagtccagaggttgaagatgttggttggaaatatggccttgtcaaagccccaggtgctctaagacctgacgggtgggcttatagattttcgtccaccaacacaactatccttttctactggtctgctactctgtctgaattggaacctctgaatacagaacacacagttaccagatatgcattgcatcttgatcgaccagttacatttttgaaggagtatcttaatgactttgatgtcctagtacttaacactggccatcactggaacagagggaaattcaatggaaatcactgggaattgcatgctgacgggaagcctgtaggcaatggtagtagactcgcagacctaaaccgtgcaaaaaatcttacattgtatagcattgctagatggatggattcagaactcacacggcatcctaagatgaaagttttcctcaggacaatttcaccaaggcactttgtaaatggtgactggaacacaggtggaacatgtggaaatactgtcccctttactaatggaagtgaagtgttgcaggatcattcaattgatatacccgcagaaaatgctgtgaagggaactcgggttaagcttttggatatcactgctatctcaaaactacgggatgaggggcatatctcaaactctagtttcaaaaaggcttccaccggaattaatgattgcttgcactggtgcttacctggtataccagacatgtggaatgagcttctctttgtacagatttagtatcaccctctggttaggcagatctttttcagagccccaaggatctccgctgttcatagcatagaagtaaagtttatggaattttgggtcgcccatatggaggtgttcacaagatgatactattgatttctatgaagtacgaaatttacagtgtggaacagattattccaacttcctttcggagcagagtagatggaggtgttgcccagcccaatctgactatcgagtattcttcagggcccggacggacgacctcgtctggatgtagcccgtgcgaaatgggggaccgcatgggcgcatggcatgtgaaaggaggccagtgctgccagcttaccgcgacgactgattcgttattcgagttatttacaagtacctaatatatctagatgatacatttgcaacatgcatcaaaatttgctgaaacatttcgaatgtgtttgtaacataagtatagttattacaatagactccctcggttcgttttttatttgttgtctgttagcacagagctgaatagggtggcgtttggtttgcgaaatataacgtaaatgataatggtaactatt

SEQ ID NO: 25255 - DNA, 2329 bp, Zea Mays
cgaagatatgccgttctcctctcaatcccacaactctcgtactttccccgcgctgattactccgtgagactagtattgcctccatctgtgacttgctcgaagtcgtcgaccggagggccaagatcgtggcaacagaactgtcggatgagcagtctacctctcagccttcaggaccaaacaaccaagaagtgcaagcaaagaagggaaagccgagggagaagggtccattgaagctcactaatgccgatggtggcaacaagatatctgctcagaaggaaaagaggagtaggcaacggccgcgagagcggatgaagatcgagaagatcaggccttcgccacctgcaggttcatcaagtgttgataccagtgctagtgaaccagaagtcactccgatcgatgttaaggaagtgggtaatgagggtacattggagaaaggagagaaagagattgctgttgaaagctatttttcagttatggatgcaaaaagtgagtcgagcagcagtaaccagacttccgagattggttcagtgattaatttggaggagagagactctactgtggctgttatccaggacacaaatgcgtctgaattgccaaatacagaggttactggcaaactgcaggaatcaaagaaagcgagtgtttcagattcatcagaaagcatagaagatcgacgcaaacaaaaatctgatacaatttctgtgaaagaacaagaccaacttgaggaggctcagggattgttaaaaagtgctgtcaagactggccagtcaaaagaagctaggttagctcgggtttgtgctggactttcatcccgcctccaagagtataagtctgaaaatgcacagctggaggaacttcttgttcaagagagagagaaatctacattgcatgaagctcatataaagcaactacagcaagagttatcaatgtccagagtagaaggttcaagagctgaattgaatatggttgatgctttgactgcaaaaaatgcagagattgaatctcttgttaaatcattggactcttggaagaaaagagcagcaacttcagaagaaaagcttgcttctttagaggaagatatagatggtctcaagaggaactgtgaacttactgaaaccagagttatacaggctttacgggaggaacttgctaccacagagcgtagggctgaagaagagcgcattgctcataatgccacaaaaatggcagctgttgagagagaagtagaactagaacatcgggctgttgaggcatcgagcgctttagctagaatccagagagctgctgatcaaagctcatcaagagtgctggaattggagcacaagttggctgttcttgaggttgaatgtgcttcattgcaacaagaactacaggagatggaagctcgtaatcgccgcgtacagaaaaaaccttccgaagaagctaatcaagttcttcagatgcaggcttggcaggaagaagttgagcgtgcacgccaaagccaacgagaggcagaggcaaagatatcatccttggaggcagagttgcagaaaatgagagttgaaatggctggaatgagaagagatgcagagcattattctagacaggagcatgttgaacttgagaagagataccgtgagctaactgacttactgtaccacaagcaaacacaattggaatccatggccagcgaaaaggctgcgttagagttccaactggagaaatcattgaaacaatttcatgaagtgcagattgaggcagaaaggagtaaagctactcgcagatcagcatcgtcgtgggaagaagatgctgatatcaaggcattagagcctcttcctctacatcatcgacacatggcaacagcaaatcagcagttacaaaaggctgcgaagcttttagacacaggagctgtgcgcgcaacaagatttttgtggcgacatcccgttgcacgagtcagcctgctgttctatttggtgttcgtgcatttgttcttgatgcacttgttaaaccgccttcaggacttcgcgtccagagaaggaacatcagccatgggggatctggccagcgcgaacctgccatagcccatagtctctgtgcccttcttgttgattcaggcattccccactgattcttggtccacatgccttcaaagtttcatttcatcctcctgtttctttttttttccgtcttccccatcttttgtaaagtagtagtgttcgttgtttggccatgcgctgtataatccattcttttacattgactgatgagtcagattgagtatgtaccaagtaccttgacatgatataccaagccaattgagccagttcttgtaccctcgagtctcttcaag

SEQ ID NO: 25256 - DNA, 1214 bp, Zea Mays
tgcgattaccacgtgacaggggacgatctgaggaagacgagcacaccaaaggaagctttgctggtggagttgaggcacatgaatgaagaagtgtctggaaagcagaaagatggagaaattattaaagacttggagcatttcagaaagcaatatgctatggtgcttgtgcagctaagagattctaatgatcaagtaaccttccccagtttaagtatcacttcaataacttggttttccctacttaggtgaatgacaccactttttcttactcaggtggctgcagctttgctttcgcttcgccaacgcaatacatatcatgggaattcagggcagtctaaatctatggaaaatggcatagcccttgctggagcaccagatccgtataaccttttcagttatattaatccagagtctggttctcaagtgatcgaagttatcgagacttcaaagtccagggcaaaaatgatggttgatgttgctatccaggctatgtgcaaagtgagtgaaggagagaatgctttttcaaaaataggggaagcactagatcacttgaatagccgcggtactggctctggttcaagtatacttggcataagacggatacctcccgattcaggacagtcaaatgcatcttatcatgacgactgcacagcggcccctgcagcaaacagcagttcaaggttgccgaacggctgtgattcggaagctcaatttcccaaagagttgatatcatcctgcgttgctatgatgcttatgataaagaactgcacggagaagcagtatcaccctgctgaagtcgcgcacatcctcgattcggcactgtcaagcgtacaaccgtgcagctcccagaacatcccgatcttcagagagatcgaaatgtgcatgggcatcatcaagaaccaaatgctggcgttgatacccactccaagtggctaagcttcaatcctgccgcgggtatttaactaatgtactctgaaaacgaaaaaacggatacctgtatgtgatgtgcaatattcctttttttgctgttgtctgtatgtacaaggcgtgtgttattattcattgcctgttattattatattcaactggggtaaaaaaaaatatcatgtactctgtctccctttctccctctttctcaaggatgcatttcactccatctttttatgtctaactaataactaattggtaattgctttctttgtgtaatttcattg

SEQ ID NO: 25257 - DNA, 1014 bp, Zea Mays
atagctggaaggacatcagcatgacacgcatgccaataatgaaggtgatggctcagactggtgagatccggtgcgccatggatcacatcctcgaggccgagaggaagggcgagatcaaccacgacaacgtcctctacatcgtcgagaacatcaacgtcgcagcgatcgagacgacgctgtggtcgatcgagtggggcatcgccgagctggtgaaccacccggccatccagcacaagctccgggaggagctcgcctcggtgctgggcgccggcgtgcctgtgacggagccggacctcgagcgcctcccctaccttcaggccatcgtcaaggagacgctccgcctgcgcatggccatcccgctgctggtcccccacatgaacctcaacgacggcaagctcgccggcttcgacatccccgccgagtccaagatcctcgtcaatgcctggttcctcgccaacgaccccaagaggtgggtgcgccccgacgagttccggcccgagcgcttcctggaggaggagaagtccgtggaggcccacggcaacgacttccgattcgtgccctttggggtcggccgccggagctgccctgggatcatcctcgcgctgcctatcatcggcatcaccctgggccggctggtgcagaacttccagctgctgccgccgccggggctggacaagatcgacaccacggagaagcccggccagttcagcaaccagatcgccaagcatgccaccatcgtctgcaagcccctcgaggcctagaaatcaatgcgtgtttcctgcacgcgcccccgcagatgaagcactatgtattttctcttttttttgtgtgttgtgttttttttactaagaggagatgtatttcttgttcgtaaaatgcacttagtcaaatggatcgagattatgttgatcattaaacaccaaaatcacttagtcaaacgggtcgggatccattttcctcacaatgtcaacctttgactgatgacaatataatcaaagcaagcaaatattaaat

SEQ ID NO: 25258 - DNA, 3160 bp, Zea Mays
aaatccgaaccaaccaatcccaatatccgcaggcctccctctgcactggaccacaccacaccctcgcctttcccgcaacccagagcccctctgccaatctctgcacaacatcatcgattccccaggcgaaaaaaaatactctggaccctttttttcaatcagattttcaatcagaggagggtagattggatttgtcagattatccgatctccactgcagcctctctgaagagaagaggcccatccagtccagcctttccgcagttcctggagcaatcctggctcagtgcgtgaagcagcttgattcgcctgcgcaactgatagtcatagaagggagccaagagcttgttcttggctgcttgaccgattcttgattgagctgctgcggatcttgccaaagggccaagagcttgctgtgtctggaattcttggtcagccgtgccggatagggtgagggtgccatgacagcatcgcagtcctcgatgagcggcggcggggagccgggggtgcggacggtggtctggttcaggcgagacctgcgtgtggaggacaacccggcgctggcggcggccgctcggacggccggggaggtcgtgccggcgtacgtgtggtcgccagaggaggacgggccctactaccccggcagggtgtcccggtggtggctcagccaaagcctgaagcacctcgacgcctcgctccgccggctcggcgcctgccgcctcgtcacccgccgctccagcgacgctgtcgtcgcgctgatcgacctagtccgcagcaccggcgccacccacctctttttcaaccgactctacgacccgctatcgctggtccgggaccaccgcgtgaaggagcagctgtcggcggagggcatcactgtgcagtccttcaacgccgatctgctgtacgagccgtgggaggtcctcgacgacgacggcttccccttcaccatgttcgcgccattctggaacaggtgacctgtcgaggtgtccgtgggacgagctcatctttgaagacgagtccgagaagggcagcaatgcgctgctcgcacgagcgtggtcaccagggtggcagaacgctgacaaggcgctaacggccttcctcgacggtccgctggtcgactactccgcgaaccacaagaaggccgacagcgccagcacgtccctgctgtctccgtacctgcacttcggcgagctcagcgtccgcaaggtcttccaccaggtgcggatgaagcagctgatgtggagcaacgacggcgaccgcgccggcgaggagagctgcacgctattcctccgcgccatcggcctgcgggagtactcgaggtacctcaccttcaaccacccctgcagccttgagaagccccttctgtcgcacctcaggttcttcccctgggtcgtcgatgaggtgcacttcaaggtctggagacaagggaggactggctaccctcttgtcgacgctggcatgagggagctctgggccaccggctgggttcacgaccggatacgtgtcgttgtctctagcttcttcgtcaaggtgctccagctgccatggcgctggggcatgaagtacttctgggacaccttgctggatgctgaccttgagagtgacgcactaggctggcagtacatttctgggtctctccctgatggccgtgagcttgaccgcattgacaaccctcagtttgaagggtacaagtttgatccgcacggggagtacgtacggcgatggctaccggagctggcgaggctgccgacggaatggatacaccacccctgggatgcacctgagtctgtgcttcaggctgcaggagtcgagctaggctccaactacccacgccccattgtggagttagatgcagccaattccaggttgcagggtgccctgtcagagatgtgggagcttgaggcagcctcttgtgctgccatcgagaacgggatggaagaaggcctcggcgattccacagatgagccgccgatcgacttccctcaagaattacggatggaagtggaccgacaaccagctcaacctgctatcatccacacgccggtagtggctggttggagacgagaagaccagagggtgcctagcatgacttcctcgttaattagagctgagaccgaactcactgcagactttggcaacaccagtgaggacagtaggccagaagtgccgtcaaacattcatctgcaggctcgggcggagagggaagaaacagttgacggtgccactggcaatactgtcagggtgaatggcaaccaacagcagcagaatcttcagaacaacatgcaccgcgtgctaggtatcgctccatcaatttcagaggcatcgagcagctggacgggtagggaaggtggattggtaccggtctggtcacctccggcagcttcagtacattctgatccatatactgccgacgaggctgacatttcgagtaggagttatttggacaggcatcagcaatcaaatacgatgatgaactggagtcaactctctcagtcattgtgagttcagttgcacggtaacctattttcaaagaaaaaatgctttgtcataaactgaaaatttggagcttatagcaaaaggtagacagtagttgtctaaagccattgttaatgtggcaccaaaaattagctgacaacttgaatttgatgtgtagtagctgagtagaacattccaaatgcccactaatgatcccttttttcacaaatctctcaatgcaggacaacaggatgggaagtggataattagtgctgtgtgaccggatttaattgattaggagttcggcagagagaattatattatacatatgtaaattatcacattttgttcgtctatatagccttggtgtgcatgcaagtcatcgaacatgcagcttcttggatgcaataattgttgtgaacctagttgtgtagaaccttgtggtttaggttgctaggtgcccacaagatatgtattattcgtcagataagagttttctagcatcaggttcattttgtatctggttattgtcatattgcagttcttggtgatgggatagtcaacacaggtgtattctcagttttatagacagcacttaccttttatctgtgacaacgaggactcaaagggaacatcttggcagtgagattgtgtgccactcttaccttctgctcctttgcctcaat

SEQ ID NO: 25259 - DNA, 1926 bp, Zea Mays
aggcttcccttcagcaaacagcctggtagttctattcagccgcttaccgcgcgctctcttgtgcggcaattgggcgaccgccgccgccctaactcaggtgccgaggtcttcgccagtaacttcaacaggtcctcgcctggtccttcgctggcgaggagcatctccaccaggtgcgaatcatggggaagtttatgcatgacaatccaatgctatcatgtagtgaagtaaacagacatcactatagtcttgcggcagttgctgtcggtttgggactaggagttgccgggttatgcaaggcattgtatagtggtctgtccataccatgggtttctccaaggaatttgttttcgggatcagggagggcatactatgttggaggtctgcgaaatcttggcaacaattgctttcttaatgtcatcctccaggcacttgccagctgtgatggttttatttcctttctagataatttgcttgcaactgatggcttgctacctgaagaaaaggctgtaagaatgcctcttcttcttgctttaagttctctcttggaagacttaatcatagttcgagatgaaaggactgtgttgaatccacatggagtaatgcatgctttgagtttgtatgttggtcacttcaatctgaccagacagcaggatgcttcagaagcttttctccatcttctgatctcattgagggatgaatttgcccattgttatgtaccacataggagttctctggcagacatcaccctttctgactccaaagtatacaagcaaagggaagctgtcattggacttcgagaatttccactgcttgcctctttcgccagtccttaatgcaaatggagatattaccagtgggtgtagtttggtggattgcctaaagtacttcactgtggtggagcatcttgacaactatcgttgtgaccggtgttggcacatcattgctgccaaatatctttctcttagatcagaagttgatgaggaaaaggttagcaagcttcaatcctgtgtcgactatggcacttgcagttgcagggatatgttccccctggagtcactgccatgttcatcatcttcacgagcaacaaagcagctgattatcagtcagtgcccgaagattctgtgcattcattttctacgcgcttcagtcggtcttgacggcgagcccatcaaacatcagggacatatttctttccctttgcttctcaatctgtccccgtttacgggaggcgcgtcgagtgctggacctttagcaatgaatgcgcaaagagatggccagcaagctctccatctataccggcaactgaatatgcaggctaatgctgacgtgtccagtagttcatcatcaccaccgcagctatcaaggagcaagttatacggtctcgcggccgtcgtggagcactacgggaagtgtggaggagggcactacgcagtctacaggagagtcgcgtcgaatcctgaccctgatgatccaggcaaacctgttgcaggccttggcaagcggtggttttacatctcagacggctacgtgtcagaagttccagaggaggatgtactgcgcgcggaggccacgctccttttctacgagagattgtagccgcttgttgagtagctaacgtgtgcatcataacaaaatctaggacagttttgttgtgaggagtctgatgttcttagcggtaccgtgagcttccaagtagacgaggaaactagctgtggcacaaaaaacaaagcctctcggcatctcgacgtggactgcaggcgtgtcttaggcagtgtggcctactttttttttgggtccttgcaaacgttaaaataattcttcatgcaatacgtcagtgaggtcttcctcttgagaataaatcagatcaccattgttttgcgacattgtaagcagcagatggtggatcgtgtgagttttgttctgctg

SEQ ID NO: 25260 - DNA, 2040 bp, Zea Mays
cgaatatctctgcggcaagcccacgcttcggagtggacgtcaggcgcgctcgccagccccccacaccaccaccaccaccacaaccccaccaagctcacgtttccgaattcaccaactcctgcacgccgcgtcgagatcgttcacgccttagcttcgggaactccaccaataagcccaccggctggagcaatggggagcacggggcgcgagccggaggtgacccgcgccaacttccccgacggcttcgtcttcggcgtcgccacctccgcgtaccagatcgagggagcgagaagagagggaggcaaaggagacaacatatgggatgtatttacagatgacaaagaacgtgtcttagacagaagcaatgcagaaattgcagttgaccactaccatcgatacaaggaagacattgagctcatggcaagtctaggttttagcgcatacagattttctatatcttgggcacgtatatttcctgatggcttgggggaaaaggtcaatgagcaaggagtcgccttctataatgacctcatcaactttatgatttcgaaaggtattgagccttacgcaacactgtatcattgggatcttccaaacaatcttcaaaaaactctggggggctggatttctgacaagattgtgtaagccactgcaggcatcttaagcgtgtagtatgaatgtatgattaccgaagttttcttaacacgcaaatgaatggttacatatgagattcttctcgactcaacctttttgtttcaaaagtgtttgcagcttgatttgctgtttttacgagtttctcaccataaaaatatcctagggagtactttgcattgtatgcagaagcttgctttgcaaatttcggagatagagtaaagcgttggataacaatcaatgaacctctccaaaccgcaatcaacggttatgggattggaatttttgcgcctggaggatgccaaggtgaaactgcaagatgttacttggccgcccatcaccaaatcttggctcatgctgctgctgttgatgtttatagaagaaaattcaagagccattttctgaaaaactcgaagaccaaattgctgcgcaacggaggattgactttcaacttggatggtacctagatccaatatattttggtgattacccagaaagcatgcgtcagcgactgggcagtgatcttccaaccttctcagagaaagataaaaaattcatcaagaacaaaattgattttattggactaaatcattatacttcgaggctcattgctcatcaccaaaatcctgatgatgtttatttctacaaagtgcaacaaatggagagagtagaaaaatggagtagtggtgaaagcattggtgaaagggctgcatctgaatggcttgtcatagttccttggggccttcacaaattgcttaactatatagtgaagaaatacaacaacccagtaatttatgttactgagaatggcatggatgatgaagacgatcagtccgcgacgattgaccaggtcctaaacgacacgaagagagtcggctacttcaaaggatacctcaattcggttgcacaggcgatcaaggacggggctgatgtccgtgggtacttcgcgtggtcattcctggacaacttcgagtgggctatgggctacaccaagaggttcggcatagtctacgtcgattacaaggacgggctctccaggcaccccaaggcatcggccctctggttctcgcgcctcctcaagggcgaggctgccgaaaacagctatagctagagctgccacagactgagggaacagtccgcggcaagtacagaaacattacacacatttctcctgttgttgtgtcttgttgttgtgtcttaaaggtgagtgcacctatgtatgtatgtatgtatgtatgtatgtatgtatgtatgtatgtatgtatatatgtattcatcctaataatctcaggatgtgctagtctgtcgttgatgcgacgctggctgagatgtgttctccaagaacaagaacaaccagaacctcagcaccaaataagctttgaatccatg

SEQ ID NO: 25261 - DNA, 172 bp, Zea Mays
attctctctccctttcccatcttctctccctgatgctcgcaactgccactacccctatcacctggtggttgccgatcccagcgcccaaatccaaagcaccccggcgagcgcccagacgcccagcttggctgtctcggcgcgacctcttcttctccggcgagtccttcgacca

SEQ ID NO: 25262 - DNA, 732 bp, Zea Mays
tttgaagaaaagtcgccgcgttcctcttgcctgatgaaatccacttctcgtctagatctaagcctccgcgtggcttccggatcagatgcttggtccgatcaaacaacgctcgaagcgagacgaggctgcatggtttttgtgcctggaggtttctaatccgcgtggttaaggaaactgggtactacaatttgttgctacaagtgcccgatccgtcgaattgatgtctgccgaccttcagagctgcgacgttccgggaatctggggggatctggatcttggcggactggacaattgggaggcgtctaaagcatggctggacaattgtgagatgtgacatcttgaaggcctttgccatgttgggtgcgctcgcatggcaggcatcataataaagatgttggttttgtgtgctgggtgggagatcgcacggggaattgttttttcatccctgggttctcccgccctttgtgtccccgtgccctgcttcgtgttgtttggcttctcgttctacgcttcatcaccggtgctgctgcaaattgaacggatcttctcgtctcgctgcgtgctgcaaattgaacggggctacatcgcaacgcaacacaacacgcaaggtcattcatatgcagttcattcaccctacgtttatcccgtaaggctataaagcacatgcgaaaggcgttcattcactctgtaaggcgttcttcacccaacgcttctcgcacgggggtcttctat

SEQ ID NO: 25263 - DNA, 2498 bp, Zea Mays
acgtctctatcctcccacttcgacccggccggccctatcaaaagctggccccttccacagcgcactccctcaccttcctccacggctccaccatcccctctcccctgccctgcccccaccgccccgcttccttccgccttgctccgttgcttcctcccaccacagtccactccactcgccggccctgcagctcagtatttgactgagactggtggtggagctgctagcagcgagcctgctacttcctggtcctgacggtgcgttcagacctcagaccagtgccgacgacgagctgtgaggagagggcaaggaaacaagcctgtgaggaaggcggcgatggagaggtacgaggtgatcaaggacataggatcgggcaacttcggggtggccaagctggtccgggacgtcaggaccaaggagctcttcgccgtcaagttcatcgagcgggggatgaagattgatgagaatgtccaaagggagatcatgaaccacaggtcactgaggcatccaaacatagttaaatttaaggaggactacttggtggcaacttgtttctatgggtgttggatacttggatgtctatcagcattcagcagctatgggtagcatgcactagtgccatgccccttgagtcggggaagtgcttatggcatttgggcctcggagttttttttgccaataactcatatttgttgagtggctataatgcaatgactgagtgacagttccttagcagttagcagtctgctttgtcctcttgttcttctgttatatattcttgtttgcacggaatgcatgccactgttttttgtgctacctgatttgccgtcgataaaagaggtatcaactaggtagagtgaaggagaattatcgctggatggtaatatcaaccaaaaatatcgaacttcggtccatagactgaattccttttaacttgtttttttctctcgccaggatttcatagcagcacacctttaagaaatgtttctcgcaactaagttctttggaatgtaattagctacaacaagcatgggtcaattatgattctggcagtaacttgtattcctttcaactagtttggctgcagtaccggagaaatacttagtgtactggtcattgacgacagtaaatttcgtggatttaattggagacctctttataatgctaacaacatagttatctcatgaagcttattactgcagaaaatagcaggagagggtccaaccgtgattattacatttttgtttcagaatttaaatttattaccatttccaaactacaaattaaaagagaggcttagtttttcaggttgtgctaactcccacacatttggccatagttatggaatatgctgctggtggtgagctatttgaaaggatctgtaatgctggaagatttagtgaggatgaggcgagatttttcttccaacaactgatttcaggagttagttattgccactcaatgcaaatatgccatagagatttgaaactagaaaacactctcctggatgatagtatagcacctcggctaaagatatgtgattttggttactccaagtcctctgtgctgcactctcaaccaaaatcaactgtcgggacaccagcttacattgctcctgaggtccttgctagaaaggaatatgatggaaaggtcgccgatgtttggtcatgtggagttactctgtatgtgatgcttgttggtgcctatccctttgaggaccccgacgaaccgaagaatttccgcaagacgcttactcggattatcagcgtccagtacgcggttcctgattttgtccgagtttcaatggagtgcaggcatctgctgtctcggatctttgtggcgaaacctgagcaacggataaccatcccagagatcaagaaccacccatggttcctgaagaacctgcccatcgagatgaccgacgagtaccagatgaacctacagctagtcgacatgaatgtcccctcgcaaagcctggaggagatcatgtccatcatactggaggcccggaagcccggcgacgggctgaagcatgcgggacagctccccggccttgggagcatggagctggatgacattgatgttgacgacatagacgttgaggacagtggcgactttgtatgtgccttgtgacgcggttcaggctgtccggcaccgttgctgcggtggactctcccccactctcctggtctttgtgtcttgctgttattccatgttgtttgtttcagcgagctccgagctcccattttgttgttgtaatatcacatgttttgtgtaaccaaggtagtgacgctgtggataaataatagacgttatgtgttgtattcttgctgaattgttgttcagctccttctgtttgccctgtatgaactgggcagtttcatgagtaccacaatgtgtatgttgatggctctgtcttcccttgtctcggcaatgtgttttttcttgtatttttgctagaagcaatcttatgagttacgagtactatttaccaccct

SEQ ID NO: 25264 - DNA, 1197 bp, Zea Mays
atggatgacccccgctggcgacgctgcggcggaccgagagggagcgtgccgaagttagtcgatccggagcagggcgtggatgctggagcaggtcgggcgtgtgcatcgacgacgcgaacacggggtggtggtggtggggagggagtgagggaggcgcgtagtgggggcagagctggagaagaagggcagctcgtgttggccaccgaggtatcctcccggagagagggagacgggacgggcgacggcggcgttcgggtcggctccgaagaggatgcaggagcgacgcagcgtgccccttcgaggtcatcgtgcggcgccgtgcaacttccacgcggccacgccatccccacctccgaaaggcacaacccccacgacgcaggagcgctggctccgggcgttcgggtactcggagacggcgttgggagaggagaaccgcaccgcggcgcagacatgggcgagttctgcccctccccgcagggggactccgcgctggcggcgccgcccttgacgctctcctccccgtccccagcaacggcggttaggccgagctacgggagctgcgaccgccgctacgtgaagctggtcttcgacaacctccacgggagcatctccgtagacccgttggccctgcagtttgttgataccgaagagtttcagaggttgcgggacttgaaacaacttggtcttacatatctcgtctatcctggagcggttcacacacgcttcgaacactcattaggtgtatattcgttggctggaaaggctataaataatcttaagacatatcagggagaagaacttggaattgatcatgttgacatgcagactgtaaaacttgcaggtctcttgcatgatatcggacatggacccttcagtcatttgtttgagcatgagtttcttcctcgagttgatcctggctcatcctggtctcatgaagatatgtcagtgctccttttggacagtattgttgacaaacatgcaatagatattgaaaatggttatctcaaaatggtcaaggagatgataactgccagcgctaagcctaccagcacaaaaagtgcaaacgagaagcattttctttatgacattgttgctaatggtcgtaatggtatagatgttgacaagtttgactacgttggccgtgactgcagagcatgtggtcttggctgtaatttccagtattggaggttgttgggc

SEQ ID NO: 25265 - DNA, 1768 bp, Zea Mays
gattgctggcgtcgtggtggccgatacccaatagtgcattcatcccgttcatcactgctggtgatcctgacctggcaaccacatcaaaagcattgaagattctcaattcctgcggttcggatgttatagaggttggcgtaccatactcggatccactggctgatggaccagttattcaggcttctgcaacacgggcgcttaagaaaggcactacactcgattctgtcatagaaatgctgaagggggttacacctgagctttcttgccccattgttcttttcacatactataatccaattctgaaacgtggtgtgggaaacttcatgtcttttatcaaacaagctggcatacatggacttgtagtgcctgatcttcccttggaggagacagcgttgctgaggagcgaggccattatgcacaacatagagctggtgctgcttacaacgccaaccacgccaacagatcggatgaagggaattgcacaagcttcagaaggatttctctatcttgtgagcgctgtaggggttacaggtgcacgctcaaatgtaaacttacgtgtagaacaccttcttagggagatcaagaaggttagtaaactataacctgtttgtcgtcagtaaagagtgaacgagttttaatgcaccagcatggctagagaaatttgcgttcaagaatggttatgagaaaattcctggtatgccatcagattttatactcatcccttgtgtgccactgagtgacatataggtatattttttggtgtctatgacatgtggggccagtggcatacaaatggttatcttcctggctttacaggttacagacaaaccggtagctgttggtttcggtgtatcgactccagagcatgtgaaacagatcgtgggctggggagcggacggtgtgattgttggcagtgcgattgtgaggcagttgtgtgaggctgctactcctgaagagggtctggaaaggctcgaggagtacgccaggagtatgaaggctgctatgccgtgagctgatctcactccccgtcacaggcaaggtaaatagaacatggttttagcaatattctgggcatgggtttggcatccagaactcatcttagtgctgtacgggtcgttctcgggtggtgagaacgaagtctggctttgcctataatagaaaagggttaaactgagttagtgcgacattttgatggaaaagcgagtgattgcgagatatcagttcatgcttattggcagatcctttttttttttttttgctgaaagatggaaatgttagggatgaggttgccctggcctcttgagaggataggaataagagaggataagttcgttatgatttatatggctttccgcttgaaccccaccagctggtgtccatggggatgcgggcagagcagtgtctgattggctgcactgaaaatgacattaccttcagacaattcgccttgctctcttctggttctggagtactactttcgaggtccgtcagactgggtcacaagatgatcccaaacggccccagatgctgggtttttggacaacggaaagtcgattctgacctctgttaatgtcggccactcatgggtcatgaccaagccatgtttatggtcaaatcagtcccggatgctaacacgcttctctaatctctatctacggggactttttccggtgcttatcgtatcattatcatgcatgttactggtagttacatgttgtctgaacagattctttagctctgccatggcagcatgaagtgtatctggatg

SEQ ID NO: 25266 - DNA, 432 bp, Zea Mays
gcttgtggaatcacttccctggatgcttagatagctcgagaaagtcttgcaggatcgcatctattgcttcttgtgctcatcgcagggctgtctagtatcagtggtggcaatatctttagctatattctttctctttgtcttggccttgaccttcacagctttagatgctggtgctgcaccacttgtgtgctctgtagatgttcaggttgatttgagccttctttggatctgtaaaaatgcattcattttagttaaacttcgagagttataccgtttagtaccaacaatttattgatttaaaactgtgagaaaattagatctactcataagccaatttttatgtgaattttcatgcatttgacaaaatcagatatgtttacaggatgtttccctacaagcgaaaatattaaatcagggtcatttgcctttaaa

SEQ ID NO: 25267 - DNA, 1491 bp, Zea Mays
aaaatcaaggagacgacggaaaggaggaagtctaatgtggaagtctctcagaactgagtacttttgttagaacaaagatttgttcagtcaagctttgcaaattatcatcatagtttggatgatatccatggttactttaatgagtttatggagccctggttgcggagcttatctgggttctctgacaatggaactgtaatatttgcaaaagaacctttcttgtattggaagaaagtttcaagaggggttgacaacttataagtgtaagcttgatgacgtgttcatgagggcaaagtgggagagcaaaatttcttcgcatgcagatgtcaacaggttctaaccactatggtgtatttccacatccattctgcaaccaacatgttgtttcgtttcagacgagttcaattactagtgggtcaggagccataccagtttgtctagacacctccagtggaatgaatggcgacatggcaatgttgaacactacatcttcaacaattgtatccactggttcaccaaacatggttgctgattcttcttgccagaacctcaagtatagtgcacccttggctgtggagtggtcctatccagagctgcaattgttgaacgatggcctcaacaagtatgcaaatgaaccaggaatcatgaagtacataaagatagcagccacgttaccagacaagacagttagagatgttgccatgagatgtcaatggatggcagcgagaaaagaagctacaagacgacggaaacctgaagaacgctatcttgggaaaaagataaaagataggaaggacaaaatggctcagccatcatcatggggtaccaatcctcctgttcaggctgagatgagatcttcctcttttatgcctcgtaacgccaaacacaatggatttctctctggagactctcaaattgatcatgaaatgctaaatatattggaagaaaatgctcgactactcaatcaaatagaagtaaatattttaacatctcaggctcataacaacattaatcttttccatcacataagaaggaatattaatggtcttctacaaagcatgtgccagattcccggaataatgagcaagatgcccccattgcctgtttctgtggatgaaaggctagctagctacatactccctcgtgctcatacggttgcgttcttgattaaagataatatccaacgcttcaacttcaatgatgaaaccggatccgacaccagtgatcgtgctatctcatatctttctaggatcttagaaccgggtaccgatacatcaaataatgatatcagaaatctaatttttgggtattcagattcagctatggtcggatataaatgttcgaattcagatacaaattatccatatatcgtttgattggttacctgtactatcccgttctgaaccaccacatgtattaacttttattgagcgtctgtttagttggctacaccggcttcatgatcagatgcaaaataaactattttaagaa

SEQ ID NO: 25268 - DNA, 710 bp, Zea Mays
gaggacgaccggcgggtgggaggcggttgctctcccggcctgtgatgcttcgggtcggcgtcgcactcctcacccccaacttcgtcgacacggtaatggttgctacagttcgatgtgatgaaattgcaaacgagaagtttggatgcataacctcagacacagaatggttggatgtggagagtgctgtccaatctggtccagtacctggttttggaaaaaaacttggcaatatcgtcgacgttcacttgcaagagtatgacaaagaagctgtctattttgatgaagctgtaaggaaaggaaaacgacagcatttggagtccagaatactgaatcttgtccaacctgcattccagaaaatgttgactcatctgcgtgtgaaggctctagaaaaatttaaaactggtcttaattcatctttggagagtggaaaaggattcgcagtatctgctcgagacaatactgaatgctctctcaaagaatttgaacaaggctgtgcagatgctataatcaagcaagcgaactgggactgctctaaaatgctagagaaagttcggcgtgatattgaagatcatgcactttcaattcgtgaaagcaagctatccgaaatgacaagacacgctaaggttatgtatggcaagctgaaagagattttaatcactagcttagcaatgcataattttcttctagatttatttgcatatctgatatta

SEQ ID NO: 25269 - DNA, 7156 bp, Zea Mays
ctgaaatagtctatcagacccatgtacgcgagatctgactgagccttgagcaactatggtgctatttgtttcaattattttttcgagtgcgtagaatgtgatcttggtggcaatttgctatgttgtgatagctgtcctcgtgtttaccacttggaatgcctcaatcctcctcttaagcgtgcaccccctgggaagtggcaatgtccaagatgccgtccgaaaaaagttagcttgaagctgttaggtaatgcagatgttgacacttctaaacgtgaaaaaagtacaaggacatatgcaagtacggcatcagatagtccaccttcgcatacaaaagtctcctttaagaccaggaactccacacaagacaaaactggattaaacgaacaaggaaaagagtcatctggtggcacaatgaatgggggtgaaaccagtacgaagaataatgaagttgagaaaaagaagacactgatattacatttgaagaagcgttcaaccaaggaattgtcagagaacactaaaccctcgaagtcagaatttgttgaactttcagaagagaaaattgtaaaacatggaagtgttttgaaactcaagaaacatccacatcgtatggacttgtctccaagtaaatctaaaaccaggaggcaaagtagccagagagagagtaaaagatctggcacaaaaaagattaaatattccatgtctgatgatgacagtgtttcctcatcagaaccatcgacatctcttgataacagtgaatcaccaccaaaaagaaaacactcagatggaaaagcaccttcatccagtaccaagaaagggaaaaagaaagtgaaatttgttgagaaaaagcactctgaggagcagggcgtggtaggtgacaaaatgatgactacccaggaggatcagcaggtcgatcgcatcctaggctgccggcttcagatgagccaaatcaacccgccgtcccatgcttcattggagcagtttgaatcagctaatctccaggtggatggtatggttcttccacatgcttccgctggcattcctaataggcctcatgatggaacagagtcttctagaaatggtacaattgaggatatatgtgctgatgaatcagccaatcatagtggtcacaatttagaaatgcgaaaggatacggacagtaaatcccatgaaaaggagtcacataagcgagaacaagtcaagaagatattatcagtatgttctggtgatgagaccaatataatgaaagatgatcaagtagtcagagaaaatgtttcagcttccaaaaaaggtgaagatgagacatctgatttgccagcagaaaaggatgataccatacttccagtcaccagagcttgtacaatgatcaggaccaatcaagatcatacagatgaaagtaaacagcatgggaaaatagaacaaataacaaataaggactacaatgatgctggatatgagttcttgatcaaatgggttggaaaatcaaatattcacaacagttgggtttctgaatccgaggtaaaaatattagcaaaaaggaaactagaaaactacaaagcgaagtatggaatgagtttgataaacatttgcaaggaacagtggtgccagccacagcgagttattggtcttcgtgcttctgtagatgaagtggaagaggttttaatcaaatggtgtggtcttccttatgatgaatgcacttgggaaagatcagatgaacctaccctgatgaaatatagccatttggtcactcagttcaagaattttgaatgccaggctttggataaagatgtggtaaaagattatgcaaatgcaaggaaccgacatgagcttaatgtgttagttgatcagccaaaagaacttcagggcggcatgctcttccctcatcaattggaagcgttgaactggctgcggaaatgctggtacaagtcaaaaaatgttatccttgctgatgagatgggtcttggaaagacagtgtcagcttgtgcttttctatcatccctatattgtgaatttaagattaatttgccatgtcttgtcttggttcctctttctacaatgcccaattggatggctgaattttcatcttgggctcctcatttaaatgttgtggagtatcatggttctgcaaggtcaagatctatcattcgccagtatgagtggcatgcgggcgatgcaagccagattggcaaaacaaagagatcgtacaaattcaatgttttgcttaccacttatgaaatggtgcttgttgatgctgcatatcttcgttctgtctcatgggaagttcttatagttgatgagggacatcgcctgaagaattctagcagcaaactctttagtttacttaattcattctcatttcagcacagagttttgttgactggaactcccttacagaacaacattggtgaaatgtataacttattgaacttcttacagcctacttcttttccttctctatcatcatttgaggagaagtttaatgaccttacaacagcagaaaaagtagaggagctgaagaaacttgtagctcctcatatgcttcggagattgaaaaaagatgcaatgcaaaatatccccccaaagatagagcgaatggtacctgttgaattgacatcaatccaggctgaatactaccgtgctatgcttacaaagaactatcaagtactgcgcaacattggaaaaggtggtgcacaccagtctttattgaacatagtaatgcagcttcggaaagtctgcaaccatccctatcttattcctggaactgaacctgaatctggttcacctgagtttctgcatgaaatgcgcataaaagcctcagcaaagctaactttgttgcatttgatgctaaaaatattacacaaggaaggccatcgtgttcttattttctctcagatgacaaaacttcttgacatccttgaagattatctgactttagaatttggccctaaaacatttgaaagagttgatggctcagtatctgtggcggagcgccaggcagcgattgttcgctttaatcaggataagacacgttttgttttcttgctgtctacacggtcatgtggacttggtattaatttggcaactgcagatactgttatcatatatgattcggatttcaacccacatgctgatatacaggcgatgaacagggcacacagaattggacaatcgaacagacttctggtttacaggcttgtagtacgtgctagtgttgaagagcgtatcttgcaattagccaagaagaaattgatgcttgatcaacttttcgttaacaaatcagaatcacagaaagaagtggaagatatcattcgctggggtacagaggaactctttggaaatagtgacagtgtggatggtaaagataacagtgaagtcccaggtcctgttgctgatgttgaatttaagcatagaagaaaaactggtggcctaggtgatgtttatgaggacaaatgtattggtggttctaccaaacttgtttgggatgaaaatgctattttgaagcttcttgatagatcaaaccttccatcatcaatggctgaaagcactgacggggatttggacaatgatatgcttggtactgtgaagtcaatagattggaacgatgagctcaatgacgaccctggtaccaatgaggatactgcacctattgacaatgatggtagcgagcaggcatctgaatcaaagcaaggtgctaccaatcgttcagaagaaaatgaatgggataaacttttgcgtgtcaggtactctgcaatactatgggagcaatatcaaatagaggaggaggcatgtcttggtcgaggcaaacgtttaaggaaggctgtttcttacagagagacattcgcaacacttcctaacgaagctttaagtgaggactctgatgagggagatgaaccaaagagagaatatacagcagctggactggccttgaaggaaaaatatggaaagcttcgagctagacaaaaggaaaggattgctcagcgacacattatcaagaactatgctgatgataatcttgaagagttcatgactccatacgactctattgctaatgaacctgctgaaaatcctttggtaatcgtagaagatctaaattcttcacagctatctggcgcgaaacgtttcagtgactcaactggagaaatgaggcaatcctccaagaaatcaaagagatattctgaaatccctcaagatctttatgccaaaattcctggtaacacagcttcattcaagcaccactcaaaggccactgatgtattcaatccagggaccccaaatcacttgctacctgtacttggcctttgtgctcctaatgctgatcaggtgaactcatacaaaaactcaatttgtgcaccaagcataaaggagcgtaaaagggccagtggtgacattgtcaaacaactgtcaactcctgctgaccattctaatgtgcatagaaacgaagctcaatcagcttctgataaggccatctttcctggtgcatctgaggaggctttgcgaagaataagtaacatgattccagatagttattttcccttcagtcatattcctcctatatcagggaagggggttgatcctgttgaaaatcctggaccctccattgcatcatttcaagggaatctgggtcttccaaacttcagtctggaagacaacgctccacttaagcatattaagcctatacctgatatatttcctagcctgtcactgggtgctcataaggattatattcgtagttctgtcccagagttgccagatggttcattgctgccaaacttcatggcagatattactggtacttcgaagcaaaagtcatttatgtctggtctacttcctgggctgggtcttagcccagggcaaccaatacattcggctatgcctgataatcacaagaaagtcttggacaatataatgatgcgtgctcagtatgcgtcaaacaaattcttgaagaagagatcaaaactagattattggtcagaggatgaacttgatgctctgtggataggagttcgtaggcatggaaggggaaattgggatgctatgcttagagatccaaagctgaagtttttgaacaaccgaactagtgaggagctggccttgaggtggattttggaggagcaaaaaattatagatgaacctatgtctacatccaccaggcgttctaactcagcagcatttcctggaatatctgatgcaatgatgtctcgggcactgaatgaaagtaatttctctaaaatgaggatggagcagcctaaattgcagtcccacttaactgatattcagttaggttcgagtgatatcctatccacatttcctcatgttgacgctgctagttacattaactcaggggagggtggcccatctcaaataccatggcaggattttaagcatagatcaagttatgctggagattttcctgccggtgcatttgacaagttggagaaacctgatgttggaccgatcccgccatttatgccaaatcctttcatgactgacagcattggttcacttcccataaacagaaaaaacaatagttccatcccgcatagtgaaatcaggtcaagttctcgtgagaacattctttctggtgtttcggatggacagatcaacttgcttcatgagatgcagcgtcgtcgtcgtgtgaggtcaggcaaagaacccattgagatgaatctcaaccacatagaccactcaaatctccagcttgataatactagtgaccttggaggtttaaaaccaaacaagttacctcattggcttcaggaggctgtacgtgctccttcatctaagccacctgaacgtgagctaccagcaacagtttcggcaattgctcagtcggtctgccttcttcttggagaacaagaaccatcaatacctccattcttgatcccgggaacacctctttctcgcccaaaagatccaaggattaattcaaagaagaaactccgcaaggctcagcaatctaactctcatgtagagcattcaaaaattggatctggtgagggtgattgtgtcactaccccagcacccccatccattgaagcttcacctgcacttcctgtcgattgcgatgatggtgagccttcactcaacttgaaatctgcatcgttgtcatcttcagctggcagcaaggggctagatgaattacctcccacatttaaagaagcaaaccaaaccgtggatggctcagaagctgttgcggccaagtcagatgctcctgaaattggttgtcaggtacctggttcctctccattacatgacaaaggtagtgaatcctcggggtcgccagtgaaggacactcctgacgctggaatcagattgccaggatcagataactcagttatggcattttctgcactcccacttgttgatgaagcacctgggacaagcagcagagcagctgacacgcctgtgccatgtgatggcaatgagtcgaaagaggatgttccactagacaacgctgaaagcaccaggaaactggagccgaacggatgaactggctcctcttgcgagcatggatgcatcgcatcgagtttctgctaatacagccgacgaagatgggtggatgaaatgatcattagactcgagctagttagctcaacattcctttcttttgcgttcagcataacactgggattttccctctcccaatgtttccagtgttgatctcgtgttgtgtaatgctttagtgcaggtctcgttgcagataggatgaaacgcaaagggctagtggtacttagcagtagttgggcactagtccgtcgggggagcaactcgtggaaacctgtatacaagaaatgtatattttgctaatatggtgctggttgggtgtgtagaaggtagaccgctattcgtttatttatgcgtatatggtttagtaatttgccatctgtctagcggtggctgtaagagtagacgtgatgatgatattgcctagccttgactcgttggcctccatgcctagccgaagagaagctgtgttcatactgacataactgacatactgagcgacttttgactgtttttttttatttcattagcggcaacgaagccaagaaccatgatcttcactcttttgtccccaccccccaaaaaaaaccccggaactctcaactattgttgtgcactgtaatttacctcttcaaattagaaaagtgatgttttg

SEQ ID NO: 25270 - DNA, 1064 bp, Zea Mays
cccgtctatataaggccgcagatgccatgacgactgacgggccaccgatccaagagcgagccgacgacgacgagcagcgagagagatgaggccgtccatcgtgctgttcggggactccatcacggaggaggcgttcggggagggcggctggggcgcgtcgctcgccaaccactactcccgctccgccgacgtcgtgctgcgcggctacagcggctacaacacgcgctgggcggcgcgggtcgctggccgcgccgtggccagcatcgccagtccggtctctgccgtcaccgtcttcttcggcgccaacgacgccgcgctgcccgaccgcgcctgcgcgctccagcacgtgcccctcgccgagtacaaggacaacctccgcgccatcttcgcgctcctcaagaagcggtggccgtcggtggtcgtcatcctcatcacgccgccgcccgtcgacgaggacgggcgtctgcggaatgaatgcaggtacccgtacgcgcacgacttctccggcctgccggaacgcacgaacgcggcggcggcggcgtacgcgcgggcgtgcgtggaggtggcgcggcagtgggggctcagggccatcgacatctggtccaggatgcagaggttccccggctgggagaagtcgttcctgagggacgggcttcacctgacgccgcgcgggaaccgggtgctgttcgaggaggtggtgttcgcgctcaaggacgccaacctcagcctggaggcgctgcccgccgacctgccgctcttcagcgacatcgacccggataacccggtcaagtcgttcgaggaccaggagtgaagaaggcccatgatggcaagacaacggcggcggcttcaagtctgggaactctattgttaattagaaaaaaaattctgggaactgtgtcctacagtgcatggaatgttctggatggatttttttagtcgaagcataattcttggaatagtgtcttacggttagcagtttgctactttgctgtataagtttgttcgaggtccattcttttacccacatttttttataatacaagcaggtttctcggagttccaat

SEQ ID NO: 25271 - DNA, 2050 bp, Zea Mays
aaattggagagggaaaccatgggcctcgatttgttgtaatagatctttcagcgggcccttgtacatatgggaaaatagaaactgaagaaggcagtgtcagctataggtcaatgccacggctgtcacaaataatcttcccaagaggacttgctgccccaagtgctagttcaacgcaagatattttcattgggcagctcggaggtgcaattgcaactaccattgagcatgtgatagctcctgatataagatttgaaactgttgacatggcagtgaggttgcttgtacctattattgtgctacagaaccacaataggtacaacattcttcaagaaggccataactatagtatagatgttcaagctatagaaagggaggttaaaaagatggtccaccctggtcaggaggtaataataatttctggttcgcatgcgctgcaccagcatgaaaagttagctgttgcagtttccaaagcaacacgtagccattctcttcatgaaacaaagagtgatggccggtttcatgtccgtaccaaaacttacttggatggagcaatacttaaagaggaaatggagcggtctgctgatgtgctgtctgctggtctattagaagttgcaaatccttctctctcaagtagattcttcctaaagcagcattggactgatggagaagatgatgtaaaagactctattaagcacaggcccttgtgggaatcttacatgcccaaaaataataaaggaaggagaggaactggaaagaagaaacatggaagtctgtacagaacttatgggaccagagtgatcccagtttttgtattatcactggccggtgtcgatgctgaacttctcatggaagaggagagtcttgtttggacaagtaaagatgttgttattgtgcttgagcataacaatgaaaagattcctctaagctatgtgtcagaaacgactaggcagtttgctcttccatctatcgcacagcgccacatcttggctggtctggcatcagcagttggcggtctgagtgcaccatatgaaagagcatcacgtattcatgaaagacatgtagtgaactggctgtgggctgcaggctgtcatccgtttggaccattctcgaactcctcacagatcagtcaaattcttcaggatgtagcactgagaactacaatttatgctcaagtcgatgctgctcttcgcaaaataagagacacatcagagtttgtccaatcttttgcatcagagcatcttaagacgccattaggagaacttgtgaaaggtaataaaaacaagtccaccactgagttatgggtagagaaattctataagaaggtaaccaatctaccggagccttttccccatgatcttgttgagaagttagaagaatacctggataaacttgaagggcaactcgtggacttgtcttccttattgtatgaccaccggctggtcgatgcatatcaaaacagtaccgatatcctgcaaagcactatttttacacaacagtatgtggaacgtgttctagctaacgagagagacaagatgaaatgctgtagcattgaatatagtcatccaaagcagtcatcccaggcttttgtctatggagggatccttctggctggatttcttgtgtattcactggttattttcttctcttcacctgttcgctaattttatgtccagatgcagaaagtcttggatgctttatggtaggctaggtttgtctggggctgtcaatcttcatgagggaatggcctgaactgtcttggatacagaagggctttggcacagttttagtgctctatttctcgacacacaagcaatcagacggctgatatatatgtaactgattcttgtctgcgataaactatagtcgatttcacagaagagctggtgcatgctatgaaaatatgaaatactttcatcccattttgcaacttgttactgcagaactgcacataacaccactgacagaaacccccgtttgttaataagccccccagcttcatgaggaccagccagcagacatgtggccttggactggtgcaaggacgtagtcg

SEQ ID NO: 25272 - DNA, 4991 bp, Zea Mays
cccaaccccacttcccgtttttcatgcgcgtgagggggtgtggtgttcttccgttcggttagctcgtagccgccgccgtccgtagttccctctccgcgcgtggccgccggtcccgcggcttcctcctcccgtgcgtggctgtggcgccggtcccgcggcttcctcctgagcgggcctgctcttcccgtcaggcctccgcacccacggccggatctcttcctctcgtctccacggccgccttcctaggacagccgttgcccgcgcggtgcccgcagccgcctcgtcggcgcaacgctctcttcctccccagtccctccatcggaaccaccctaagcttccttagcccattcggttctaccgaaagaatccccatcctctgtcgcgtccgccacctcctctgcggcttaccagccggactcctcaagcctcccgcttagccccctcgccggtgatggccgcggccccgccggtagccggagaagatattaaagacggcgttgaggtgtgcctgttcgatgaatcagcagatgggttctcgagaactgtgcgcgccatctcggagctcgtcgacatagagcccgaaacagacttccctgaggcggaagttgagcggctctcctcctcaataacgttcctcagagaatggaggcacttctcgtatgagccaaaaagtgtaacattcactaatggcaccgagtccacttcatatagagatgacatgcacagtgtaactttaccacagttttcatctgcttctgttccccagctttgattttattctatatgcgggggggaatgtctgggccttggactggtgccctaggttgtgcgacaagcctgactcttctataaactgtgagtatcttgctgtttctgcgcatcctcctggttcttcttaccataaacttggcatgcccttaaccgggagaggtatcattcaagtttggtgtctgttagcaccatttgaagattcacattctcaccagccagtgaatgcattcaataatggtaagcaaagaggaaggcctagaaaaataccttgtagtgataagctggtacctgttccaaaaggaccaagggggaggccaaaaaagagatcttacgatgatcagttagaacctgttccgaaaagaccaaggggcagaccaagaaagtatccattaccagttgcaaaatttgaaggttcatctcaaaacggtgaaagtcaggatattattctttttgatcccctttctacttcaagttttattccagatgacctttcattggcttctgtcatgccaactgaaaagtctgtgcaatcaacacctaaaagaggtagagggcgacctaggaaaaacccaagtgacaaactgacagactcatctggtattgtatcagaagatgtgtgtacagccctacctccaacaactgcaatctctacaaaacctaaaagaccacgggggaggcctcgaaaatatccaattccaatgaatgatggatctgtttcaggcgctgatgttgaattagggaaagagacaacttgtcagactgcttcatttggctgcagtttggaccacactgcttgcacagagtttaatgccaagttatgtattgttgcagttgatgcagcattgccacctattgacaaactgacctgttcacctggtactgtatcaggagatgtgtgtacagccccaactctaacaactgcaatctgtacaaaacctaagagaccacgggggagacctcgaaagtatccagttcaaatcaatggtagatctgtttcaggcactgttgctgaattaggacaagagtcaacttgtcagccagtttcatttggccacactgtttgcacagagtttaatgctaatttaagtattgttccagttgatgcagcattgccaattgtcgacaaactgtgcagttcatctggtactgtagtaaaagaaagtgtgtgtaccgaaccatctccagcaactgcaactcgtaagcaaccaaagagaacacgggggatgcctcgaaagtattcagacactatgattgacctggggaaagatacaactggtcatcctgttttatttggacgcagtatggatcacactgcttgcacagagtctaactctagttttagcattgttgcagttgatgcatcatcactgtttgcatcttcatctactgcaacttgtgatgataagtcaaaagatgattctgaactgcctatccacatttcacctaaatcaagtaataaaagagagtcaagtggcaggaggggaagaggaaggcctaaaacgataccactttctgctggaactggtcattttgtggcttctgttgccagtctcccaaagacaacctgtgtactgactagttcaagcaatctcacgtcgttgaacaagagtggtggcaaatttatagtaagtagcgttagttcatgtggctgtgatgttgagaaatgcagtgttcattcaggtgttttgttgtctgatgatgcaccaccagcacatggcttacaaaatacaaattgtaaggaagaatcgaataccaaaataggaaaagcgggatctagaaataagcctgttgcagttgagcacaatcattttactgatcttaatgtaaaagaacaaaaagtgcagacaactccaatgtcaggtgatcctgtgatcttggttgaaaattgtatggaaggacaaggccccagaaaggctggggggcaacttcaaaggatacctgcttcaaacaagagtagtggcgcatctgttggtggtggaacatataaaatagagacattatccacaccaatgactaaaggatcatctaaaaataatgacatggcttatggggctggtttgaatcagtctcagaatgcaattgttggttgtgaaggcatggaagttattgaaagcaacactgccaattatacttctcattgtaatgaaaatgcacgagcaaatcaagttgcacccagtttcaagaacagtgatagggtcattgatgaaacggaagctgcggaacttgggccactcaaggaaccaagggaagatgacaatttgtttacttgtgtaaactcaaactcagcttcaattacaagtgacattgctcaaccaagagttgtcttgtgtttagctcacaacggcaaagtcgcttgggacatcaaatggaagcctcctttactaagtcaacctgaacagaaatcacgacttggttttcttgcagtattgttggggaatggcgctcttgaagtgtgggaagttccatcaccatgtatgatccagaaaatatattccccctctaaggtggagggttctgaccctcgttttctaaagctccaacctgtatttaggtgtgtcaaagtgaagtgcaggaacaggcaaagttgattggtcaccttctcctcctcatgatatgatattggcgggttgtcatgatggaacggttgctttatggaacttctcgatgaatttgccaacacaagattcaaaaccttttatgtgtgtcactgctgattctgttcccattagagctctctcttgggcaccatatataagtgaagaaagcacagatacctttgtcactgctggagaggatggtctaaagttctgggatttaagagatccataccatcctctttgggagctaactactgctccaagggctgtattaagtcttcattggctaaaagatggaagggggatcattatctcactggaagatggtacattgaagtttctaagcttgcctcggattgcaaatgatgttccagccactggaaggccattttccggaacaaaaactcagggtgttgcaacttatcagttgtcagaatatttgatttggagtgtccatgcttcagaacctacaggttgtgtggcttactgtggggcagatggtactgctgtgtacttccagctaaaatcgagattctgggataaggagcctgggcgtaaccgtgttccttatttcctctgtggatcattatcagaggatggagaaaatattaagattggcagcaggctgcaaacatctccattaccaaatgtgcctgtggggaccaaaaagggttcaaaaccatcccaaagtatagttcaggcgcttgctacaagcgatgtcactagcctgctgacatatcagctcaactcccccacaggaaacaatgatgccgtaaatctagaagctcatgatgatcaagatgatggacgcagcaaagagcaaggagcaggtgctgtaaatcaagaacttgatggtgaacaagatgatggacaccgtgaagaacaagcagcaggcatggtaaccacagaatttggcgatgatcaagccgatggacacagcgaagaacaaggagctggtgcaataatctcagccactcctgcaaaggaagagaatgatggaacatggaacgacaagggtgttcaatcccctaaagaccttaatgtcgtccctccgaattctgtcgctttgaatcaagtgcggtggaacatgaacaagggtagccagagatggctgtgctatggaggtgctgcaggcatcatacgatgccagagaatctgaagagccgcaatctggaatgctcttcgagaaacagaggcttgtcacacagatggtgaacatgatgcattcgggaggaaataataaatgccatagtgctcgagattctggtttcctgatgtggttcctggacgctgacatgctattgtactgagttgtatcgaatttcgtgatgtgatcatgtgatttatggtcgctgacactattctacacccgcttcgtctcggaacaaagttaattgaactatatcccatcacgacactcgagtcttctgagcgcttagcgtctctctcaaatagatcaggtttctttgcaagctacctgttctgagctaggccttctaaatttatgcaacaatgaccgttacgcttgttcaacgctatatttagattctagatttcttctagccttctaaaaggaacgctcactctcacaatcccctcttcgtctaccaaaagctacgtagg

SEQ ID NO: 25273 - DNA, 2183 bp, Zea Mays
gggtgccaaccatcgagttgagccttagcgtgtacagtacactgcccaacatagcaaaacataagcaggctcgaccgcttgcaagtccgcctaaaccaatcatcaaaaacagctggagtggtttcttcattgatctatgcgactgcacggcacacaggtgcacgacgaaaaaaaaaacagaaaagactaacattttttttttgttactccgctccggtagtacccaatatacatggacatgaacgaatggaattcacgttacatatcagctactcccttgtggcaaaccaatcctgcagaagcaagagggatcagtcgaccatgtcctcgagcacgacggtggcgagcggcgggtgcgcgtaggggcccttgacccaggtgttggcgatgaagcggtagggcgcctcggtgaggtggatgccgtcccagctgacgtgcgcgtcggggtcctcgcaggtggtggcgccagggagcccgcacgacgcgctcacgttgtagttgtacggcccgccgccgccgcagcacgcccgcagagcgccgcgcttgtagcctgtatttacgagttgagtacaatcaggtccgatgcgcgtcctccacccaccacccctagcaaattttcgggaggacagatagcttgtcgtggcgtggcagcacggtgccaagttggtcctggtggccattcgggccgtatatggaaggatccatggacggggtggagtggagtggaggtggagccaagccgagggggggacgggagatgggcgttcggtacgccgtgctgctagcacaggctgtgccaggatctgctctgctgtgcgggttggtgaactcaactcccgctcacactcacaccaatgttgctctggcaatccctgacacacctcgccagcgtaggccatgaccctagctctctctcccgtcccctggctgtggctggcgtacgagcgtcccccgcgacaggcgggagggagaattcacgcgattgttcggttggtcggtcagtgattagtggtggaccaggaccagtgctctgctcgtggcagaggcccagagcagcaaagcagagcagagcagagcagatagatcttcctggtcctatgagagaagagaagagaaaagaagagaatagaatcaaatcaaaacgatcgaagaagcgactgaccgtagaggtgcggtgtgcgcgcgaactgtatgtagggcgtgtagtagtcggcgtagacgacgcgggactccgggcggcggcgctgcaggcggtcgagtgcgacgcggagcatggcgttgtggtagagcgcgacgctgttgtacttcttgaggcagccggtgcgcgggtcgtactcggagcggtcctcggacgggtacatggtgagcgtgatggggatgcatccggcggggaggttgcccggcaccacgacgtggcgggcgccctcgtccagcagccgctccacgccgcccaccagcgacgccaccaccgccggcaccatcgtcttcaccttctccagcgaccagtccgccttccacgcgaagctgtagtcgttgccgccgaactcgccgaacacgaacagggccctcccgaacagggcgcggcacgcggcggggtcgtcggggcagatgctgcgcttcacctcctggaaccactccagctgcacgcccatggacgtgttgaagggcgggatgctccacacgttgttgtccttgaagtacttgaggtccagcgccgtcgcgcccatcaccgcgaagttggcgccctggctgaagttggtgcccttgttcgccgacggagggagcagcgggagaccgaacgcctcggctgcggaagtcgatcacgaggcggccgttggagcacctcgcgtacggcggcgggaacttgggcatgttgggcagcttgcccgagttgatgatgacgaagttgcccgtgtcggagaaggagtcgccgaagctgaagatggcattgtagtactgctgcagcggctcgcccgacgccgcgcctgccaggaacaggagcaccgccggcagccacgccggcggcaccaccgccgagaagcccctcctccgcgccatggccggccgccactaagtacgcaccaaccacaacggaagggaaaccaaccggcagtgtgagtggttgtgtgaaagagagagagagagagggtaaggcgaaaggcaggcaagggctgctgctatgc

SEQ ID NO: 25274 - DNA, 927 bp, Zea Mays
cgtcactgatgctgccgttcagctttacattcgatgaagattcttctagttccagaaggctatatagatggaaaagggtattgctcaaagtaagtggggaagctcttgccgggaatcacacagaaaacatcgacccaaagattacaatggctattgcaagagaagttgcttctgtcaccaaactaggtgtagaggtgccctcctgtcttttatttcattattgattacatcttgtattacttggttcaaggtttagaattgatgaagtaaagagtgctagtacatctttttaatagtaggcattatctcaatggctcaattctgttgcattcctatcaagtgcttttggatgtgtatttgtgtgtgtgtgatttaccttttgttttctctaaagcaatcgcatgatgtgcattaaaaaatgtgagagcccttgcaggttgctattgttgttggcggtggcaatatcttccgtggggcctcttgggctggatgtagtgggcttgaccgctcatctgcggattacatcggcatgctggccactgtgatgaatgctatatttcttcaagcgacgatggagagcatcggaataccgacccgtgtccagactgccttccgtatgtcagaagttgcagaaccatacatacgccgaagagctgtcagacatttagagaaaggaagagatgcaagagttgggggggctccctcttctcttattcagtttttatatatacatatgaggtttagggttgggggctggtgctggaattagattagattagctatcaaaatcctgataatagttgtaaccgtgaaataagacacttggacgaaattaaaattttcctgcaaagtgctattgttctgtgtacctaaagatcaattttgctggctcccggacagtgaacaacgatgtgcacgtgcttgata

SEQ ID NO: 25275 - DNA, 2461 bp, Zea Mays
acgcgagtgatctccactggcataccccgcctgcgaagaaggacgcttctgaagttaagcgaagcaaggttgagataatcaaggaaaagagcaacttcctccggtaccctttgaacgaggagttggtctcagaggccccaaatatcaacgagagtgctgttcagctgatcaagtttcatggaagctaccagcaaactgaccgagatgtccgtgggcagaagaattactcgtttatgctccggacaaagaacccttgtgggaaagttccaaaccaactttatttagctatggatacactagctgatgagtttggcatcggaacactccgcctgacgaccaggcagacattccagttgcacggtgttcttaagaagaacttgaagactgttctaagcactgtcataaagaatatgggctcaacattgggtgcttgtggcgatctcaacaggaatgtacttgctcctgcagcgccttttgtcaaaaaagatatcctttttgctcaacaaacagcagagaacattgcagcactccttacaccacagtccggggcttattatgacctgtgggtggatggcgagaagataatgtcagctgaagagcctcctgaggtgacaaaagcccgcaatgacaactcgcatggaacgaacttccctgactctccggaaccaatctatggcacccagtatctaccaaggaagttcaaggttgcagttaccgcggctggtgataactctgttgatattctgaccaatgacatcggtgttgttgttgtttcagatgatgcaggagaacctattggctttaacatctatgttggtggtggcatgggaaggacacaccgagtggaaactacattccctcggctggctgatccattgggttatgttccaaaagaagatatattatatgctataaaggccatcgtcgtcacacagagggaaaatggaagaagggatgaccgcaagtatagtaggatgaagtatttgattgaccgttggggaatagataggtttcgggctgaagttgaaaaatattacgggaagaagtttgaaagtttccgaccattgccagagtggcagtttaacagctaccttggctggcaagaacagggtgatgggaaattattctatggagtgcatgttgataatggtcgtgttggtgggcaagcaaagaaaactctacgagagataattgagaagtataatttggatgttagtattaccccaaaccaaaatcttattttatgtgggattgatcaagcgtggagagaacccataactacagctcttgcacaagctggcctgctggaaccgaaggatgtcgaccccctgaatttaactgccatggcatgccctgccttgccactgtgccctttggcacaaacagaagctgaacgggggatcttacccattcttaaacgaattagagcagtcttcaataaggttggtatcaaggattcggagtctgtggttgtgaggataactggatgccctaatggatgcgctagaccatatatggcagagcttggttttgttggtgatggcccaaaaagttaccagatctggctgggtggaacaccaaaccagagtacgctagcagaatcatttatggacaaagtgaagcttgatgacatcgagaaggttttggaacctctctttacctattggaatggcacacgccaggaaggcgaatcttttggaagcttcacaaaccgaacaggattcgacaaattgaaagaggtagtgaataagtgggcagagtcaccatcagccgcatgaagatttcgctttcgttggataaaatcccaggctcgcagcacaattttggccacgggattaattatatgacgaaggaaatccagataagccgagaaatggaaaaaggaagactcgggttgtgagttgctatgtttgttgggttgagtgatcgaatttttttgtgtgtgctctcaaggagacctctgtgaacttgaataaactccacacggagttgtgccaaattagaccgaggcgtccgtgaacttgaatcagttcctcgggatgttgtgcctgagaataaatcccaccgaggcgtctgtgaacttaattcaattcgtcaggaagctgtgccttagaataaattcgacgggtgtccaattttcttgtcattctagcgagatgcctcatgccctcatgattggaacgaagtgaggcccttgtgtggtcggttgagaaactgggacatgggttgtgagcgctattttcaagtcgtctgattaaaacagtcgtccaattagtcagtggttaatcgtccaagtcgatttgaactaattacaattaattgtctaattcggtcagccataacgatcagcaagtccttagacttgaaaataatggttgtgggacgtgcttttaaaaccttagtacgaaagggtaatactccatatgtatgattggaacgaaagttcttggaacaaggaaca

SEQ ID NO: 25276 - DNA, 1366 bp, Zea Mays
ccgcctcctcccctactccggccgcagccgccgacgtcgccattcgcattctgcggcgccaatcgataggggtcagcgagtggctgggatggcgtcgtcggcgtccgcgccagcgtccacgggcccgcgctacgccccgccggatccgacgctgcccaagccgtggagggggctaatcgacggcaacacggggtacctctacttctggaacccggagacaaaggttacgcagtacgagcgtcccgtcgctgccgtgcccgccccccaatcgcagccgcttgtctactccaggcccgatgatgtgccgagaagcagcgcacctgccgagcgctcggaagctgcggtgagccgcccgcaatttgtgcctccctccgataacaggacaaggattgatcactcagagtcaagctctgcatctggagtgaacctttcacaaagtgctctgtccaccaatcaagtttctcagtatgccaatgggagccaaatgtcaacagaagcatatcgtgccaagcatgagattactatcgtcggcaatgaggcacctgcaccattcatgacatttcaatccacaggcttcccatcagagattctaagggaggttctgcaagcaggattctctgcaccaactcctatccaagctcaatcatggccaattgctctaaggggtcgtgatatagtagctgtggcgaagacagggaattggcgacacaaattcaagatgaagcaatcaagtttggcagatcttcaagaatatcttctacttgcttatatggaggtgctccaaaaggccctcagctaagagagttggagcgtggtgctgacattgttgtcgcaactcctgggagattaaatgacattttggaaatgaatagagtgagcctgcaccaagtatcatatcttgtccttgatgaagccgaccgtatgcttgatatgggatttgagccacaaataaggaaaattgtgaaacaaataccaccgaaacggcaaactcttatgtatactgccacatggccaagagaggttagaaaaatagcgtctgatttactggctaacccagttcaagttaacattggaaacactgatcagctagttgcaaataagtcaattacacagcatgtggaagttatcccacatatggagaaatcaagacgacttgatcagatcttgcgctcacaagatcctggatcaaaaagcataatattttgctccactaagaggatgtgtgatcagttagctcgaaacctatcacggcagtatcgtgcttctgctattcatggtgataaatcacaggctgagagggattctgtgttgaatgactttcgaagcggcaggtgtccagtacttgtagccactgatgtggccgctc

SEQ ID NO: 25277 - DNA, 1860 bp, Zea Mays
tccatgactgttctggaagctccaagcgttggcgaaaaaagtaagatatttctgcgaggcaaggaatccctcccccgcttctactctttcggttcgccggttcgccgtctcgcacacccacttcctacaccgccaccgagcactcgctcagtttcatacccatcctcgaagtcgcctctgtctagttcctgctcttccaccaccgcctgtgatgtatccccgaggcccggatgggggacgagatgcctcgtctcgccctatgcttgccactcccgccggcaacgacacgcgcgaggaggatgagatcaccaccgcggaggctcatgtggagaaagacgccgcgcggatggacgctgccctcctcatgcggactacgcccaagatggacgagtttcacaccgggggcgatctggactcaagtggaagtggaagcggcatctcggggccaagcgcctccaaaagacagctacaaagaaggggatcgtggcggcaacgagtcagcagcaacagagaagaatgtggtcgtggctgtaatgggtcagcaggtacaccatccacgctcatcatttcctttgtgtttctgtttgatctatttttttaaaatttctttatcagtttgattagcatccacttgcatccgctcatagtttgattcgtgttcgttggatgggcctcaaaattaccagttgcttcgactacactctctgaatttcgcagatcaagataaaacccgacacaaaggaatgaatagcacacaaaaaatcacagtattatttagtcatattggacacgaataagttaaatttcttaaattttagatccacatttttgtattttggtctagactatcaaaaaaatcctagaaatgtccctctgcctctcgcgcgtgaattctcctctgccgaagggaagacactcaaaggcgagctactgatcttcaactgcttttctggattctctttgcaatatgctttgttggggctagatctgaaatcaatgtttttaataatctagcacaaataggaaatgttgcatgtgttgccgacagaaccatctcactctctctttagtttctgcaattttttggacgaccgagaggtgctgccgtttatgagtaactttccagtgggaaaacagtatgccacaacatcatggtcagagtttggacattgcatgaagcacttgctggacaattgagaagaactcatgcctacttgcaggcatcatctcaaccatacaatgggattcattgaaatatcaggagggttgttgtacacgtgagtggaggtcgaacccttcttgtagggctcttaatgtatgaagtacgccatgctagctattgaatcaagttcaatgggattcgttaaaatataaggagggttgttgtacaagtgagacaaggtcagcccttcttgcagggctcttaatataagcctgtactacacgttcatccacgtcgagctcgtcggctcccaacgcaaccccttcttctctcacgagatcagtggtgaggacgacactggggatagagacctagggttctccaagtgggcctagaaactccatggcaacgtctcaggtttcatgcagttctctaaatttattttgctcgattgtaagggaactgtgtcctctataagctcgcgctcgtgctgtaccgggagtaccccttcttcctgcaagtctggttcaattaaaaaattttgttctgtcgtgttgtaaagtacttggcgagctatgatatgtcattaccttagtgagaagactgcttctaatatattagtaatttttagctgtgcagatcatgtcatcatataaatgttgcaaacattataaaatagaggatccatttgaactctt

SEQ ID NO: 25278 - DNA, 2312 bp, Zea Mays
ccttcccctgcttcgtcctcgtttctcctcgaacccacccagcagcgccttcttccttcttcccgcccaacctcggccatgcccgtagcggcgctccgtcctcccccggtcgctgtcggcgcgggacgccgcagcgcccgactccaggcgcggttcgccctccgcgcgagctccctcgaggcgtcggcggcagtgacggtgacagtgaacgggtctgcagaggccgcggtggagaggaaggagaaggtgcaggaggataaggacaacgagggactgccggtgaaggaggagcaggagagggggctggaggtcctctacgacgacggcttcggctccgtgaccgtcaaggactacttcgcggcggccaaggtcctgtgccgggacgacggtgggccgccgcgctggttctctcccgtcgagtgcggccacccggccgtggaccaagcgccgctgctgctcttcttgccaggaatggatggcgtcggcacgggactcatcctgcaccacaagtctttggagtgttcgaggttcggtgcttgcatataccagtcaatgatcgtacaccatttgaaggactagtacaaatcgttgaaaatttgatcaagcacgagcatgatttatccccggacagaccgatatatcttgtcggagattcatttggcggatccctggcactggcagtggcagctcgtaatccgcagattgatttggttctcatactagtaaacccagctacatcatttgcaaagactccattgcagccagtattgcctctactggaatcagtgccaagcgagtttcatgctacagtgccgtatcttctcagttttgtcatgggtgacccactgaagatggctgcagttagcattgaaaacaacctatctcctccagaaactctgcagaaattgtcagacagtctcacatcaatgcttcctttgctttcagaactgtctgatattataccaagggatactcttctatggaagctcaaacttctcaaggcaggagcagcctatgcaaattctcgtctccatgccgtgcaagccgaggttctacttcttgccagtggtaaggacaatcttctaccaagcggagaagaagcggatcgactcttcaaggcactgaaaaactgcagagttcgatacttcaaggacaatggccatacactactgctggaggatggcgtcaacctgttaactgtcataaaaggagcgaacatgtatcggcgtggaaggcaaagggattctgtaaccgattatctcccgcctactctaagtgaattcaggcaaacatttgatgtggatcacaggctgttccaccttgcactgagcccagtcatgatgtccaccctgaaggatgggaaaatcgtccgcgggcttgccggtgtccctgacaaaggcccagtcttgttcgtgggctaccacgcgctcatgggcattgagctgagtcctctgtacgaggagttcctgagggagaagaggacagtcgtccgcggcatggcgcacccgttcctgtttgggaaaaagttgttccagaggaaccaatttgttctgctctaccccggcggcgttcgggaagctctgcacaggaagggtgaagagtataagttgttctggccagatcagccagaattcgtaaggatggcggcgcgctttggtgtaactatcataccctttgggtgtgttggagaagacgacgttctcgagttggttctggactacaacgatcagaagaacattcccgggctccgggaatggatacagtcgatcaacaaagaagccgagagagtgagggacagcgtaaaaggagaggatgggaaccaggacatgtacctgccagctcttctcccaaaagtgcctggccgattctactacctgttcgggcagccgattgagatgaaagggatgggcaaccttgtcagagataggaagagcgcgaacgaggtgtatctacgcatcaaatcgcaggtggaggagatcatgtcgtatctcaagaggaagagggaggaagacccttacaggagcctaccgcagcgtgcactgtaccaggcaacatggggcgcctccgctcaggtccccacttttgagccatgaagattgggagtagggaagggcgtctgcgagcggactgcaattctttgacaagatgcaatgcgttctcatttctgaggagatctccctccctcatacgctgattacatatacggactacggactagtataccgcaaatattgtacatttttaggaaaaatatgaaatgatgtttttaaacaaaaaaaacgcactcagcacattatcttaaaacagatgcg

SEQ ID NO: 25279 - DNA, 1133 bp, Zea Mays
gcccagtgttcggtcagtgaggcagcaggaccattgtgtttactgaagcagcttagttcatgttcctgtcatgggtatggaacatttcatcagttctgcaaacctttcagcaggtttcacatcgtatggaaatgaagcagcagaggaaatgaaaaaactacgaggtctaagattggaaacactgatggaaacctgccaaaacacagaaagcagagatgtagcgatcaggtgtccaataccatgcaaaagcagcaggtacaatccagctctctgatctggtctggaagttatgttactattgtacttctaaatttgcataagcaatcacacactttgcatgttctgatgtttcttgtactgatctcatgagtcaaggcggtatagggaacatgacttgagagctgcacaagatctttctgaattcattgtgagtaaggttcgtttctgtacagttgtttcatcaaactggcgcctgtatactgtcgtttctcaaatgtgcttccacttccatttaatctatcgcctttattaaaaaatttctttttctttcttggtttctttctcttttcttgaggtgattttgttgcaaatttttagcacagttaaattgaaatttatttggaattaaactaatgcttctgttgtgggaccttgcaatctgcaggcttcacctccatactttatgggatctccaccacttcgtgcaaccaatcctcttgctcatgatgcacaattctgtgcgtggaaggtgcacagcgtagatcagtcactaggaattcctataccagccaagagttacaatgctcgctactatgcaaggaaagaatcttttaggaaggcttgaagctactttttgtcaagttcatgatcgtcagtgatgtcatagtcgtatctccgcttctctcagcaaggctaacttgtttacttgtatatgagtggctgtcccttttgaaggtgtgagttgtcttatttgagtgtttagagtatctcatccctagtgttgtaaatatatttctttgctcattttttgttagtggagctagttttggtgaataagtactggtataaagtataaacagtgttgctgagtaatgaggtaatctgaatgaaaatgtttgccattcttcagtttc

SEQ ID NO: 25280 - DNA, 1781 bp, Zea Mays
tgcttgcttgctggttctaattttccaagacgacgagatatttcactgttacgttgagggtaatagatgaatcatacaagtctggaatatctgtaactttttttgctgacagcactgcactattgccttgtgtgaagtcgtgtggagatgtgatcagtctccataacgtcgtggcaaaacgtatactgaatgcagtccatatcagacttctataagatatcatgacagcgaacacgacaaagattttttaaatcagatgagaacgtggctccctcaaggtctgaaggatttcacttcaaataattccgaattgtatttaatgaatttgaagtccgattctacttttgatctagtatgcaaggtttttcatgtacatgtggagaacaacaattcaatattttatgtttgggatggaactgatacccctgcagctgagtttccagcaatgtaagattttagatttgttttgcaattttttgtaataactaagaaaaacatctatgaaatataagatggtgttttagtgttttccaaatactaatgcagcttttaatttttgtttggttgtttttacttggtgcactgaacataagcatagtttggatgctgaggcagccaaatcactctctctacatgaaggcccccctctatccagggagattttatgtacaatgccagatttcggaactgtcctaaggattttttcagatagatttgtcaataaagtatcatatatgcaaaagaacatatattgggccaggttctggaacattacttgcaaacaaaactttggcatttggaaaggtactttctcggactccggtggagttcgcctattatcaaacaaagatgatagcgttgttgatcgtctaaagatgtatgacagccgcatcgccaaccgagttcgtcgtcggccgatggcaagcatcccctccagtgttactgatgtagaatacgaggatgcaggttacgcttcattaatgaagtctttaactcatcatgatgtgacgcacaaattgagaaccttggtccgtgttgtggcagcacatccatgtgaagctagtttgctttcaactggtaactgtcatcttcggttgactcttgaggatcctacagcgagaattcatgcgtatgtccacaagaatgatttggtcggattctttggtggtggttttttgacagcagaagtgatagtaaaaaagatgaacatggtactgggcatcccggaaccacaaggcagcgtggaagttgccccctcgaccaggaatccaccttggatatggtgttgcttgatgtcatactatatggacaaaaacgatccctgggtcagcagaaagtaccggatctatagcacagccatcagggattgagcagagggatgctgctggaatgtgcaggaacaaacttgtaaatgaatgggacagatgctgtgtagtattggcatcttgcttgtagaagaggccatatgcttttgcaggtgcaatcagtgaatcattccatactgaacactgagaatagcacctcgggttcattctgtatgtgcctacactctagattgtcttttgggtgctcatcacgaaacgtgagcatatcttttggaaacagagacctgcgtttgattcctgtgcttgttatgttgtgattgatcattggggggaggttgagcttttgagccagtataaaaatactgaccggaccatcaatattattgatcattgggagtatgagtttttggacggtttctatttctgtattggtagatataaattttttttatccga

SEQ ID NO: 25281 - DNA, 2150 bp, Zea Mays
acatgagcgatgacgagcactcgtcgggcggcaaggagagaaggggatcatcactctaaatgatcattcaggaggtcaagctgcttctgatgctcaaagaagtccagaggcagtctctgccagacaattagctgccgtaccatcagatcaagttgctggcccagtcaagagaagtccggagccaccggagcaggaatttgttggtatggttgatcattcactcgagcacagttcttacgaccggaaacaaactgccagcgaaagcgatcagtcatatgaaatagtatttgatgacaaaagaaggccgcagcgtgcagagacaggatttcttgtttgggaagagatcgtcaccagaaacgatcaaccgcccctagggccccatgctgatgagcaaggcctggatacagcagaggaagagtatgtgggcacaggtgatcagccacatggtgcagtttctgatgagaagagcggtgcagagactccggagcaagaattcagccttaccgaccaccgaaacgtagcagttcctgacgccaggaacatctcggagaccagagaagatgaggaacaagccagtgcagatgatcattcggacaatgcagtcaccgggaaggcaaaggtatatgacgaagacggggaggaccgggaagcgaggtggaaggatctgacagacgaggaggaggacgagctggagtcgctgtgggagcaccaggatctggtagagcagctgaagctcgagctgaaaaaggttcggtcgtcggtcgggctgcccacgatcctcgaggagtcggacacaccaaaggctccggtggaggacctcaagccatggagtatggatgctaagttccttcgcgaggaccccatggacgagctgaacaagttctacaagagctacagggagaggatgaggaagttggacattttgtgctaccagaagatgtacgcaatagatttcctacagctcagagggtcccagcagtccaacaacaacaacaacaactctgtaaagtccttgtcgcctacggtggcgtccatcctgtcgcataacttccggtcatcgcgccggagatctcccgaggacccgtcggaacggttcctcagggagctccgctacgacctggagacggtgtacgtcgggcagatgtgcctgtcgtgggagttcctccggtggcagtacgagcaggcgcgcgacctcccggagtccgactcctaccacagccaccagtacaaccaggtggccggcgagttccagcagttccaggtcgtggtgcagaggttcgtggaggacgagtcgttcaaaggccctaggctgtcgaactacatcaacaaccggtgcgtcctccgcaacctgctgcaggtgcccgtgatcaaagacgcgctgaccgtagcaatgcatgcacttccgggctgttgtgtagaggacagcctgaaggacaggatggaggaccagcgcaaggggaactacgtgataaccagcgaggagctggaggacgtcatggaagaggcgatgcacgtcctgtgggagttcatcaaggccgacagggccgagacgacgacgacggcggcggcggcatcggtgctcaagggcctgtcgagcagcaacgtcgagctccaggaccctctggatcatggcctcatggcgcacatccattccgcgttacagaagaaagagaagaggctcaaggacctgctcaggacgggcaactgcatcgcgaagaagtttaagaagcccaaggaggacaggtccaaccagaacctcttcttctcgcaggtggacatgaagctggtggcgcgggtgctgaggatgcccaggatcaccagcgagcagctgcagtggtgcagggccaagctcgacaagatcgtactggtagataggaagatccacagggaggcttcatttttgttgtttccctgctgagagagagagagagagagtacagcatatatgttttcttctttttctcttgttcccttttgctcgatgaaaccagtccacgagtatagggtttctttagccttttggcaatccagtcttttacgcatgtctgtccatagttaccctgaaattacatccaccgcaatgtacatgcatactccattgcctcttcagtagaatgaaccgtcttcttttctgtcgctgaacaccgccg

SEQ ID NO: 25282 - DNA, 1502 bp, Zea Mays
ggtctcgccaccctccgcggctccccctacaaaccgtaaccgcgacgcgaaccggccccaccgcaaccaccccccacctcctccctcgcgcccaccgccgggatccgtccctcctcgtctgcgcccgcctcggtctagatttctgagaaaatggcgagaagtgcgggaactaggaggcgtgtggctcgccagctcaagtccacacatcccattccttcataccgatggaagtcaaagcccatgaaaaagccgatgaaaaaatccaaccgaaagcaagtgttgccaaccttgcaaaagatggactgggaagatgccaattgctctgtgtgcatggaatacccacataatgctgtgctcatcctttgctcatcccatgataagggttgtcgtccttatatgtgtggaactagctaccgccactctaattgcttggatcagttcaagaaagcttacaccaagggggcattgcttgaggaagttcctgcaaatagtgttggctctaatctggattcggcgccattggctgcagaaaaaactgactccattgaccttgcatgtccattgtgtcgtggcaaggtgaaagggtggacggtggtggaaccagctcgaagctacctcaatggaaaacgaagaacatgcatgcaggatggttgctcatttgtggggacctacaaggagctccgcaagcatgtcaagttggaacaccctcttgcaaagccaagggaagttgatcctgtccttgagcaaaaatggagattgctcgagattgaaagagagcggcaagatgcgctcagcacgatcacggcaacaatgggcagagccgttgtttttggtgattatgtgctagacttggaggatggaatggactccgaggatgttgacagtgatgctgataatgatggccgtgggacagaaaacactcgtaggatgctactatttattatgcgccaagttgctcaacatcaccaaaaccaaaggctccagaatgcgactggtgcatctgacaatgctgaggacaattatgtggtgagcagtggtgccaatggaaccacaccatactcttaccccttggagggggaggacgagaatggtatggttgtggccggaggcagaagcactgatgtgctgagaccagagaggaggcgccgtcgtcgccgcaggaaccgtgggagattgtttttaggtgctaattgagaggacaggtggccaggtagggtttagccgccagaggagtacatacagaaatgcttccctggtgcctggcattcatcaattcctgtctcaatttacttgatcatgatcatgtaccaagtagttatcttaacatcagctcattgtcataaatttatggtatctcacattcttcgttgaaaaaggaaaacaccgcatccatctcttgcggtttgtgtagcatctatttctgtctattgcttttgttaaagcatttgtttggagatcgtattagattttttaagtgaaacatatctcgttcgatcaggttt

SEQ ID NO: 25283 - DNA, 3139 bp, Zea Mays
gggagggcaggggagcattggtagcagcagtattctttcccttcctgctcgatgcatccctttcttctctagcctcgcaaagtcgcactctttgggtgttctcgcctcctcctcgggcgacgctgccgccggcggagtacgcctgaaagttcggttttggctcccatgggcggtggacgcaactagcatttctttcttggcggttcttggtgtcttgtggttgtgggggtgggcaccgagcagcttcataggaatgggggtggcgcggagggaggagcaccgggcggccgccgccgcgttcctgtacgcgctgacggttcttggggtgttggcgggcggcgccggcgtccgcgctttcgaggacggcactgcggtgtacattgtcaccatgaagcaggcgccggtttcccacaggcgacttaacttggagaagttcgggagcagcaaggctgctactgccgtcggccgcggcggcagcggaggaggaggaggaggagacaccccgaccaccagcgtcctcaggaagccgagacagagttcacccaaacctatgaattatggctcatatattgttcacctccaaaaatcactattgaagaggactctaaggggagagcattatgtaaagctgtatagctaccgctacttgattaatggttttgctgttgtcattactcctcggcaggcagacaagctatccgggagaaaagaagtagcgaatgtgatgctggattactcagttaggacagcaacaactcatacccctgaatttcttggactgccacaaggagcctgggttcaagaaggtggtccacaattcgcgggacagggtgttgtcattggcctcatcgacacaggaatagatccaacccaccctagctttgcagatgatctatcgactgatagttatccagtacctgctcactactctggcatttgtgaggttacaaatgattttccatctggatcttgcaatagaaagctcgtgggggctcagcattttgcagcatctgcaataactagaggagtcttcaacgcatctcaggatcttgcttcaccatctgatagtgatggccatgggacgcatacagcatccattgctgctggcaatcatggaattcctgttgttgtggctgggcatcaatttggaaatgcaagcggcatggctcctcgtgcacacattgctgtctataaagctctttacaaaagctttggtggttttgctgctgatgttgtggctgcaatagatcaggcagctgaagataatgttgacattatcagcttgtccattactcctaatcggaggcctcctggactcgcaacattcttcaatccaatagacatggcactcttgtcagctgtaaaagctggcatatttgtggtgcaagctgcaggaaatactggtccttcccctaaaagcatgtcttcctacagtccctggatatttactgttggagcttctgcccatgacagggtatacagtaactatgttgtgcttggcaacaatttgaccattcaaggagttggccttgctcctggaacggatggtgatcccatgtataatttagttgctgcaccacatgcactgaagaacaatacagccagttgtaatgaaatgtcccttggggagtgccaagattcgagtcacctagatgcagatttgataagaggaaagatactagtgtgcagctattctataagatttgtgcttggtctttcttctgtgaaacaagctctagatacagccaatgatgtcagcgccgcaggagttatattctatttagacccatttgttcttgggtttcaactgaacccaactccaatgcacatgcctgggcttataataccatcatctgatgactcaaaggtatttctcacttactacaatgactccctagtgagagatgggacatcaggtcaagttgttagctttggcggagttgctaaaatattagggggtctaaatccaaattatggaaattctgctccgaaagtaatgttctattctgctaggggtcctgaccctgaggacaacacactgtcaaatgctgatatcttgaaaccaaatctagtagcaccgggaagttccatttggggtgcttggagttcagttggattggattctgctgaatttgctggtgaaagtttcgcaatgctctctggcacaagtatggctgcgccccatgtcgctggcctcgccgctctaatcaagcagaagtttccttcttttagcccagcagctatagcttctgcactgtccacaaccacaactcttagtgacaggcaagggaaaccaatcatggcacagcgaacatacagcaacccagacttgacgcagtctccagcgacatcttttgatatggggaatggctttgtcaacgccaccgctgctttagacccggggctcataattgattgcagctatgatgatttcttctcctttctttgcggcataaatgggtctagcccagtcgtgaaaaactacactggcaacagctgcgtggcctccaccatgacaggagcagatctaaacctaccatcaatcaccatagccgtgctcaaccaaacaagaaccataacgagaacggtgatcaacgtggccgctgacgagagctactctgtcaattacagtgcccctaatggaactgcagtttccgtggtgccgacgcaatttttcattccaagcggacagaagcagctcgtgacctttgttgtgaacgccaccataaacagctccactgcgagcttcgggaacgttgggttccagggtaacaaaggccaccgggcgatcatcccattctcggtgatctccaaggttgtatacagttcctgatgactgatgagccgagctgatgcagtggatgcaatgcaaatgcaaatgcaaaccagggcctgactgatccagcgtatgcagtgatgacttgactgcatggaggtggagcttgcctttgactagagaaattttttgttggttgtggcgtgtacattctgaagcatgttgatgtaagtagctgagtgattaaccagtaactgtaaagagaatgtactgccagatatccagaatgggaaatccttgtgcaaccagaatgttaaatagcactctgttggggtttgatttaccgatatgatgttcgtgcga

SEQ ID NO: 25284 - DNA, 212 bp, Zea Mays
atgcccctcataaaagtttacaacattgactcaagcccttatggactaaaaggtcattctatctttaagtcggttcgacccttcatcttcggatatgttgtaataccgaagcttcatgaatggtgccttcggcgtcacgtatgagcagcttcagccgaagctgtctccttctgcaggaccttcggcgacgaagcatggtcccaataggcacc

SEQ ID NO: 25285 - DNA, 2044 bp, Zea Mays
ctgccattgtgaacgaaagggaccaggctatacgccccctctcctccaatccaatctccacaggacctgtgctgagctttggagcagctagtaattaagcctagagcgctagcagtccttttggatttcggttcggaagcaaggcgtgccggactcccaaatcccaatcccaagcaagcagtgtgcagatggcaacgcagtggttctccaacatggtgatggacgagccgagctttttccaccagtggcagtccgacacgctgctggagcagtacacggagcagcagatcgcggtggcgttcggccagggggagccggtggaccacgccgtggcggcggccctggcgacggcgatgcccatgcagctgcagcagcccgcggcggccgagcagccgcaccaccgcccgcgcaaggcggccaaggtcaacaccagctgggactcgtgcatcacggagcagggctcccccgccgcggactcctcctcgccgaccatcctctccttcggcggccacaccgcgttcgccaaggcggagccgacgacgcaccagccgcccagctgcgccgggtactacggcgccgccgccgccgccgcgaaggcgccgaagcaggagatgatggacgccgccgcgatgccgccgttccagcaggcgcgcccggccaagcgttcctacgacgacatggccgcggtggccgaggccgccaacgcgccgtccgccaacacgcgcccggcctcccagaaccaggaccacatcttggccgagcggaagcgccgcgagaagctcagccagcgcttcatcgccctctccaagatcgtccctggcctcaagaagatggacaaggcatcggtgctcggcgacgcgatcaagtacgtgaagcagctgcaggaccaggtgaaggggctggaggacgacgcccggcggcgcccggtcgaggcggcggtgctggtcaagaagtcccagctgtcggccgacgacgacgagggctcctcctgcgacgagaacttcgttgccaccgaggcttccggcactctgccggagatcgaggcccgggtgtcggaccgcacagtgctggtcaggatccactgcgagaaccgcaagggggtgctcatcgccgccctctctgaggtcgagcgccttggcctctccatcatgaacaccaatgtgctccccttcacagcctcctccctcgacatcaccatcatggccatggctggtgacgacttctgctggtctgtcaaggatattgtcaagaagctaaatcaagcgttcaaatcatccttctgatgggtttagcttctgaccaaacttaatctaggccaacctttttttccattagccttaaggatttgaggctaatggtaatgttttcaggttcttccttgccttgcttccgaagagagttgcttgctgtcccccaacagtgcccccccaaagatagccatttccactgttttttgctgcatgggtgcagaggtttattacctagttacccaacatcctattttctctccctccagttttttacatggtttgatcctgtcactccatgtttttgggagggagcagattgtaaaaaaaaacaaaaaaagtgaccagcctttttctagggctttgctatataggccggggagctcctaattttcctctctcccctttgccagtatgtttgccctttcaccttgtttttccatgagaggattgtgtttgtcaaacacacaaaaaaaaccctacctttgccgtcctctcaatcttgatcacactgctcccaggaaagcttcaattgtggagaaaatggcgccatctttttttcagctctgagggggactttgcaagccttgatttggaagtactgtaggggtgccacttccttttttttttgagggtcctacaggttggccaccacttgatggaccctttgcttatagttccacatgtgagctttgttgtcacaggatcaatgtgtagttgttgctgtttactctcacacaagcataaaaataaataaatgtgctagtttgttacctttcatggcttttcagttcttg

SEQ ID NO: 25286 - DNA, 397 bp, Zea Mays
gtaacagctcgagcgcagaactcggctggaacttcggacgactcagctcggaatcctctcgtggcagtgtataaatccaacacgcaaccgtggatctcgccaaatcgccaggatcacgacgccctgcgcgcacccctgcctacacacacctgccgccgccttcccagcgcgcggagccgctccgcgccgtcgatcctccatggtcaaggcatcgggcgaaaccaggaaatatcgcggggcgcggtggagcgtcccatgatgactgctcgcgcgggggggtccaatgctggcggaagtgttgccgtagagcttcggcgcctcggaacttctcgccatcggtgatggtccaccgtggaccgcatccctccgcatctatgctcgactccacgcaggtatc

SEQ ID NO: 25287 - DNA, 1645 bp, Zea Mays
cgcaaatacaggagtgcgatagaaatttaaatgctgaaaaggatttggaataatgtagtgctaaatttcagctgagttatttttccttggtgggagacttatctttggcccagatgtgaggtcactcgtgctcacagtatgtttgattgtagtcccagtgatcttctttgctgccaccgtttgtccacaacttggtcatgagttccacagccaaattggaggttgggtggcatctgtggctgtcatctttacagcatatattcttattgttctacttatcacatctggccgtgatcctggaattgttcctcgaaacactcatcccccagagcctgaagacatcgatgaatcctccaacttaccagattgcccgggtggtcaacaaggttcgacaggtttaccacctacccgggatgttcttgtcaatggtgtttcagtcaaggtcaaatattgccatacatgcatgctttatcgtccgccaaggtgctcccattgctcaatctgcaacaactgtgtagaacgttttgatcaccactgtccttgggtaggccagtgcattggcaagaggaattaccgattcttcttcatgtttgtgtcttcaactactgtactatgcatatacgtgtttgcattctgctgggtcaatctcaggagaattatggacacgcatcaatgcaaaattggtagagctcttttgaagtctcctatctccggtcttctcatcctatacacatttattgctgtgtggtttgtaggaggattgacctcattccacatctatttgatttctacaaatcagactacttatgagaacttcagataccgctatgaccggagaacaaatccttacaaccttggagtgggtcagaatttcatcgacgtcttgttttcaaggatacccagctcaaaacacgatttcagagcaaaagttaaggccgattcttcgaccttcgcgtcatccctcagtatgggacgggttctaagcccacccaagacgagcgtggaccttgagatgggcatgaaaaggcaagcggtggccgcagaggactttgaagacttgcacagccagatcggcagtgctatggggctggagagatgtggcaccgagccgccgcattttgtcggccggaagggctgctctgagatgtcacctgacatagaggcgttcgcagaagagtttggcatggaaggtgggctcagtgagaggaaaaagattgagcggcggacaaatgatgattcgtaggaagtttcccacgtcacaaaccacctcttcggccttcctccaggccccaaacttggtaaaagcttgcaaagaagaaagtgaagtaggacaaaacggacggtagagtgaatcaggcattggttagtttgttttgggtgtcatttctagccaagacttgagttagaagtgaaagatgttccttgacgatatagaaatgatgaatccacatctggtttggacttcttagtctatgtgatgtattggatgtgtggtgtggcagtgttgcttctgattttgttgaaggtgtaatctgttgatttaacttggctatgcattcatttaagcgatcaaatttctgcacttttgcgctaaatctttagatattgttcagataagggtggattgaagggaattaaatcattt

SEQ ID NO: 25288 - DNA, 1180 bp, Zea Mays
tagagttatgaatttcctaagattgggactttattttttgcactaaaaatgatttctgtatttattttaatcaattactcagctatctggactggggccattaataccacagagctctgggtcaaaactgcaaattctagggctctattgtaattacttttgtattgccgtggagcgcgggttgattcttaaaacatttaaggattcttttgcaaatttacatggccgaagaggtacgcttcgactaggactgttggatcacaagcccaccgtcaggattagatcggaccccagacgaaccagaacgtgctcccaattgtcagatccgatcccaatggtgtggattagatctggctttaacccaagcggtacacgcttgaggttgttgattcgaagatcgacggtcaggatgttatagaagccttaattacccacgccccaccgatcaagatcgaaaggtggaaggacgcggagttcagagcgcatacctagtcaaatctacattgttcctgacgatcggacggtcaccattcccccatgtccgaacgatacgcgagatcttatcgtgtccatccattttcgatctgatggcccccacgcgtcttctcccacacgaactttaccgacggtggaggcgccctgcccacggtggagggcccgccagagaaagccgaatccgtgcacccaggatcaaacccccgatccgattgattctaaacggtgctacgaaaatagcgaagatgtctggggaccttacctaaggactggagcatcagaggatcatggcctcgaggacctgcgacatggtggtggccatacattccgttgagcaattccatgcaccaccggtttcaagttcacctgatgaggtcatgggcgtcccccatgagacacgaggaagaccccctgccaaccgccgagggcacaatgccggtgaaccagatcttcacccaccctgcatggtggccctccatctccttcccagctactcgccgcaacgacgtgctctaaggcggggctcgacaggagttcgccaaggggggtgcggtacccaggtatttatcaccggggtaggacagtccgagcctaagggtgcttgataggcgggatttttgggctgttaccacaacaaaacaaccccgatgtttactccatgtgcgagattgagaggggaaagaat

SEQ ID NO: 25289 - DNA, 2033 bp, Zea Mays
tttttaaaaggaaaaaaaggcccactcagccacttcttatccactccgccgctcaccggcaggtccattccgttcggccggctgttccccaccacggcgagcgcgagctgcgctgccggtgtcccacgcggtgactgggactcggcgaggcagcggtcccggcgtccacatcgcgcgcggcgaggcaagcgccaagcgaggcgtcggccagcccgctggtccagctgttgctggattgctgctcgagcttggcgaggccagcccgcagtccgccacccgctcgttcagccggttcctctcaccgcgctgccaccgatggcgacgaacctgggcgtcttctgccgtgctccccgaccctcgcccgcgtcaacggccgccgccccctcgcagtccctctctccctcctccgcctccgtacacattccccattcgacccagcgcggccgcctcgccgcagctccaccactgccacgttgtgtagctagtccaaccattgctaatgtgaaagaccaaactgaggctgaagttgcaatggggtacacaatgactgaaatctgcgacaaattcattgagttcttcatgtatatgaaaccagaaacaaaggactggagaaaattattggtgtttagagaggagtggcaaaggtatagagggcacttctacaagcgttgtcaagtgcgcatacatattgaggctgatccctcattgaaacaaaagttggttgtacttgctagaaaagttaaaaagatagatgatgaaatagagaagtacatggaactcttcactgagctcagagagaaccctgctgatattaatgccattgttgcaagacgacggaaggatttcactggggacttcttccgccatcttaatttccttgtgaatgcttataatggccttgatgagcgagatggaatagtcaggcttggggctaaatgcctgtctgcaattcatgcatatgattgcacactggaacagttggatattgaatctgctcagttgaagtttgatgatatactgaattcctcttcactagatggtgcttgtgacaagatcaaaagcttagccaaggctaaagaacttgattcatctctaattcttctcattaacagagcttgggctgctgcaaaagaatctacaactatgaatgataaggtcaaggacataatgtatcatatttatacaactacaaaagaaagcctcaagagcatctcacctccggagatgaagctgctgaagtatttgctgaatattgaagagcctgaagagagatttggtgctcttgcaactgctttctctcccggagatgggcgtgaagctaaggatgaagatgctctatacaccgaactccacaaatggatcaaaatgcttctcgactcataccatctcaacaaggaggagacggattttatggatgcgagaaagatgagcgacccggtgatcatccaaaggctaaccttgctgaaggagatgatcgaggaagaatacatgaagcggtatatacatcctgaggaggaagaagaacccatggacgacagctagcaccagaatgctctgagcgaagcgagcctgtatgtgtaacgccgactcggaacaaacggtgaagatttagaagggacattctaatcgctgccaacgttgacgatccatataagtagtagatagccgatgccctgctccttttttttacgaggcgatggatggtaaatttgtagcatggcaatggcatcatcaggaatggtactttctgttacatgtgtaaagctcaggatttgttttgttcttaggttcgcaattttaaagatgacacgtttaattctggagtctctgatttggacaatcctaagaaaatggttctttcagagtataaagtgcctaccagtgaagacatagcttacatgtatgttggattgatgatggtgcaaaacttgagaacttcccgcagaagtcacaacatgaagccaccttttcatactttttattgcctcaatctcttgtttcgctcaacacttttttccgtaaggagtgcgttg

SEQ ID NO: 25290 - DNA, 1070 bp, Zea Mays
gtgcatgcattgtccagctcatgcactcaatgaaattaggtggggatactaaaacgtgtactcgaagaggtcgaaaaggtgatgcaagaattcaggggcatgctttataagtccatggaggatcctcatcttgatcttgctgagattgagaacattgttcgtctattgttggagttggaacctgaaacagatccagtgtggcattatttaaatattcagaatagcaggattcatggattgtttgaaaagtgtactcaagatcatgactcgagaatggaagttttgcaaaataaaattcgcgaaaaagtgctctctgattcgaagtggaggcagctgcaacaagattcaaataaatctctggaagttgattctaccattggtgattctcctcgagttgatcagttgtcaacaaactttatggctgaggaagctgatagtttaagggccacctacattcgtaggctaacttctgtactgatccagcatgttccagctttctggagattagctttatctgttttcagtggaaaatttgccaaggcagcttctggtaacgtagtttctgattttgatgtgaatgcaaagccgactgcaaataagaatgatgaaaaaggtggagaagtaaagtacacaaaccacactcttgatgaagttggtagtatggttcaggctactatatcggcttttgacactaaggttcagagtaccttccgtgattttgaggaatgcaacattctttgtccatacatgagtgacactataaaagaaatagctaaggcctgtcagactcttgaagggaaggattcgtctccaactgctgtaaaaatgttgcgcacacttcattttgaaatgacaaagctttacattctacggctttgttcatggatgcgggcaacaacaaaggagatatcaaaagatgagacttgggttactttatccacccttgagagaaacaagtcccagtatgcgatttcatgcttgcccctggagttccgtgacataacagtttcagctatggaccgaattgatacgtttctggttatcctgtcttacctagaaatgaatccttt

SEQ ID NO: 25291 - DNA, 1755 bp, Zea Mays
ggctttggtttcatgtttgattcgaatcagacagttcctacacatcccctgagaagtgaaaaactagggtattaccaccgggccctcaggatggctttaaggttcttgtgaagcaccggcaacctgttactgctgttgctctatccaaggatagtgataagggattttcagcatcaaaaagatggaattattatgcattgggatgttgaaactgggaaatgtgagaagtatatatggccaagtgaaaatgtgttggtttcacatcacgcaaaaccaccaatatcagctaaaagaagcaagcaagtgctggctttagctgccagttctgatggtcgttacttggcaagcggtggcttggaccgtcatatccatctatgggatgttaggtcacgggagcacatacaggcatttagcggccatcggggaccaatatcttgtcttgcttttgctccggactcttcagagctgttctctggttcttttgatcgatcaataatgcagtggaatgctgaggataggacatacatgaactgtctatatgggcatcagaatgaaatcttgacaatggatgcacttagtaaagacaggattctaactgtagcacgggaccgtacgatgcatctttggaagattccagaagagtcgcagttagtgttccgtgctcctgctgccgcatctttagagtgctgctgcttcattgatgacaaggagtttttgtctggatctgatgatggaagcattgagctttggagcataatgaggaaaaagcctatccttataataaaaaatgctcatccagtattgtgtactaaccttaattcagttgacaatgatgacgagtcacctaaagaaaatggaatgcataaaccggaaaatgtgccatccgcagcccagtcatgggttggtactgttgctgcaagaagaggttctgaccttgttgcatcaggagcaggaaatggtttagttcgtctctgggctatcaaacctgattctaagggagccgagccattattcgatttgaaactggatggatttgttaattctcttgccatagcaaaatctggacgttttattgttgctggtgttggccaggagcctcgccttggaagatggggacgagttcgatcggctcaaaatggagtcgcaattcacccaatccgactaaaagatgtgaaagaggacttgtagagtagattgatgtcttgcattacagtggaacgtccatccatccagcctgcacttctgcagccacggcacaaaagaaaatttgttgaggctaactgggatacatgcaagcaatacaaatttggagggcactacagatgatttttgagctccggttatgtgtgacacggggaatttgtgaggcaattttgtaacttctacagccttctggagcggacaatgaggatttgaagatccatattttttgttccccatgtctggttaactgcattcttttttctgatagctagttctcgccattcgcttttgtacggggtttctccttgcttcgtgtcttgagcgcacgaatagtttgatttggctgcatgacctttatagggtagttccaacaatgacttacgagctagttgtaagcattttattttattctatattataattgaagagaagtaatttttgatcaatagttagtctcaaaatcatgtggtgaaggaagagaagcaattttatacagtattatgaggtactgctaaaagtttttttaactgctattgcttcacagcattatgc

SEQ ID NO: 25292 - DNA, 1034 bp, Zea Mays
tatggcaacccctgtcggttaatagttcctcgcggctggattgacggcccagatctcctcaagagcgcgttcccggcacggcaccgacggcgacgggcacggcctcgaattaaaaactgccgttgggcgactccgcgtggcccacggatccaccggagagatctggtctgccattccctcgctccttcccgtgaaccacaaacctaacgcggagcggcgcgggccggccgccgggcgaggtgcgcgtagctgccgtcgattgtcgccggatccatccaccatgggcggtggcaacggccagaagtccaagatggcccgcgagcgcaacttggagaagaacaagggggccaaggggagccagctcgagaccaacaagaaggccatgagcatccaggtaccctgtctagatccgtgtttttgctcttacgttttggtgtcatttggtggaatttcttgatggattggtggtagggtatgttatgctcatagaatccgctggattagggactgtatctgtattagatgagagtttcttttccacggttaggatcagttgtgaattttttctgtgggagatactacgagcgatgtaagtttcaatagtgctatgtggctattggtttgtactgctcgaatttggaggctagaaacaaggtatgcatatgatgtatctttagggggtgtttggttttagagactaatttttagttcctccaaattattctactttagtcactaaattgtcaaatatggaaactaaaatagagttatagtttccatattttgcaatttatagattaaagtggaataaaattgagggactaaaaattagtccctagtaaccaaacactaccttatacatggcaaagaacataaccagtcataatgtcatgctttcccttaatggggcttctccgatcagtcaagcaggcaacactgtttatgtgcctagttttatttgcagcccaatcttagggcatgtttggataccatgtgctaacttttagctcaaaatagccacagtgcatcgggag

SEQ ID NO: 25293 - DNA, 1106 bp, Zea Mays
aatgccttcgtgctccgaagaactacaggagattccattgacatggctaatttttcaaaaggcatatttttcacagacttctcattaatccccaaggcatcataagcttgagccaaagcaaatgttgtcttcctggacttcacaaatattctccagtgtctgaagtacaaaaaaatgacaaaaatagtgatgataattcccctcatcagacaagaacaagaaaaatatatcaaaatatgcacttgttggaagccatattagtaccttgctagttttcttgaaagggcatatgcatgctttaagtaatcagcatgggttgaaccacgaggacttcctctttgtttcaaatactcagccctctgcctcttcgcctgttccagtaagataatctctggatgttagaaacagaacacaaggataaaaaaatgtttaacagaacactatgagagttgagaatacataccctttgaagtttgttgtccagctgttctttcagttttctcctctctgattctctccggctgcatacagtcatggcagctttttggatgcgtaaaagcctagcttgagccttggtcttttcagcttccagcaacctcagtcgtttcttctcagcagcagcgcgcttcagagaaattgcagagcgcacctgctccatgtatttgctctctgattttgccttctgcaccagggacctcgctgtcctctccttcagtgcggcccgcttctgcatatcggcatgcagaaggcgcatgcggttctcctctgcctgtcggacacgagactcaactctggtctcgagtcttccctttccttctcaaacctcatatccacatcattcttagcagcttgtctgagttcatccaacttggtcgagtcggttatgtgccttcgccaagaaggattagccttttatgctcagcagccagaagcttcgcttcaaggcgctgcccatggtcttcttcttgagaggaccacgacgggctccgtggcttcttccttgctttgcaggccaaccattcacggaattgctgaaaaacaacattcgaaaagtcaacaagttatcctatactgcaatcagtccaattcgactccaatagttgttt

SEQ ID NO: 25294 - DNA, 1226 bp, Zea Mays
cagacgactaaattttaggggattctacataatacttctccagaaaggtggtgaactagtatctgtcggcacttttaggatttgcggccagaagtttgctgagctgcctctgatcggtacaagatctctataccgtcgtcaaggaatgtgtcgacttctaattaatgaactggaaaagttgcttttagacttgggggtggaaagacttctattaccggcagttcctgaacttttgcaaacatggacatgctcatttggtttcacagttatgtcaaattctgagaggcttgagttggcagggaatagcattctcagtttccagggaaccaccatgtgtcagaagattttaaatgttgcacacaacatttcacaagatagaagtattccatcaatgtccaattctgagagaatggggttagcagagaacatggtggtgaagaaggcatttattccattgacagtggagccagaccatcatgttgatttgattgtggagcctgagctagtaatgaaaattgagaataacagcagtgaggagggtatttcttcaattgatccgctgactagtatgccagaccctcaagttggtttggcagtggggccagagatggtaccggtaagtcgggaaaacaaagataaagagggtatttgtttcattgatgctccaacttgtccgccagatcctcaagttgatttaacaacgggcattcatgagcaatcatttgtcagatcagtgcaacgagaattgcactttgaatataacacctaacacagcttcaggattggaatacaagttctcaggaaaatgctatgagcgggtaaaaaagggcgctcgcccaaggaatgtctggcttagaatctcgaccaaataataaccaaaggtagatctagtagagctacggatgaaggatgcttaactttcatgcaataagctttcagccatcgccttggcattgtccaagttcaagtcgaaactaacctaacctggttacggaagcgtgtgattgtgtatttcccacggtgtaaattaaggactatccaactgataacatactgtccagctacgaggaaaataagattatgttggagcaatttctggtgatggttttaccctgatgtgtcatattattatcagttctgtcgccatactgttcattggctcctttgttcatggtgaatcttctgagtttactttcgatgagctctatcctggtgttcctttgtcg

SEQ ID NO: 25295 - DNA, 1671 bp, Zea Mays
gtgtggccaccaacgagatgcagcattgcagcacgacacgactgcacgaggacgaaaaaaaaaatatccggacatccggtcacggttgccattcttttcctgtaaccgaaccctgaagggtagcgtcatcatccagaccaccattaccagagtgctctgctctcgctggaggccgtggttcattcacgttcatggaggccgccgccattcccaccagtgccccggaaaccaggtccgtacgtgccataccctcatgctttgcttcgttcttgcagtcgtccgtgcagtctttacgagaacacaagtgtgcgtgcagtccttcaactgacctggctggaactggaacctaccaggttttccttacaggaagtcgtagtttctacctactggattgccgttgtcaccggcggcaacaaagggatcgggctagaggtgtgccggcagctggccggcgccggcgccaccgtcgtcgtcttaacagccagggacgagacgaggggtgcagccgctgcacaagagctcagagaatctgggctctccgatgtcatcttccatcagctggacatcaccgacgctgcgagcgtcagtcggctggctgagttcctcaaggctcgttttggaaagctagatatcctggtaaataatgccgcagttggtgctgttgagtacgtccaagatcctgctgacagttcaacgagcgaggaagagctgagtggcatggatatggtccaaaggcttcagtgcatgcttaagagagtccgggagacctacgacgctgcgacagaaggcatcaagacaaactactatggcataaagcatgtgatcgaagccttgctgcctctgcttcaagcttcctccgatgggaggatcgttaacgtctcctctgacttcggactgctaaggctgatcaacaacgaggaagctaaggcaggagctaaacgacgtggagaagctcaccgaggagaggctggacgaggtgctggccgcgtacctgagagacttcgacgccggcgaggtgggggcgcgcgggtggccggtggacttctcggcctacaaggtggccaaggtggccatgaacgcgtacacgaggatcctagcgaggagccacccggggctgcgcgtcaactgcgcgcaccccggctacgtgagcaccgacatgaccgtccacaccgggcctctcacgcccgagcaaggcgcggccaacgtcgtgaaggtggcgctgctgccggagggcggcccgaccggcgcgtacttcgcgttgggagaggaggcgtcctttatgtgacgaaagcaccgtcgtcgttaagttcgtcgttgttcgccaactccctgttagtcgatttctaaatcgacgtacaatgaaatacatcatcgctgcaaactcacaaatgaaaacaagggaaccttgtagcaaaaaaaaaaagaagtggacagaataatgaataagcatgtcaaatatctcttgagtatctatttgttcaagtatgaatgactttgtacaagtatcaaagattgtgagtggaaccaaattaagcagggctttgtgcatgtatgaacgactccaaatgacagaacgaaggaagctggtaacaccgccggtgtcctgcaaaacatgcatactagccttcatgagattatcatcatcagatagataatgaaattacatcaagc

SEQ ID NO: 25296 - DNA, 1320 bp, Zea Mays
cgctcggcgcccatcgaaaaaccctctcctctcccggacaggcggacagcggcaagctggccaccgcgtcaccgcctctacagccccaggctccactgctaaacgccggtaatggcccaggctccggcgcgcgccgcttccgccgtacgtctcttcgacgcgcactgccacctgcaagacccccgcatcgcggccgtcgcccctgcccttatacgagccgccggcgcatccggcgtcgcacgcttcgctgtcaacggcacctccgagaaggactggcacctggtgaagcagatggccgaggatcacccagccgtcgtcccctgcttcggcctgcacccttggtgggtacccgagaggtcgccggattggatgaatttgctccggcggttcttcgccgaaaccccggaggcggctgttggggagattggtctggacaaaggttcacatggaaaaaccatcaacttcggagaacaggttgaagtgttccagcgacagctcgaactagctaaggaattggagagacctgtttctgttcattgtgtgcgggcatttggtgatcttctggaagtattgaagcaaactggacctttcccagcaggcgtgttgttacattcttatatgggatctgcagaaatggtgtctgcccttgcaaatttaggctgttacttttcactatctggcttcttgacaggcatgaaatccactaaagctaagcacatgctgaagtcgattcccctggataggattcttttagagacagatgcacctgatgcattaccaagattggacaatgtttctgtatcaccagtccatgttcacagttcagatgcagatactgaaaagcgtcacatggattcagagtcacaggctgctaatgcatcaaatgagtccttgaaccatccagaaaatatccatattgttttggagtatgtcgcatcactccttgaaatgacagagtcagaattggcggagttgagttacaagaatgctaccaagctgttttcttatcctggctccaaagttcaacatgaacctgaagacatctaaatcgggttcaacactaccttactcactggctacggtctacagggatgggctggttctggttgtaacgaaacagagcgagaggagggacatagggcctgtttgttcagcttttttgtgaccagcttttccaagaatctagctgtagggagaatctggctgtgtagagaatctgagtatcattaggattacgtgcggaggaagataaagttgtccatgaggctcagatgtataaagcgacggattactactattgcgatgattcaactgattata

SEQ ID NO: 25297 - DNA, 615 bp, Zea Mays
taattattcttaggtatgtgactttggcctttcaagactgaaagctaacactttcctgtcttccaagtctttggctggaactcctgaatggatggcacctgaagtgcttcgagatgaaccatccaatgagaaatctgatgtctatagcttcggtgttatcctatgggaactaatgacactgcaacaaccatggtgtaacctgaatcctgcccaggtggttgctgctgtaggtttcaaaggaagaaggcttgaaatcccaaaagatctgaatcctctagtagccgtattaattgaatcttgctgggccaatgaaccatggcgaagaccctcgtttgcaaatattatggacactttgaaaccattaataaataaggttccggcacagttgatccgttcagattcgtagcctgttctatacgggtacgggaagatgtattttactgagtggtcctgataacatcaacatgagtgtcctaatactgatctgctataattgaataatccttggatggtattactcattatgataatacaattctcataatctttcaaatgaagtgtgcctggcaatttctttccatggcttaaggtggaaaagtaagcagatagagtggc

SEQ ID NO: 25298 - DNA, 3368 bp, Zea Mays
caaacagcaagggcgctgcgcgctagcagaggcgctgagctgagctctcagccatggaagtggtcgatctctcccccacgtcccgccccctctcaccgctcctctccaccgcacccgcccgccgcctccgcctcctccctccccgctgcgtcgtcggcctgcgcgcctctccccggacccgaggactcggctgcgttggaggtagtctcagcagaaggcattctttttgtaagaacggattcttcgcaacaagcagttcgtcagcctcagtagaacccgctacccaggaattgggaacagcggatgcagtggagtggagtggggatgccatacgtcggcgtttccttgaattttatgcagcccgtggccacaagatccttccgagctcgtcgcttgtgcctggcgacccaactgtgttccttaccatagcgggaatgcttcagttcaagcctatattcctcggcaaggaacctaggcgtgtgccacgcgccactacctctcagaagtgcatacggacaaacgacattgaaaacgtgggtcgcactgctcgacatcagaccttctttgaaatgcttgggaatttcagttttggtgattacttcaagaaggaagcaaccacatgggcatgggagctggcaaccaaggagtatggattgcctgcagaaaggttgtggattagtgtttttgaagatgacaatgaagcattcaacatctggcacaatgaggttggtgtgccaaaggagcggatacagaggatgggtgcagaagataacttttggactagtggcgcaactggaccttgtggaccttgctctgaaatttattatgatttctatcctgagagaggatcatcagatgtggatttgggcgatgatagccgattcattgaattctataatcttgtctttatgcaatataacaaaaaagacgatggatctctagaaccgttgaaacaaatgaacattgatacaggaatgggccttgagcgtatggcacgcattcttcaaaaggttccaaacaactatgagacagacttgattttcccaattatagaaaaggcagctagcatggcgatggtgtcctatgcaaaagctgatgatgccacaaagacaaatctcaagataattggagatcacatgagagcagttgtttatctcatatcagatggggtaattccctcaaatatcgggagaggatatgttgttcgaaggctaataagaagagtagttcggatgggtagattgataggaataagaggtgacgggcatggaaactctgaaggtgcatttttaccttcactagctgaggtagtgatcagccttagcactgagatagattcagatgttgaatcacgacggagatcgatccttggagaacttcaaagggaagagatgcgatttgttcagactttggaaagaggagaaaagttattagctgaacttctggatgaagctttattaaatgctggtaataatggaaacaagccttccttatctggaaaaaatgttttccttttgtacgatacatatggtttcccagtagagattacagctgaaatagccagtgaacaaggcgttactgttgatattgagggatttgatattgaaatggaaaaccagaggaaacaatctcaagctgctcataatgtagtcagactttctgtaggaaatgagaccgagatagtaaagaacatcccggatactgaatttttgggatatgattctctctctgcttctgctgtcattaaaggtctcctagttaatggaaacccagttaatgaagtttctcaaggttctgaagtagaaatattattagaccggacaccgttctatgctgaatcgggtggtcaagttggagataatggtttcttatatgtgaatggaggggaagatagaagacaaacaacagttatagaaatcaatgacgtccaaaagtctctgggaaatatatttgtgcacaaaggcatgattaagcaggggtctgtagaggttggcaaggaagtagatgcttctgttgatgcaaaattgaggcagggggctaaggctcatcacactgcaacacatctactacaatctgctcttaaaagcgtagttggttcagaaacttcacaggctggttcccttgtggcgtttgaccatctccgatttgacttcaatttccatcgcccactttctgaagaggaattaacaacaattgaagcacttataaaccaatggattggcaatgcagcacatgttgagacaaaagtcatggctttgcaagatgcaaaaaatgctggtgcgattgcaatgtttggagaaaaatacggtgaacaggtcagagtcgtagaggttcccgggatctcattggaactctgtggtgggactcacgtcagtaatactgctgagattcgtggtttcaagataatttcagaacaaggaatagcttctgggatcagaaggatagaagcagttgcaggtgacgcttttgttgactatgtgtgtgctcgggacaattacatgcggcgcttatgcttatcccttaaggttaaggctgaagatgtgaacagtagagtagaaacaattcttgaagagctaagagcaaccagaaacgtagcatcatctctacgcagcaaaattgcagtgctaaaagcagcttctcttgcaagtagagctacaactgtggagccccagaatgtcaggattgtggtcgagaacatgggtgatgtcgacgcagatgggctgaaaagcgccgcggagtatctcatagataccctcaaagaccctgctgcggtgattttaggatcaagcccaggggatggtaaagtcagcctggttgctgccttcagccctgcaatcgtcgaaatggggctgcaggccgggaagttcgtgagtggcatagccaaactctgcggcggaggcggtggaggcaagcccaatttcgcccaagctggggggcggaagccggagaacttgcccgacgcccttgagaaagcccgagctgaaattgtggcacgggtatcaggttcgagctgattctccgctgcctcacacctgatactggaagtatagggataggattcatatgaaatgtatatgtaattgtcattggcattctaagcgaaaacacttgtatttctccctaccttgccgtgtacgctttctgcagatgacggagcaaattttgtagcttgtaattgtaactagtggccgaacagaacggggaaaagatcaaatcttcacacagcaaaactactgctcatgtttaatctaatcttaaaaacataagaaattatttgtcacatgatcaactaatagtctaatacctagactagaccaaatacatctgatcaagtcagccagccacgtgcgtccaagcaaagattgagc

SEQ ID NO: 25299 - DNA, 6116 bp, Zea Mays
ttttttccagttgatttggtcctaaaccaaagtgctttgcatagttaaggcgagtgtttgacccccgccttaccttcgaagcggtaaagtgtaaggcgagacaacaccttaatcatatataaatataggaaaatatagaaaattagtcttgaatagaagtacgaaagtaccaaacagaagtctataagttcaatataagcaaacataataggctaaaagtccaacataagtaggttctgatactctcatctctcaagttctgatacatcatcaaactcatcaaaaatgggaggattactgtcttcttcgcgttctctcccaccggatatatcatcatcttcactcacattcaagtcatctttcgcatgattggttgccgcgtcctacccgcccagactcgcggcatgcgttggccgggcgcgagcgagtgtttggttgccgcacccacgccctccggactgcatgtgcgcatgcagtttagtgctttttttcgccgttctgcctgcaagcgtggagaagccggaaattaccttcgctgggggaccaggcccgcacgaggcaggcacgtgacagaccggcaaccaatcagcccccttgtggatctggctcaaagtcttcgtccatggcacctccctcttcttcttacggcctcattcttgcatgctttctctatgtaaggccagaactttgtctctgactagcttgccttggaaggttgtgccctcgaagcgactccgatgctctagtagcaacatcaacatgatccatcatgtgaggtcaacaatattatcattgtccctgctggggtgtaccactgatgagtatccactcgttgtcccaatcaaaatcctcaataattaatgggtcatagcttgtgccggctttctccctcatttgaaacctacttcgcatcttttgattgtatgaaacatagaccaagtcattcaaccttttatgcaacaacaagtttctcttctttgtatgtatagtaagtaacaaacccaacctaaataagtagcaagaaatagattgaagctagtaaacataagcgaagtagcaaaaaatggacttacaaattcaaatgtgcttcaattcctctcacaaccggatgaggaagcacaaagtctaaccagtaaccacacgcttggcaaacctttgaaattcatatgctcggccgccatatgaacgttatcaatcaactacgcagatgcaaacagcgacacggtcacacacataggtatacaacagcaggaaagaataaaaaaagatgtgctgaaattagcaatcagccaagcatatagtactttagagggctctttgcttgaatgttttcaagtgccaacttgtttgaaaaatagaccctctatgatcttcataatgcatggcatgctcattaatcttcgaccgtatttcttcattggactccattcttgctagcacataattgaaacaactcctcagctttacaacatatctatcatctccctttggatggcaaagaattttcccaggttcaaataaagtgcagcaccatacgatggatggtccatttgtttcatccaacgaccctcaataatgtccataattttttcagcaatgcttgcttgttttgtgtagggaagctaagccttttctcttttgcaacatccattagtgctgcaatttatgtcatgtatgttttttcatctccatcaactgccctaagcactataagaagtgccaaagctctgaggcaatcttcaactgaagaccaaaaagtcttagctagaataatattacaccccccttccagcctctgtctttgccaacttgttgcagttccatgcatctcacaaaaagtgctctcaaggcatcttgatgtttatgtagacttttcaaagtaaggaatgtggcaaaacgagtggctgctggtcttaaaggatccccctcctatcttctccctcattgcacttagaattcctccatgcctataaataaaagtggtgactcttttggcttgtgcaattagtctttcaaatatccaatatcctccaccatgaggtccaaacaatgtgcagtacaaggaccctagaacaatgttaaaatactatccattagaagcctacccactgccttatatttttttctcgaatacgcaggagagctgcgtatcaattcattaatagtagaggagaaatatatatacaagaaaaaggcccacacacttgcacacacccactaggaacagaactgcaagaacatttgcgcctgttacagcacagaaacgaccctacacaacaactaaaatcggtatgccgtagcctccagaagctgcagatccttggcccctgctgcactccaacacaaaatctcatcaccagccaagcacaaggcagcagccaatcgtggaggtttgcgaccaaagacattcatttctgtgtctccacaaggtccatgcccctaagattatgagagagttaaaacctttctgaatggagcttcgcatagagctggaagaactgctccaccaatccaaaaaggaggtcgcctcaggctgaggggcaagaagtgccaaacccattcggctaagaaaaaagaaccagaactgacacgaaaagagacaggagacaagaaggcgatatagcgtttcacgttcttggtcacacaacacacaagcttcagggtgtggcagattcgtcctttcaagtcgatcagatgtccaacacctattgtgggcagccaaccacatgaagaaggcacatttaggcggcacccacaatttccagatacgctcccatggttcaaagaacaacgagctctgcatgagagcatcatatgccgatcttgctgaatatgccctgacggagagaggctccaaaaatgtctatccggcatttccagcacccctggctgaagctgcaccacgtgtatagcctctcaaataccaagaaactcttgctaactctgccaagaaataactccatggatatcgtggacccatcttgaatctgttagagcatctaggaccatccttcgattagctattctggtgggaatcatactatgtataagtggtgctagttcctttaaccgctgcctcatcaaccatctatcctcccaaaacaaggtggtgctaccatcgcctagttcagtagtcacggccatgttgaaaattccttgcacctgtttatttgcttgtagcttgaaggcagcccatggtctctgtcagcctttggctttgtggaagcagcctccttagtggtttggtatgaacctgaagaccgcctatcatccacaacctattcagggattctctggagcatgcttgcgaccttcccaaccacttttggcatgttttgggcttagttgtagctggttgcctaaactgaaaggcggctctcctccgtttagcagctgtcccggaacttggctgcacaacggagcaatcagattcattctgtcctagcctctgcccctgcacctgcccatgtactggaccaatgttataaggaaaataggcctgttcctcttcttctccaagtaagctgtcatctcttttctaatctcagtggtggtgttgaaacacatgactgtcctcatatcccccggcaaggtgttctttataccttttaattccttctttgttaccatgttgcatcggatgcatgtcaccttatcctgattccctatttctgtccaataaccgtacttccagcctgggtcattgaattttgcctctggatcttgcatggggtgataaggatcaacatcaatgggagcagcagcagcggatgcggatcagacactctccatgacaatggcttactctgtacaggtggatagtaagaaaaaggcaaaggttcagctcactaattaacatcagagagtggggaacagagcagcacggaggcccattatcttgcaccggatttaaagcagagggctgctgctaggatgctggcctgcccgccctgtctggctgcgccagcgccacccctcctgcgtggccacaccccactcctccctgtctgcgcctgcatgccttgcttggcccgtgccgcccacctcgctgtgccgcccgtcctgcctggtcacgccactcctcacccctccttcgaacagaacaggcgcaccgcgcaactcagcctttgaacagagcagcctccgcccacaaccagccgccttttcattcccttattcccataatgcgacaccctagaaccgctttacggacgtctgaggtgccagagcgactagacggtaaggaagatgccttagtgtcaatcttaaggcgggtaaatcacctcattttttctgaccgccttaccgcctaagggacgccttaatagtttgcattagagattttcccttcaatgtatttgacattttttgtaggcatctttagaagaggagaaagagtcacttaaagctaaaatatcgaagctgcaaagcaacctaagaatgggccttgaaattgaacaacatttgcaaagaaatgcacgaatattagagaaaagacaggcactgtatgatggattcctgagaaatggattgtccgaacttcaaaagttctacacatgtcaaaaggctgaaattatgaaaatattggaagaagaatcgttgcggttgatgaaagttgttgcagagattcaggataaactaactgaaatttgtatcaacactgaagttagtgaccaccctgccgatgagattcaatgttgtgacagcagttgtaaagatgtgcatgttactaaagatatcagtcctagcacatgtcgtaagagtgattatcctgctgatcttaactccgtgtcgtttgatgaatctaaagcacttgcacaagccttacaggagaagatggaagcacttatgctcttctcacaggaacaagaaagatacctattagagaaacagagagacctgattgttatcgaggaactccagaagaacttatctcaagtagtacctctagaattcctacttgtcattatttttcaatcacaacgtactatatgacgagtgttctaaatagtacaagtatggtttgtcatgaagttgatacttcataccattactattttgtgcattttgctcctagctgttggaaaggttaaagatgaaaaggtgaaggtcctgatggaattaacaaaactaaaagaacaatatttgctattgaagggctctgctgtcaaggaaggtcatgatactggtgattcatctaaactcattcctgggcatgaccaacaagggatgctgaagactatgctgaagaggacatctttaagacactggatgaggaaagaaagtaatactattggacatgggagctctgatggaaatgatcatacagtttgcaaagaacattcagtggatgttgcaagattaagagttgaaaatgctatgcttcttgaaggtgttggtactgttgagcatctcacttcttcagtgcatagactgcatattgtgcttttgaaggcttatgatgatatcaagtcagctgatcctttggagagtacctttgaagcgctcaacagtcttataactgaagcaaaccttatgaagacagctcttaatgtggttcttcctgtaagctggtccggggattcatcagatgcaattaaatatgaagctatgtgcgatccatctgattcacctaaatcgaagtctgggaaagtagacccgctctcttctgcaggcatggagatggtggagctactaatattggctgctgagattctcaaggagagctttctggtgaagaaataaggcctccatgtaaggacgagtatggctctccttgtttgtttagaagcatgcaatttaatccttaatttttttgggtgtatatacttaaactgattgctaaaagtgcactactagattatttcggatgtagagaaagagccgaatgtgcactgtaatttacggttcgctgctattgatgtgtcttgtgttggtagactaaaggatttaagagccatgtgtacaaaattcagtttacaagcaaagatcaaagaatagacatgaactagggaaagagaaagaaaaacaaactgaaagttccatacctaaaagcgtcggcactggttgtcgcctaaaggaaggtgaatagacggaatctaaaaattataaactta

SEQ ID NO: 25300 - DNA, 1060 bp, Zea Mays
cttatctaaatagcgtatatatgcatgtattatatgcctactaacttggattctttcccaaaattatcatttccattactgggtccgcccctggttggatcgctggttttggggcaacgcctcgtccataaataggatcaagcgcttgaacttacagcgagatggaaaatgatagaaggcaacttggtcagatcgatccaagaagagcccgctttccttgctgcatagtatggactccaataccattcatcacttggttggtgccctttatcggtcacattggcatctgcagagaagacggtgtaattctggacttctctggtccacattttgtatcagttgacaattttgcattcggagctgttgcgcgctacattcaagtaaactgcgatgagtgctataagcttattgaacctgaaggagatgccacgtgggacggcgcgctgaagaaaggcacgcaggagttccaaaacaggaactacaacctgttcacctgcaactgccactcctttgtcgcaaacaatctgaacaggctgttttattccggccacgacgaatggaatgtggtcagcttggctgctgtgatgttcttacgaggccgctgggtgagcacggcatcggtggtgaagaccttattgccatttgcagttgtgctttccatcggtaccttccttggcggcacgaccttcctgaccggccttcttgctttcgccgctgcgatgactgtctggttccttgtgggcacctactgcatcaaaggtctcatagagttgtgattagagtatgttagactcgttgtagggggttcaagggtggcatatttttaagagttcaagcgtggcacatttttatttgtattgcattcctgtataatggattcttgatgttattcatgcacctatatgttccaaattccgaatgaattgatgcacttgtctgttgattcccttcatttgtgctgtcgaaggatcatgctacagccagatgcccagaactctatgttacatgaccatgttttgaattcagggtttaaatcaagaaaagcctgcgttcagtacag

SEQ ID NO: 25301 - DNA, 2138 bp, Zea Mays
atggatccagagatgctgcggctggcgcaggagcagatgcgccgcatgtccccggacgacatcgcccggatgcagcagcagctgatgtctaaccctaacctaatgaggatggcgtctgagagtatgaagaacatgaagcctgaggacttaaggcgagctgcagagcaactgaatcaaacaagaccggaggatatgcgtgatatgaccgagaaaatcgccaacactactccggaggagtttgctgctatgaaggcgcaagcagatgctcaaatgtcctatgcgatgtctggtgctaagatgttaaagaagcagggaaacggacttcataaccagggaaagtattcagatgctgctagtaaatataagcttatgacctaaaactaacagttaaactatatgcaatgttcttgatcaggctaaggataacttaaaaagcataccatcgtctacggcgcatactctgcagttgcaatgtacacttaatttaatggcttgttacttgaagacaggccagtttgatgaatgcataagtgaaggtacagaggttctaagttatgattcaaacaatgtcaaagcatattatcggaggggtcaggcatataaaggactcgggaagttggaggcggctgttgctgatttgagtaaagcccatgaaatttgcccagaggacgaaactattgctgaggttctaagagatgctgaagaaaaacttgcacgggaagggggaggagtgagcacgcggaaaggtgttgttattgaagaagttgttgaagatggcgcttcacagccatcaagcagtgaaagaaattcttctgggtatactgtttcacaaccacctgaaggagcaggaaatattgggctgtcagggtctttagaaaggccaagggatgatcctacttctatcaggtcatcccaaaattatgtgtccaagagcgatcctgaaggcttatcaaacttcggaattgaaggaatgtcgcctgaacttgtcaaaactgccactgatatgattggctcaatgaaaccagaggagcttcagaaaatgttcgaagttgcttcttcattgaatagcactagctccgctggtccaaatctgggacccaatatgccagaaatgtctcctgatatgcttaagatggcatctgacatgattgctagtatgcctcctgatgacgtacagaaaatgatgagttttgcttctcagatgggtgggcctggtggtgcccccaggagttcagagaatattaactttggaccttcagtgagagctacaacgagtaattctgcccgtggatcatcatctcaacctgttttggagaaccctgatgaactatcagatgaccaaaggatgagccagtcatcctctagtcttccaccttctacagctgatatgcaagaaaccatgaggaattctatgaaagaccctgcaatgcggcagatgcttacatccatgatgaagaacatgagccccgagatgatggcaaatatgagcgagcagtttggaatgaaactgtcaaaggaggatgccgcaaaagctcaacaagccatgtcgtcattatctccagaggatttggatagaatgatgagatggatggagcgagcacagaaagcggtagaagtcgcgaagaagacaaagaactggctcttgggccggcaaggcttgatccttgctattgtcatgctgatcctagctttcatccttcatcagtttgggtttatcggcagatgatggggggtgacttgggtggctgcatcagcatggaaatagattgttagatggcgatgcagagttccctcttgctaacaactgcttaaaagcgctttgggggaaggccggattacgagaattctttgtatccgtatcttttgaaagtgtaactctgtccataaagctacatcctatttttaccagcaaaggtagtagaaaggaatcgagccgaaactgttgtgataacaagccgacatgtaatatgataatatccttgtggtgctttcagttttaagtagcagttttgtttaataaagcatatgcaaaaggtgaagtggaacaaagtacatgcgcatacaaagactaactggaagataggcatcttcaattctttaacatgtgtttagtttgggaactatatgctttgctgaga

SEQ ID NO: 25302 - DNA, 1353 bp, Zea Mays
tcaagtaaaactcctccagccccaccgccacctcccctcatgacaggaaagaaagcgcctgtgcccccacctccaccacctcaagcaccaaaacctcctggagttgtgcctccaccaccaccaccaagctcaaagatctcaaatgcaccagcaccacctccattattgggaaggggacgtggcaacacaactggaccaactaaaggccgtggcattggtttggcacaacaaagtaatcctcccaagaaggcttcactgaagcctctacattgggtgaaagtcacgagagcaatgcaagggagtctctgggctgatgcccagaaacaagggaatcaggctaggtctcctgatatcgatttatccgaactggagagcttgttctccactgcagttgtaaccagcacaagtgaaaagggggcaacaagacgtggttcagctattaacaagccagaaattgttcacctggttgacatgcgacgagcaaacaattgtgagataatgcttacgaaaattaaaatgcctctacctgatatgattaatgcaattttggctctggacacttccgttcttgataatgaccaagtggagaatctcattaagttttgccctacaaaggaagagatcgagatgttgaagggttataatggcaacaaagaaatgcttgggaaatgtgaacagttcttcctggagctgatgaaagttccacgtgtagaggccaagctaagagtttttgctttcagaattactttctcaacacaggtagatgaactaagaactaacctaaccaccataaacgatgcaacgaaggaggtcaaagaatctctgaagttacggcagataatgaagaccattctcacattggggaatgcattaaatcaagggacagcacgaggatctgctgttggcttcagattagacagcctccttaagctgtcggatactcgatctagaaacaataaaatgacgctgatgcattatttatgcaagcttcttgctgagaaaatgcccgaacttcttgattttgacaaagacctaatttatctggaagcagcttccaagatccaactgaaattgcttgcggaagaaatgcaagcaataaacaaaggtcttgagaaggtggagcaggagctagctgcttcagaaagtgatggtgcgatttcagttggctttcgtaaggcattgaaaagctttcttgatgcagcagaagctgaggttaggtccctcatttccttatacgctgaagtgggaaggaacgctgattcgctagctcagtattttggtgaggatcctgcacgctgcccgtttgaacaagagtttacatgacgaggatgttgtttatgaggtctgaatccg

SEQ ID NO: 25303 - DNA, 3091 bp, Zea Mays
atggactccatggtgtttgaggttgctgaattggatggagcaacaatgatttgtcacactaacagtaaaatgaaagggaggttcgaagttttgttcctagccttccttgtagcgttgaagatgatgagagatcaaagaagaaaacagtcagagccattttggtcttcaatggtgatgaaaaaatggctaaacatcaggccgaaattaaatgatttcagcgaagacgagtttgatacaggcagtgaggatagtggtatgaggaattgcatgggtattctctacaaatttctttgcttgtatcctcaataatttcacgcaaattagaattttacaccttttctcagacggtactaactctggagatgataataacttctttgagatacatggaaatctcaaatacatgattagcaaatcatcaggtaagattgtttccataaacgcctacagtgatgtctatagcttgactgcgttttaagcagtgttttcctaaatgcttaacagtgggtcacctaccatatagtgactattttggctaaacggccatttaaatgggaaatcaagtttaacataatagcacagctctggcatgtattgtaagtttattgtagcattcattataactagttgactagtgcttgtggagctaaagtttgctttgcttgctacaacattgtagaaaaataccatactgttcctaatggtggcataacaatgattctcttgcagctttaggtttgcaaaattatttctcaaacacgcagcgtcatttcattaagaagaatagagtgtacatagagtacaaggggagaagaatctccaagcacacacactaacacacagatttgcaaaataataccctatcttgaacctgcaaagctcagatttatgcggatatgttgataccctataaatagagtttagaaatgaggatttaaattgtagtggtttctgtatattcacaatatctgaggtaacataatcctgaatggccaggatacaattgatggtcataatttcagcacaacgcaaatcctgtcatgcatgtctcatgcccatgggttttttaaaacttttccggtgttggaatttgttcgatattgtgatgtgcttgattttgagttgtcttctctctttgtaggagagaaaacaattcctctgcgaagtcttcagagaaggaaatcagagagtttacgtgttaactacatcagtaacaaagatggtgatgataggtacatggaatgttgctggaagagtgcctagtgatgaccttcgtcttgatgagtggctttgtacacaagagccagcagacttgtatgttttaggtttccaggaagttgtcccactaagcgctggtaatgtgttgggagcagaggacagtagaccaatacggaaatgggaagctcttatccgccaaacacttaacagttctcagcaaaccaggacaatctgcaaaagctacagtgctccactctcgccattactaaggcctgttgcttcaggcgatgggaaatccaaacctgaagatagagtgacaggaagtttaactcagcttagagattggcaaactagtaagagtgagcttcattgcagctggttcgatgggaccagttcattggactggccagaatatccactcgacactccatcaaaggttttggtgtcaggtacaggcttgaggcgagtcatgagtttggggttatttagctccaactttgtgggaaaccctcgaggtcttgagctccaggatgtagatttgcatgctgggatgagaaggcagtatcatagctcgggaaatcttagcatgttatggtctgaacagcaggagaagcttgatgttttaaattcacttgatcgcttatctgatttggcgtcagaagaagactcaacttttgaagacaccgttgagggctgtgctactcttgggaaaagagaatcttccgtgcatcgtgcaaattatgtgcgaattgtcagtaaacaaatggttggtatacatgtttctgtatgggtttcccgaaaactgaggcgacatgttaacaatctggaggtatcaccggttggggttggactcttgggctacatgggcaacaagggatcgatttccatcagcatgtctcttttccaaactcgattgtgctttgtctgctctcatcttgcatctggtcataaatcaggagatcaacaaaaaaggaatgctgatgtttacgagattttacaaagaacaaggttttcttccttgtttgctgctggtcgtccacaaaagattccttctcatgatcggattttctggttcggggatcttaactaccgcattgacctgccggactctgaagtgcgatatctggtgggtatgaagaagtgggatgaccttttgaagtctgatcagctaacgaaggagctagtaagtgggaatacttttgttggttggaaggaaggcttgattaactttccaccaacttacaagtacgaaaggaatacaaccagatatgttggcgagcttcataatgaggaggagaaaaaaagatctccagcatggtgcgatcgtgtgctatggtttgggaagggtaccaaacaactatcatattggagctccggtctgaacctctcagatcaccggccagtcagcgccgtcttcttggttgaagttgaagtgttcaatcaacaaaaactcgagagggtcttgaacttcaatcctggatttgtttcaaatggggattattacatgatggcagatccttaaaacttttttttttgagccagtggcattgtgcggggtatataaattttgcagtgattcttctgtaggatttagtcctgccattgtgtgaattgccacagtttttttggggaatacaccgataattcgggtaaggatttctattatgttggggccacgggtatcatgtcactgaagtacgcctcgttacattgcacatggaaatactcttaattctcaaaaatccttgagagacgagtgttatctactctactagactactactactattatctattacttgtgtttatgtctataatgttggtttatattggacttgcacacctatttactactttaatactattatcccta

SEQ ID NO: 25304 - DNA, 2543 bp, Zea Mays
agaaaaacaaatgctaccacgctacgctatagttcgccgcctcctcgttaacgttcacacctcctacggcacacccacactgcctttgcctactcccgtcccgtcgcagccgtctcgctcctccgtctccattccccgcctcgtcccgccgcagccgcggccgcgaggagccttccccgcctctcttcccgctcgctgggccctgcggctcgcagccagcattccgggctcctggtcgccgtgagccttgggaggttttgcgcggatctgaggctgcccgggctggggaattcgggctgatacctcgcggcgggagtcgggctgagttgatttggcgagtttaggtgtgcggagggaggaattccgggaggaacagttggttggtctgcgagagtttggtgggcggtagggtggtcgggcgggcgggcgggcgacgtacttgcgccccggaggccgccgtcgctgcttcgggcaagcgatgatcgagcagttcgtcaacttcgtcatccggccgcctcgtgcagagtacaatccagatcagtatttatgggagccagagttcactcttgccggaaggaagtataaaaggctagatttggagcttacgaatgaaagaagtcagaccttaaagtgcagccactatgttcctgctgtcatcccagaaaacacttcccttccatgtgtagtctactgccatgggaatagtggatgcagagcagatgcaaatgaagccgctgtcatacttcttccttcaaatatcaccctttttacacttgactttgcgggatcagggctatcaagtggagattatgtcagccttggttggcatgagaagcaggatctcaaatgtgctgtgtcctttctgcgtaagaataagcaagtttcttgtataggtctttggggacgctcaatgggtgctgttacaagtctgctatatggagcagaagacccctcaattgctggcatggttctggatagtgctttcgctaacttatatgacttaatgatggagcttgtagaagtttacaaaatacgagttcctaagttcacggttaagatggctgttcagtacatgcgatgcgtcattcagagaagagctaaatttgacataatggatcttaatgttgtccagtttgcacccaagacgtttattcctgcactatttggacatgcttcaaatgatatgtttattcagcctcatcacacagaccatattcatcaggcttatgcgggggataaaaatctaatcaaatttgagggtgatcacaattcgccaagaccccagttttattacgactctgtttcaatattcttctacaacgttcttcacccacctcagtttccttcaacctgcacacataaacttgataagtattataaccttggtgcttttaagggtgctgctggtactaatgagagcttattgtatgagatcatcaatggtctacgggcagctggcactgatgcaggaagttcatcagctgctacagctagtttcacgaatgctacaaaatcagtagttgaattgctgacagagagggtaaatcagctatctgttaaaaatgataatgacttggattttcttttggatgaaaaccataaccttactgagatggacggtaacacaggagagtgtcatttagaggataaatcaaacagacaaacagatgaatgctgttcgtataccagctcaaaccgagagagctggggaagatgttcttccttgggtggagctagtgatggattgtcatcaggcgaacagcctgagatacctaatcataagcttaagagcttgacactaagggctctagcaaccccactgagacgggtacaaaggaaacctctcgcgatcccgaaggagaagaatcgatcactgtggaagaggttgaaaaaggagaggcaacagatgggggaaaacatatcccagcgtctgcggttgtgtctccaaggccaggctcgacacaagagaaccaaatcgtcttgacaactgtggatacatatttagctcttggacaaatctgctaggaactcactgatgattcagcaaccgagccgcgccgcaatttggagcttctggcactcagcgccaatcgtgccgtgtacattggttgaacattacctagaaatcttagatcatggattgtcccggacccaatgtgttaactgtcagtctttaatgttcgtttcttatgtttttttccccaatgtaatcctgtaaatttgaaggctagaactgcccatgtacttgtggttgagggagggacaccggttcgttgcttttttcaggatttgtgtagggtttggaggtcgagctgtatcgacagaatctcattttctatgttgctcggtaacgtctctgatttgctatgctggcgtgacatggttgattggttggtgaattgcacacgtgcatcgcatattcacattggttcctgtcctgagccattctctgattttgtgtgggtttgacttcgccatatggcaatcatacgtgttctgcaaatgcgaatccagaatcttatcaccacagcacattccactaa

SEQ ID NO: 25305 - DNA, 2715 bp, Zea Mays
acgaaggcaaagcgtggcagaaaaacgcggggagacaagggggaaacgccgtgagaagtcgccgataggtgcgcgggtcgcggtcgtcgcctcctctgcctccctggcgcccgcttggctcggttctacgcgtatgctgcccttgcgccttgcggcaaacgcaacaacacggagcgggcgtggggagcggagcggtgagcgaggatcgagggcaacgtggcgaggcactcccgagggggagaggcgactttgcttccagttccaggaaagagtgggctataaaaaggcgctcgagatccagatctgggccgatgcgaccgccctcgctgctctccctcaccctcgacgccgcgctcctccgcatcgccaatatcgccgacctctcccacctcccagaccacctcctcatcgacctcttccgtgtaggtacctcgccgcgccctccgccacctctcgaatctgtggcccgctgctgattgatcctgtacttgtaccggtgccaaggctccgcgtgcttggattcggtttaggcacattttgcggcgtggatttagtagtttcggattgatcctggtggctggggctgggtttgtccggtctttcagaggttacgctgcctgatccgttcttgttacgttctgtgccgcgtgcatgtttgatagaacttgtggaattgtaggagggggcgagggttctgatcagttttctacgtgatctcacgctttactaaaagttatcaaatgcggtgatatgtcagcagttttgatcgtgtttccttgtttgatactgcattgatttagttgatcttgttaatgctacctaaaacgaatggatttatggtaaattggtcatgattgttggcaaggtgtggggaaccagtaggggatgccatgccttgatgatgaccatgatgaggcactccacaagcccatagctttgcaagcagtagtgtcacaattcgatccctgaacacacacatttgaaatttggggattatttatcattttctggttatgatgatgtaggtgaaatcatatcacagtcacagcctcacaggagtgtgcgggctgatgtcctcttatgcttatgctgcagaggattcaacattagaacacattttttaatgtgctcttgcatttttattgcagagaaccctcagtgctggtaagctgacagagaaagttctcaagttgtttctagcaaccgactgtgaggatatcatattggctgttcggttgctcaacattaagcagccactcgtaccagtccttcccacaaggtgctctgagagattctagatctgctgccgctcacatcgttttgattacctgagaagatgcctttggaaattcaagatagtgaggttgacatagtgattgcggcactccagcccaacctgaccactttctttgaggcatggcgaccatttttctcccgtttccacatcattgtcgtcaaagatccagacatggcagaggatcttcaaatccctgcaggttttgatctcaaggtttacaccaagtcagatattaatgggttgcttggtgcctcctcatccataaacttatctggtcactcatgccgttactttgggtatcttgtctcacgcaagaagtatgtgatttcaattgatgacaattgcctcccagcgaaggacactgctgggtcgactgttgatgttgttgcacagcacatggccaatctgaaaacacctgctacacctttctttttcaacacactctatgatccatacaggaaaggtgctgactttgtccgtggttacccattcagcctgcgcgagggggttgagtgcatgctctcgtgtggtttgtggcttcataatgctgactacgacccgatgactcatgttgtgaagagaaatcaacggaacacaacatatgtggatgctgtgatgacggttccgcttggtgccatgctgcctgtgagcgggataaatgttgcattcaaccgcgatgtgctggggcctgctatgttcccaggcctgcgtctacgaaacgaagggaagcacagatgggatacccttgaagacatatggaatggcttatgtgctaaagtagtctgcgacagcttgggatatggtgtgaagaccggactgccttatgtgatgagaagtgatgcagaagcaggtaaagctctggagagcttgaaagagtgggaaggggtaaaagtcatggatgatgttctcccattcttccagtcgctcaagctatcgaggactgcagttactgttgacgattgtgttaaggagcttgctggagttgtccgtgagaagctaggacctaagaatgcaatcttcaccaaagcagccgatgccatggtggaatggaacaatctctggaaagtgcatggtgctcagaatgcatagtttgggagtttgcatgtttcctacagagcatctaatagttgtttggagtgcgcgttttacagttctaaattttccctgtggaactcatgaagctgaaataaacaacggtcctttatgccgtgaatttggcatgaatagctgagcatctcattgtatacgcttaagaattatgtaatgtaatgcatcaaaagaacatgtgatgttttcttgcatcttgtcttgttaaacggaatctgctaagaggttggataccagctcagctcagcagaacctctgggcaggcgctgtcaaaatctatgaaagcatttgctgtataccagatatgtttc

SEQ ID NO: 25306 - DNA, 2230 bp, Zea Mays
cacggcaaaattcagcttcccaccaaaccattcggaccatcctcccacttgcgcggctgcgcccgccacgccaacgcgactacgcgagacgccaccaacccaagccactctcccccgtttctaggcttcacagcctcgccaacaactcccgtcctccacttgcccttctccgccaacagactgtccccggccgctgccattgccgattgctcacatccgcgttcgtgttcgcatccgcatcagggtcacctgcgccggcgagccatttgaaagggaggagtagcagactctcagaggtggacatgacgctgttgtgcgtgccgctggtggggcggacggtggaggagatgattacagacgcggcggcggccgccgccaccggcggcgacatggtcgagatccggcttgacttcatccaggggttccgcccgcgtgagcacctaccgcccctgctccgcggctgcccactcccggccctcgtcacctatcgacctgtctgggaaggaggccaatatgaaggtgatgacaccacaagatttgagacactacgtttagcaatggaattaggtgtagactatgttgatattgaattgaaggttgcagacaaatttatgagctttattgctggccataagccagagaaatgtaaacttattgtttcttcacataattatgaatatactccatcatgtgaggaaattacaaatcttgtcgctagtatacaagcagttggagctgatatagtgaaagttgcaacaaccgccaaggacattgtcgatgtatcacggatgttccaagtgatggtacactgccaagtgcctatgattggactcgtaatgagtgaaaaaggtttaatgtcaagagtgttagcgcccaagtttggtggatatcttacatttgggatactgaatgctacaaagacatcagcttctggacaaccaacagttgaggacttactggacatttacaacataaagtgtattgggcctgatacaaagattcttggtcttatagccaacccagtaaaacagagcaagagcccaattttacacaataaatgtcttcagtccattggatataatgctgtttatcttccacttcttggagataatcttgctagttttctggagacatactcatctcctgacttttcaggatttagttgctcacttcctttcaaagtagatgctgtacagtgttgtgatgaacatgatccagttgctaagtcaataggagccataaacactataattagaagaccagatggcaaattagtggggtacaatacggactacattggagctatatctgctattgaggatggcattggaggtccagggtcaaaggatgctgtcatctcaccattggctggtaggcttattgttgttgtaggagctgggggtgctggtaaggcaattgcttatggggcaaaggagaagggtgcgagggtagttatagcaaatcgcacctatgagaaggctgtacgtcttgccaatgcaattggtggtcaggccctgagattagaagacctggaaactttcagacctgaagaagggatgatccttgctaatgcaacatcattggggatgtacccaaatgttgatgaaagccttgggtttctatgatgtggtatttgatgccgtatatgccccaaaagttactcggcttcttcgagaagcagaagaatgtggagttaaagttgttagtggtgtggaaatgtttattagacaagccatgggtcaatttgagcatttcaccggtggtatagaagctcctgaaagcctgatgcgtgagatagcagcaaaatacacctagcaggctaatggcgaaaacctatctttgatgaatatttgcccaaagattttctcgggctgagtgaataaatgttttgcagttatcatgtttgctgttatgttagatttagccgacttgtcacctgcacactgtaagattatgttgccatgctatagtgttcttgtacctgcaatagaagagttgcaagaataaagagtcagcttagaaccaacgttatgatgaccaagggggaaaatatgcatcaaacaatgattcagttggcagttggttcagtgctgatcatggcggttatactgtcctgcataatttcattgtacggttccgatggcatatttctttttttggaaaaaggaaaatttattgataactcagaataatatcaagattatactgttacaaataaagaggctcaatt

SEQ ID NO: 25307 - DNA, 1538 bp, Zea Mays
gcatgttataagtaacagcaggattatttggggatggactactttgatgcaaggcggaagcctcataatgttggtaaaatcattgcagccctggtcctcacaacactctgtatatttgttctgaagcaatctcctggttttggtggcaatagtgtgttttctcgccatgaacatggggttacccacgtcttagtaacaggaggagctggttatattggttcacatgctgctttaaggctcttaaaggataactatcgagttactatcgtggataatctatctagaggaaacatgggagcagtaaaggttctgcagggcttatttccgcagcctgggagactacaattcatctttgctgatctggggaaccagaaatctatatttgctgaaaatgcatttgatgctgtgatgcactttgcagctgttgcttatgtgggagagagcacattggaaccccttaggtactatcacaatattacatcgaacacactactgattttggaggctatggcatctcatggagtccaaacccttatttactccagtacatgtgctacctacggagaaccagataagatgcctattacagaagccacacctcagttccctatcaatccatatggaaaagctaagaaaatggcagaggatatcataatagatttctcaaactcaaagggagctgacatggctgtcatgattttaagatatttcaatgttattggatctgaccctgagggaagattaggtgaggctcctaggccagaacttcgagagcatggtcggatatctggggcttgctttgatgcagcattaggagtcattccaggattaaaggttaaaggaacagattatcccacagctgatggaacctgcataagagattatattgatgtcacagatttagttgatgctcatgtgaaagcactcaacaaggcagagcctagaaaagtcggcatttacaatgttggaacaggaagaggtcgctcagttaatgagtttgttgatgcctgcaagaaggcaactggggtcaacatcaaaattgagtacctcaacagaaggccaggagattatgcagaagtatacagcgacccaacaaagataaacaaggagctcaactggacagctcattataccgatctcaaagagagcctatcagtcgcatggaggtggcaaaagtcgcatccgcgtggctacgggccaaactaaatatagcctgctgatctataattcacttaatcgtcaatacatattagttctttagttagagatacaagatcttgctgcgatactcctcaaaatcagtccttcgtattcttctttctctcgtcctttttatttcaaaagtttgcatttttggctagcagaaacatgaatggtgatttggatgaaaaaaaggacctgtgatgacaatttcattgtttctgacacattgttggtaaaaaaaatgtaaattgcttcagccaatgagctgcaagattgattgaattgagttaagaaaaaaacttgtgttgcgatccttgatctccagcagtttttcc

SEQ ID NO: 25308 - DNA, 5489 bp, Zea Mays
ttcgcacgcggacgcggcacgcctccggctcccctctcgaaattcggttccgattcggttcccacaccagaccgaaccaaatacgcgctctcgtgctcgtgcgcgcgcgtcgcctcccaccccttcgtccgccgttgccgcccgcactctcccttccgccgtcgtgggcgcgcggcgacggggagagaggcaggtgaggtcggaagcggcggcggaggcgggcccccctccgtctactcttactcacgcacaccacggcgcccgcgagctagcgccctagcggagcggaggtcgaggcgggagaaaggcggttggggctccccggtgggcaggggggggggggggggggtcggaggcggggatggggctcgacggcacggtctcgggggtggtgtcgaggaaggtgctgccggcgtgtggtgggctctgctgcctctgcccttcgctgcgtccccgctccaggcagcccgtcaagcgctacaagaagatcctcatcgacatctttcccgcggagcaggaagacggaccaaatgtgaggaggattgggaggctttgcgagtatgttgctagaaatcctcatcgcgtgccaaagatcacagcttacttggagaggaggtgttacagggagttgagaaatgagcagtatgacattgtgaaagttgttgtgctaatataccgcaggctattggtctcttgtaatgaacaaatgccgttactggcaaatagtttattaagcatcatacaaacacttttggatcaatcaaggcaggatgacatgtgcatcattggctgtgaaaccttgtttgatttcatagtcactcaggtggatggtacatatcagttcaatttggaagagtttattccaagactctgcaaactttctcaaatagtaagggacaaagagaaggctaatgcactccgtgcagcagctctgcaatcactctctgctatgatctggtttatgggtgagctctctcatatctcctcagagtttgatagcgttgtccaagtagtattggaaagctatgagcctcgacaggtgcaaagtgacaatagtgccactgaaaatccaggttgtcagttggttgaagaggtccttaaacccgagggtcatgcctctccatcgacatttatattttctgtgataccttcttgggacagcatagttagtgactatggaggaattcaactgcttatggatgatgccaaggatccttatttttggtcaagggtctgtgtgcataacatggccaagctgtccagggaagcaactacattccgccgtgttatggagtccctattttgccacttcgataatactaattcatggtcatccaaaaatggtcttgcactttgtgttctattggacatgcaaatgttcatggaaaagtcagggacaaacattaatttgatgatatcagtactagttaagcatctcgaacacaaggccatactgaaacaacctgagatgcaactcagcattgtcgaagtgataactgctcttgcagaacaatcaagagctcaggcttcagcagcaaccatagttgctataagtgaccttgtgaggcatatgaaaaagacactgcatttagctcttggcagcaacgatttggaggtggtaaagtggaatgacaaactccgcatggcttttgatgaatgcatagtccagctgtcaaagaagaagaagaaggaggacctgctgagggagattgccaagaagaagaaggaagaggaagagaaggagaaggagaggaaggctgccgctcctgagcagcctgccgccacaacaaagcggcgcaacaggtgggatcagtcgcaggacggcgacgctggtgccggtgccaagaaggtgaagacatcctcggactgggatgcccctgatgcgactcctgggattggccgttgggatgccacccccggacgtgttggagacgccacaccctccgtgagaaggaacagatgggatgagacaccgactccagggaggatggccgatgctgatgctacgcctgcagctggcggtgccacccctggggctactccttctggggcttgggacgcgactccaaagctgcctggtggtgtcacgccaacccctggtaagaagcagagatcaaggtgggatgagacaccagcaagtatggggagtgcaacccctggtagtcttggtgctgcaacacctgctggttatactcctggtccaacgccatttggtgcagagaaccttgccacaccaactcctagccagattgctcgtggaccgatcactccggagcagtaccagctcatgcggtgggagcgggacattgaggagaggaacaggcctctcactgacgaggagcttgatgccatgttcccgcaggagggctacaagattcttgagcccccggcttcctaccagcccatcaggaccccggcaaggaagctccttgcgacaccgacacctctggggacaccactttatgctattccagaggagaatcgtgggcagcattttgatgtgcccaaggagctgcctggtgggttgccactcatgaagcccgaggattaccagtactttggaactttgctgaacgaggaagaggaggagcagctatcgccagaggagcagaaggagaggaaaatcatgaaactgttactcaaagtgaagaatggcacacccccacagcgtaaaacagcacttcggcaactgacagacaaagcccgtgaatttggtgcaggaccgttgttcaacaaaatactgcccttactcatgcagccaacactggaggaccaggagaggcatcttttggtgaaggtcattgacagagtactttataagctcgatgagctggtccgtccttttgtgcacaagattcttgtggttattgaaccactgttgattgatgaggactattatgctcgtgttgaaggcagggagatcatctcaaaccttagcaaagcagctgggcttgctactatgattgctgctatgcgacccgacatcgataacattgatgagtatgtgagaaacaccactgctagggcgttcagtgtggtggcttctgctttgggtatccctgcccttttaccattcttgaaggctgtctgtcagagtaagaagtcttggcaggctaggcacactggtatcaaaatcgtccaacagattgctattctcatgggctgtgctgttttgccacacctcaagtcactagttgagatcattgagcatgggctgagcgatgaaaaccagaaagttcgtacaattactgccctttctcttgctgcacttgctgaggctgctgcaccatatggtatagaaagttttgatactgtattgaaacctctgtggaagggtatcagatctcaccgtgggaaggtccttgctgccttcctaaaggccattggtttcatcatccctcttatggatgctctgtatgctagctactacacaaaggaggtgatgcaggtcctcattagggagttccagtctccagatgaagaaatgaagaaaattgttctcaaggtggtgaaacagtgtgtcagtacagagggtgtggaggctgattatatccggaatgacatccttccagatttcttcaagcacttctgggtgaggagaatggctctagatcgcaggaactataagcagcttgtggaaactacagttgagatggcaaacaaggttggagttgctgatattgttgggagggttgttgaggatctgaaagatgaaagtgagccctacagaagaatggtgatggaaacaatcgagaaggtggtagccaacttgggtgcatcagatattgatgctcgtctggaggagctgcttattgatggtatcttgtatgctttccaagagcagactagtgatgacgcaaatgttatgctaaatggttttggagctgtggttaatgcacttggacagagagttaagccctaccttcctcagatttgtggtactatcaagtggcgattgaacaacaagagtgcaaaagttaggcagcaagctgctgatctgatctccaggatagccatagtaatgaagcagtgccaggaggagcagcttatgggtcacttgggtgttgtgctgtatgagtacttaggagaggagtatcctgaggtgcttggttcaattcttggagccttgaaggctatcgtcaatgtcattggtatgactaaaatgactccaccaatcaaggatcttcttcctcgtctgacccccattcttaagaacaggcatgagaaggtccaagagaactgcattgatcttgttggtaggattgctgatcgtggagcagaatttgtgccagcaagggaatggatgaggatttgttttgagctgctcgaaatgttgaaggctcataagaagggtattaggagagcaactgtgaacacatttggttatatcgcaaaggctatagggccacaggatgtgttggccaccctgttgaataacttgaaggtgcaagaacgacagaaccgggtctgtacaactgtagctattgctatagttgctgaaacttgctcacctttcacagttttacctgcccttatgaatgagtaccgggtcccagagctcaatgtccaaaatggtgttctgaagtcactctctttcctctttgagtatattggtgagatgggcaaagattacatatatgccgtcacccccttacttgaagatgctttaatggatagagatctggttcaccggcagactgctgcatctgctgttaagcacatggctctaggtgttgctggcttgggttgtgaggatgctcttgttcatctgcttaactatgtttggcccaacatatttgagacatctccccacgttataaatgctgtcatggaggcaattgaggggatgagggtcgcactaggtgcggctgtgattttaaattattgcctgcaaggtctcttccatccagcaaggaaagtacgagaagtgtattggaagatatacaactctttgtacatcggcgcgcaggatgcacttgttgcttcttatcctgccctggaagacgatggggataacatctttagtcgtccagagttggcaatgtttgtctgattaacgctggatgtgcatgtccatgtgtcttcatccatattcttatgaagcttgaactggggtacctcatgttgcagctgctgaagcgttacactggatttaggaccaatcctaaggctgcagcatgccaattaatccatcaagatcctatattgtgaaggacaaatgacaatcctagcgcgctgtcatctttttatgaatattaggcgttgggcatttaccgtgttttaaaactttgtattacacatggatgttgtattatgtggtgtggacaatggaacgttgcaagctgacctgaacctgattccttactgtattactgagatgttgatatgcatgtcatgttagtgtacgttgtgttctccttgtcattttgtttgtgatatcgacatgctatgtttgttgctgaagttgagcacaaatgatttgttggtca

SEQ ID NO: 25309 - DNA, 3060 bp, Zea Mays
atccctcccccagactccactcatgtgggagcctccgtcactgggcacagatgagggacttgtctggctttgttgagactaggcaacaacttttgtcgttaaagccaaatcaccgcatgaactggattggttttgcggttgctcatcatttgaattctaattcttccaaggcagtagaagtattggaggcatacgagggaacactggaagatgattatcctccagagaatgagcgatatgaacacaatgaaatgctgctgtataagatatcattgtttgaagaatgtgggatgctagacagagcccttgaggaaatgcagaagaaggagagcaaaattgttgacaagctatcattcaaagaacaaatggcatccgtcttgttcaaacttggccgctttgatgaatctgagagcatatacagatccctgctttttatgaatcctgataactacaaatacttcattgctgtgcaaaagtgccttggcttatactctgataatggtcaatattctgctgctgatgttgagcgcttaagtgcattgtacaactcacttaaagagaagtatgcttggtcatctgctgtgaagcgtatccctcttgattttctggaaggtgagaagttccaggaggcagcagacaactatgtcagacctctattaacaaagggtgtgccctcactattttccgatttaagcccactgtatgaacatcctggcaaggcaaacatactggagcagttatttcttaaactagaagattcaattagggattctggatgctttcctggatgtccacagaaggagcctccttccacactgttgtggaccctgtttttgatttctcagcactacgacagaagagggcaatatgacattgctttgaataaaatcgatgaggctatctcacatacaccgactgtcatcgatctatattcaggaaagatattgcaacatgctggaaatttcacagcagcagccgcattagcagatgaagctaggtccatggatcttgctgatcgttatttaaacagcgagtgtgttatgcagatgcttcaggctgaccaggttggccttgccgagaagactgctgtcttgtttacaaaagatggtgatcaacacaataatcttcatgacatgcagtgcatgtggtatgagcttgcttctggggagagctattaccgtcaaggtgatcttggccgggccctaaaaaatttcttggcagttgaaaagcattacgctgatatgactgaagatcaatttgacttccattcatattgcttgcggaaaatgacacttcgagcatatgtttctatgctgaagtttcaggatcgtttgcatgctcatgaatacttccacaaggctgctgctggagctatcaggtgctatatgaaactacatgattctccaacaaaatcttctaaggaagagaatgatgagatatcaaaactgccacctgctcagaggaagaagttgaggcaaaagcagaagaaagcagaagcgcgtgctaaaagggaggctgaagagaaacaagaggatgaaacagcttcatctaacagttcaaaatctggcaagaaacaacatgcaagaccagttgatctggatccacatggtgaaaaattaatccagattgaagacccgcttgcagaagccacaaaatacttgaagcttctgcagaataactcgtcagactcattagagacccatatactttcatttgagctaagcatgagaaagcaaaaggttttacttgctttccaggcagttaaacagctcattaaattggatgaagataatccagacagtcaccgttgtttgataaagttcttccacaagataaacagtcttcctggacctgtgactgattctgagaagctaatttggaatgttctggaagctgaacgacctgacatgaggcaattacatggaaagtccctcgttgaagtaaacagaagtttccttgaaaaacacaatgcttccttgatgcaccgagcagctggtgctgaaatgatgtatctcttagagccaaataagaagatggaggcaattaatttaattgaagattcaacaaatattacatcatcagggcatagtttgcttggtcctgtaaaaacatggcaaattcaagattgtattgatgttcataaattgctggagacagtctttggtgatcagaatgttgcaaataggtggaaggcacggtgcgcggaatattttccgtactcgacgtactttgaaggcatcaagagcgctatttcaacctatgccattgaccatagtctcgagagcccaccagaaaatggaattgcttcaaaccctcatctgaaatcaaaagatggagaacaagggagtttgaatgggactctgcatattgtagatgatttgagcagcctaagcattcggtaatgcacgaacaagttgctgaatggtcacaactggaacacaacattttagaactggagccagtacccaattaaccaaagcgtacacgaacaaggggaacaaagtgctctggtgcaagtagttgtcggcacatcacatatgaagagtatattattgattgggagctgaggtgtccagtcaggttattgtcttggttccagcctgtacctttttgttgccattttgtagacagggaaagaaaaaaaatcttccgtctcaattacggtgaagttgtgacagcgtttgttgcctagcgatatcagggtgtgaccattcgtttgaaacagtgctccctctctttttggactacaaaattttggcacaaagcaggtgtacaaggttaaaccttttaaaactttcatctatttgtttcgggatagtttggtgtgtgggggggtttgtcttgatcctttgtgctactgcaacatttggtcctcgacattgtaaattagttaatcttaaacatagaaactgtattccagttgtcatgacaaataatgatcaatgttaaccctgggtgtttgatctattccatttgggatgcgttgaaaagcatgcattgtcggatttgaagataaaaatccataatgttacatttattaatcatacttgtatagtgacc

SEQ ID NO: 25310 - DNA, 1750 bp, Zea Mays
tctgcgctctgacattcgcctcggcctctctcggccggcctcttcgtttcctcctcccagccgaccggccagccagccagacccacccaccgccgatccccacgcaaggggaacaggagaggaaacaaacccagcctcgtacgcggaaggcctgcctggtgatcgacgatcgtcgtgctcgtggtggcgggtccggcgtgcgagcgagcgagcgcggcgcgcatggcgagcgacggcgaccacggcggcgcgctgcagaagccgctcttgccgaaggcgcccaggagcgggggctggttccggaaaggtacgagcacggcgcgcctcggcgccgccgctgccggcacctcgtccaaggccgcagcgctgcggccgccgcaccacgtgcccgcgctactctgcacgctcgtcgtcgcgctcggcaccgtccagttcggcttcaccagcgggtactcgtcgccggcgcaggacggcgtcacgcgggacctcgacctctccatctccgagttctcggtgttcggctcgctgtccaacgtgggcgccatggtcggggcgatcgccagcggccagatggccaagtacgttggccgcagagggtcactgatgattgcggcggttccgaacgtcatgggctggctcgcgatctccctggcaagggacacttcgtttctgtacgtggggaggttgctggaaggattcggtgtcggcgtcatctcctacgtggtgccggtatacgtagcagagatatctcctcagaacatgagaggagctcttggcgccgtgaacccgttgtctgcaacctttggtgtcgtgtttgccgatgtgcttggcttgttttttccttggaggcttcttgcgttaataggaaccttgccctgcctactgttgatacctggactgttcttcattccggaatctccaagatggctggcaaggatgaatatgatggatgagtgcgaggcttctctacaagttctgaggggggtggacgctgacatcactgtagaagcgaatgatataaagatagctgtagcatcggcaaacaaaagtggtgcaatgagctttcaagagttgaaccagaagaaataccgcacgcccctaattctaggaatgggcctacttgtgttgcagcagctgagtggaataaacggtataatcttttatgcaggtagcatcttcaaagctgcagggctcaagaacagtaacttggacacatgtgtacttggagctattggggttcttgctagtgttgttacaaccaagatcttggacagagctggacggagaatccttcttattatttcttcgtctgggatgactctaagcttgctcacggttgctgttgtattttacatcaagggcaacatttcacatgactctgacttgggtaacaccttaagtatggtgtctttgattggtgtcttggcttgtgtcactgcttactcctttggtatgggtgccattccatggatcataatggctgagatccttcctgttagcatcaatagcgtggcaggaagctttgccacccttgccaactggctgacatcctttggaataacaatgacagcaaatttgcttctaagttggagtgctgcaggtacatttgccttgtacatgatggtgagtgctttcacggtcgtcttcgtcatcctttgggtgccagagacaaagggaaaaaccctcgaggagatacaatggttcttccagaaagattctgatgtctttggcctaattagttacttcatgt

SEQ ID NO: 25311 - DNA, 271 bp, Zea Mays
gtttcgtgacttacgcaatttatggagcaccttaatgagcatcacactagcacattaatttactcatcgatcgaactattctaaataatttatcagcttaccgtttccacagctgacacgaatccacgagatcggtagcgattttccgatccaagcaatttgtcgagcgcttagggaatatcgcgctgctagcttcgtcttcacccgattcttgggatttttttactgacgcgcggaacgacgacgagatcgtgtccgagtgaattttatg

SEQ ID NO: 25312 - DNA, 1059 bp, Zea Mays
gagaaatgtgtactcttatcttttcttggcaagcagtccatggttgttcgacgaagttctcatgaagcagctcatttttatggttggcctggtattggacgatcatcattatatggtaggcatggtaggatggcatacccaagagctgttcaccccggtggttcctttagagggcgtgctccgatgaaagctggcgctagaagtttacagtggaaacgggagccttcaggcactgattcaagtgcaggtgcgaaaaatgacatgagtgtgccattttcctgtgaacaggtcctcccgccggcaacataggggagcatactatagctgatataatgagaactgaatggtatgttactcgtcgcccctaatggctgaatatggaaagcaagctgagaagattgttccttcctgatgcagcgtaaaacaaaagtccgaaaaaacatgaaaatacaaaaaaaacaacaactaaaacttaaggaaaaaaagagggggagtttggcattaggatatggcttatcattctggtaaccggattgggtcgtctttgccatatgcgagtaggatgacagcctgagcaattttctgtggactccagctatctgaaaaaaggattcacattcgaaataatcacaacatttgggttgtgttggatggaagatgcttatcagtagaacaagatgggcagattttggacgagctactcatcatgtgggttgacactgctcgtcgttggaggacttgtatatatctttttttgcggggaggacttgtatatatctggccattagtttactgactaatggtgcatgctttgggaaaagtaatttgttggaagcttatattaactctaaaaaggcaaaaaatggcctttttcttctgtcttgtttccttggaatcacaatgctttatgtggtaaacatctttggttctcggatgggtgcgggtatggttgcgtaggagcaaccgttatgcatttatgtactctcaagtattctagtcactttaggtttataaatgtatatatggatatggacacaggatgtacttgatatgtgcgcg

SEQ ID NO: 25313 - DNA, 1250 bp, Zea Mays
ctgccatgtgccagcgcatgagtggagactggagaaagagccctactaccctagctaagccggcacagcggcggccggcgatacacgtgcgagcggcggcgtgaggaaaggcgggcggggtgagagatacctaaccactaagcggctgcggcagcgccgcagcataaccggcaccaggtcaaaaaacgacgactgggcaggcaccgtatgcatatcctgaatttcagcaccgcatacactttctacagggcccttgccacaccagacaagcacagacaaacacgcgagcggcatgccatgtcatcaccggcagcaaggagcatcacttgctactccaaaattccagagttcttggtgggcactaatgggcagccaatgcccgcagtggggctcggcacagcatcacacccatttgtggcggaggatgtcaggacatccgtgctcactgcgctggagcttggctaccgccacatcgacactgcgggactctacgcctctgagcgagttgtcggcgaggccatggctgaggcagtgtcgtgcggccttgtggcgtccagggacgagctgtttgtgacatccaaggtgtggtgcactcaatgccatcctgagcttgtgcttccgtccctcaaggagagcttgaagttgaattgaatcccacttggcaacagaaaaaactaattgagttctgcaatgacaagggtattcatgtgacggcttattctcccctaggaggccaaagaatctctaaactgaatccagtacgacaatctgacatattggaagagattggaaaggctagagggaagtcagtggcccagatttcactgaggtggatatacgagcaaggtgcaagcatggtggcaaagagcttgaaaagggagaggcttaaggagaacattgaaatcttcgattgggaattgagtgacgaagatcggtttaagattggtcagatagcacagcgcaagttggtcacagtacagaatctcctgtgtcctgaaggtatctccagtgtggatatcttggatgttgatgttattgaaatatagctgtggtctccatctatttgcaatgggcaaaagaattggtgtacaacatgttggatacatcagaagcagtctttcacgtttctatgtactaatgttcatcttgctaaattcacatgtgcacctttctattgtcaccaatacttttgtaccattttctggattaatctactattaaaaatgcaaaaatatataacgatccaaaaa

SEQ ID NO: 25314 - DNA, 1417 bp, Zea Mays
gttgtggagtctgctgaagaacgagttggagtctgggagacgtttagacaaacacaagcaaattttttttcaatcccgcagagggcaaaaccgtccaacgagacaaccccgcgcagaggcaaaagccccacgcttgagagtgagaagaaacagacgcatcgcttccttgtccatcctacctccccttccccccgcccaaatcccgtgacggtcgccgcccccgccgtgctctcgcccgcgcgggagacgacgcagcacccccccgcgtaggatccgcggcggtcggcaggatggtggtggccacggaggaaatggtggtctactgctttgacaccctcgtcgcctatttcaccggcgagcggccgccgcctcccgccttcgaggatggaaaccacccattgtttgtgacctggaagaaggctgccaatggttcagaaccacgcctccggggatgcataggaactctggagtcccgtcagattgtcagcggctttagggactacgccctaactagtgcgctgagggaccgacgctttcccccaatacaatcaaaggaactcccaaccttggagtgcacggtatctatactcactgattatgaaattgcagaggactacctcgactgggaggttggaaagcatggtttaattattgaatttacagctccagactccaacacaaaacacagtgcgacctatttgcctgaagttgcgggccatgaaggtgaaaatttcctttttcatcgatgcgatgtacacttatcgtttctacagagttctttagtttctagaattattgcaggggataataagaagaaatgagttaagaaaatatgtaatttcatctttctaaatcatcatggaccaaatgcattataatgagcaataacggttggacacatgtagaaactattgattcactcgtgaggaaggcaggttaccagagaatcatcactgagtccttgaggaagaaaatcaaagtcactcgctaccagagcaccctgtacacgatgcactatggtgaatatgttgcgtacctcaagaagaacagaggtgcagccccgtcaattagtggggctcctcctgtagttaatggcttcaagccaagccattgatttatcagtataaaaaaaagctcaaagaacatattactataatttatctgcgagcaatttggggggtgtagtgtaaccaccccccacagttcattgatctagcatcattcccttccaaggaaaaggccaaataggggcgtcatgacaagcgcccagaataataatgccttcctggatggatcatggatgatgcttatgtatcttgaaaacacatgtgcttcaagaagttcaaattgtgtggtgaagttaattgattcgagttggccattcctagttccagtgatttgtctctattcttaactt

SEQ ID NO: 25315 - DNA, 2248 bp, Zea Mays
ctccccacgtgcggttggcgcgtgatcccggtgtcagcatttcgggaaagtaagtcagatgacaggagattttacatattttcccccactaagacgcttcacttgaagacaaactcaaaagttgaccgtgttgcctggattgaggctttgatcctggcaaggagtgtttattctcttgggtcacttagcgggagagcaacttttgtgcagagtgatgtttcaatttcaactgcaaggcttagagatcgaatgcatcaggagggtttgaatgagagtcttatacaggactgtgaacaaattgtgctttccgagttctcaagctaccggaagcaactgaagtgtcgttacgaggattacttaagcttgtttgggtcctgcagacataattttgaggaaggtaaagatggaagtataacacaggggacattgacacgaaatgacttctctagttctaggcatggaaattttagcgaatatagcacaacagaatctgatgagcatgagtttgagaaacacgatggaggcgaattgatttgtgaagatgaatctgcattctttgattctatagattacttcacagagtcagacaacaggtcttcaaccatgttaagtggcaaggaagtagtggattcccaaacacatgattccagtaataatatacaagcacaaatcagacgacggagtaggctgcctgaccctattgagaaagagaaagggatcagtctctggtccattattaaagatagcgttggaaaggatttgacacgagtttgtcttccagtttacttcaatgaaccactctcatcccttcagaagtgctttgaggatttggagtattcatacctcttggatcaggcatatcaacatggaaaagtgggggacagcctcatgagaatcctcaaagtagctgcttttgcggcctctggctatgcttcatctgttgcaaggccttgcaaaccattcaatccattgctaggagagacctatgaagctgattaccctgacagaggaattcgtttttttgcagaaaaggttagtcatcatccaatgctgattgcctgccactgtgaaggcaagggctggaaattctggggcgacagcaatctcaaatccaagttttggggacagtcaattcaagttgaaccagttggcattttgactctagaatttgaggatggtgaaatcttccaatggaataaggttacaacaaccattcacaatctcattcttgggaagttgtactgcagccaccatggaacaatgcatataaaagggaatcgccaatattcatgtaaactgaagttcaaagagccatcacttcttgaccggaatccccatctagtacaaggctttgtagaggacaacaatgggaacaaagcttcgtttttgatagggatgtgggacgaaagcatatattgtagtaactctgatacttccaaggtgaagagcgccgatcaactgaaaggtgcctcgctgctgtgggaaaagaacaaacctgctcctaacccaactcgatacaatttatcttcattcgcgatcacactgaatgagttgaccccagggctgcaggagaaacttccacctactgattcacggctgagaccagaccagcgccacctagagaatggtgaatacgagaaagcgaatgcagagaagctgaggttggaacgacggcaaagaatgtctactaaacttcaagacaatggctggaaatcccggtggttcgagcaagacaccgaggacgggacgtattgctacaaaggtggatactgggaaacaagagagaggggcttctgggatgggtgcctcgacatttttggggagttcgtggagacataagtgccctgttcctgcagtagcagaggttcaagcagccaacacgccacccagaaacaatggagtactgccatctccaatggagcatcctcttgcctctagaagagaagggggaggagccctgtgcgaggagtagagcattcgagatgtgaaggcattgtgccttgaatggtagcatagcatatgattggccacgaataggcattgccaccttgttagtatagtatagttcgatccaatgcaaataagaatgctgacattcattctttggttccttcttgcgttgaacatggatctgttgtcgtggaagaaatttgcttgctcggctaggcaaaagtctgcctacactgtatttgtttgccgatcgaaaaccaaagcaagtcaccatctataactcttcacttccatgaga

SEQ ID NO: 25316 - DNA, 1578 bp, Zea Mays
agcgcaacaccgcctcctctctcagccagtcagccttatccccaaatcgcttcttctctgctgattccataccgcctcctctccctggccgatccatggtgctcgtctctagctcatgtcttgccgccggccgagcccctccccagcgcccttggagccggcgtcctctgccctcatctcattccccgacgccgccctctccccctcagtgctctgctggtcggcgtcttctccctgcccgacgtttctagcgccatggccgccgcgccttgggtcgcctgctccactgcgccgatccgcccatctccctgctgccgctctcccatggcgcgtccctgcatcttgcttcagctcgctctgccatctcccttggcgccctagccccaacgctgagctccctacccggccgcgcccctggtggttgagctcgccgagcttccttttctatcgctcgtcctcgcccattcggcgccctcatctcaagccagtccagcctctctaatcgccactctcccctatccccttgctgttagcacatggcgagctaaccccatgtgccagtagagttcgtcattccctaagcagcacctccctccatggatgcctcgttgtcgacttgtgcagttcatatttatcggtgaggtcccttttgtcttgtgttacttatctctttaaattgatacatgtgtgcttatgtgtgagatgtgaaggggaaaatcccaggattttggtggagaagaaagcacagttcaaatttgacgcccgccaggtgttcgacgaaaatgttcgaattgggtttcgtcgttgattttgacgcctgccaggtgttcatctcaaactacaatcaccgttgaaaatccgaggcgacgggaaagttaggtggcatcaccagtgatggcgttcgatccttgaaatgtacattatgtgataagagtaagcgtcactagagaatgggaattccaaggcgcaacaaatgatggtcctctccatcatgtcaacatgatcatatccgatgaaccggtgatctatatccactcaaatacatttatggtagcaacatgttgtacctaatatgtttttttatcacctgttaatattgatgccagctgtacaaacggttctgattacttatatcctctgatgtacttctacttagcaccatgttctaacttacacattgcttagtcacctctccagattgtacctttactcttttaaactaatatgtttattactaattttttacgaagtacaatcatgcaacatggactgtcaatgaatctaaataccatatcatttttctacaatgtcttctatttctactcatatgattctgttgtaccaatagggtacacctatccatgctaagattcaagtagataaagaatatgaactcatcttaagtctgtactatgttgtatactataatgttttatctggttgacaaccagcatcgtcactttaaatacaatcatactacagttctactaatacactgatttattgttctccacgcgcgcatgggcgcgcataatacactagtgtatacaagacagcctcaattcatctcctaacaaa

SEQ ID NO: 25317 - DNA, 702 bp, Zea Mays
ccaagccattccctcggccgcgacatcaacggcaacgagcatggcccccctctacctcctccaccttgccgtttgtggcctccgcaccgccccaacgtcgacacctccgtcctccccctctactcccagcgcaccaccgccgcgtatgcgctatcccacccgatggacgtgttgccgcctctgcagcacgccctgtcgctgccgaccccgcccagccatgcatttggagtttacaatgtggagacatggtttatccaccggacggcgaggtattatgcacaggctttggagttcttgatgtttcctgtttgtgtaaactcaaacgccgaggattttattgaagcaataaaagggccagatgctattattgttggctatatcagacagtttgtcatcaagcctttgtttggattcctttttggcactcttatggagtactaagctacactgaagaatttgggcttaagagtgaggttttgaaggtgactcttgcaactgacgtcgtgaactgagtgtgaatatctactggatgggcaagcaagtttccaaccccatgccctcccatcgattctgctgcctgatccggctagagtttattaggactcgcaactacctcggagttcactgctgtaaatatgggtaacaccctaccagtgcacgatatgtcggaatccacagttggagtttgggttttcaaatctg

SEQ ID NO: 25318 - DNA, 4997 bp, Zea Mays
gatatgaataattttttaaaagaatcatccgacagtttatttaaataattatctaaatatagacatcttcttctgttcctgtgttatcgttagacaaagatagaaaaagtaaataacttttcagagtgcaaataagatatagaaaatctattggatgcgagacctacctagccaaccgcttcaaatcaaagttcaaacctacaacaagcagtaaaataaccacacagacgagacggcaacacacacattgagagctctaccgagcgaaagagacccaggaaaagccaacgggacgccaaatccattcctcctccctcgtccacaggccgtgagggccgaacccgaagccagccgaggaagccaggcgacaggcgacgccaagtcgagaagagcctaggtggtcgctcgcgggctgcgagggagagccgtggcggagtcgccgtcgtcgcccacggaggaggacacggccgccgccgccgcagtggcatggcgacgccgacgcccatgcctggaggcgaggggacgctcgcagcggtgatgccgcggtccccgtctccgacgccggcggaggcggggacctcggcgaccgagacgcccgtgctgatattcctttactttcacaaggcgatccgcgcggagctcgaggcgctgcacggcgccgccgtgctcctggccaccgagcgcaccggcgatgtagagatgctcgccaagcgctgccgcttcttcttcaacatttacaaacaccactgcgacgccgaggatgcggtcatttttccagcactcgatatccgagtaaagaatgttgcagggacctattccttagagcataaaggagaaagcgatctttttagccagttatttgatctcctgcaattggacatacataatgatgatggtcttcgtagggagcttgcgtcatgcacaggcgcgatacagacatgtctcagccaacatatgtccaaggaggaagaacaggtctttccattgcttacaaagaaattttcgtgtgaagaacaagctgatttagtgtggcaattcctatgcaacattcctgtcaatatggtggcagagttccttccatggctttcaacttctgtcacatctgatgagcaccaagatatccgtaactgcttatgcaaagtagttcctgatgagaaacttctccaacaggttgtattcacatggatggaagggaaagcaacaagagaagtggcagagagcattgctgctggtatttcagcaagaaataatagtgttgaggatgtcccagaccaagggaagattcatatttgtttacatcacaattctaaacttgggagtaaaaactgtggagaatctaatggtcctcaggctgacaagcatcctatagatgatattttatactggcacaatgctattcgtatggagttacgtgatataaaagaggagacaagaagggtgcagcaatctggggatttttctgatatatcagccttcaatgagaggcttcagttcattgcagatgtatgcatctaccacagtatcgctgaggatcaggttgtttttcctgcagtcgatagtgagctgtcctttgtgcaggagcatgctgaagaagaatgcaggtttaacaattttaggtgtttaattcagcaaatccaaatagcaggagccgaatcaactgcattggacttctactcaaaactgtgttcacatgctgataaaatattggaggcaatcgaaaaacacttctgcaatgaagaaaccaaggtgcttcctcaagctaggatgctcttctctcttgagaagcaaagggaactttcatacaaaagtttgtgtgttatgccattgaaattattggaacgtgttttgccgtggttggtgtcgaagctgagtgatgttcaggcaacttcatttcttcagaatatacgcttggcagcatcaccatctgaaactgcactggtcactcttatctctggttgggcatgcaaaggccgggataaatccaaagatggagaatatttatgcttaacatcaggtgcggcgagatgtctatcagatgatgtagatgatctgggaaaatgccgatcattctgtccatgtgcttcacccaacagctcagatctttctctgcagctacatactgagaatgattctaggccaggcaagcgaggaaaagatgcagtatctttttctcatactaatggaatctactgctctcaaactgctgacattgaagcaattccatgtagcaaaaaaccatgttgtattcctggtttgagagtagagagtagcaatcttggtattggttccttggcttctgcaaagtcttttcactctttatcatacaattcaactgctccttcactatattcgagcctcttttcatgggagacagatacatcattgtcttgttcggacagcatttcaaggccaatcgatacaatattcaaatttcataaggcaattcgcaaggatttagaatacttagatgttgaatctggcaagctcattgatggcaacgagtcctgccttcgccaattcattggaaggttccgtttgttatggggtctttacagggctcacagcaatgctgaggatgaaattgtgtttccagcattggaatccagagaaacattacacaatgtgagccattcatatactcttgaccacaagcaggaagaacagttgtttgaagatatctcaaatgttctctttcaactttcacaactacatgatagccagggccatgcccagactgaagttaatgaagtaaagaaaagctgtttccattcatctaatgatgtcgattttgctagaaagtataatgaacttgccacaaaacttcagggcatgtgcaagtctatccgggtcgccttgactaatcatgtccatagagaagaacttgaattatggccgttgtttgataaacatttttctgtggaggagcaagataaacttgtaggtcgtataattggttcaacaggtgctgaggttctccaatctatgttaccctgggttacatcagttctcactcaagaggagcagaacaaaatgcttgatatgtggaagcaagctacaaaaaatacaatgtttggggaatggctaaacgagtggtggaagggagctggaacagcatctgattcttcagcagaggcgtcctctgctccagaagatagtcatttacaagataagcttgaacaaaatgaccagatgttcaagcctggctggaaggacatatttcgaatgaatcagagtgaacttgaggctgaggtgcgaaaggtttcacgagattctacacttgacccaaggcggaaggcgtatctaattcaaaatctcatgacaagccgctggatagctgcacagcagaagttaccagaaccaaattctgaagaatgtaatcacgatgccagtatacctggatgtgcaccttcataccgagaccaggagaaacaaatttatggttgtgaacactacaaacggaactgcaaacttgttgctgcatgctgcaacaagctcttcacatgcaggttctgccatgataaagttagtgaccatacgatggaaaggtaaattctatggcctgtaagtcaattatttttatcttgtttgtgccagaggtactgtgctttgggttcttttcctttaaacctcgattctttctccaaacgagtgtactatgataaaaaagatggaaggtgtgtaagaagtagagaaccttctgttaaaatgttccccctggtttgctgctcttcattgtatatggttgcaacttcctgttcatgtgtggttgtagtgtgggcttgcaattcagtccaaccttttgaatgtattatctttagttctcttgtaaacctcttaacactgttgaaaacaaaatttgttacagtccttgtgtcgatgtgcattttctcttctatacttttgcaacacattttagaaagtataacgagccaactcatcttgatgtctcaaggaaagcaacacaggagatgatgtgcatggtatgcctaaagattcaacctgttggttcgttctgccaaaccccatcttgcaacagactatcgatggcaaagtactactgtaacatctgtaaattttttgatgatgaaaggactgtgtaccactgtccgttttgtaatttgtgtcgtcttgggaaaggtcttggtgttgatttcttccattgcatgaaatgcaactgctgccttggaatgaaattaactgagcacaaatgtcgggaaaaagggctagagacaaattgtccaatatgctgtgacttcctatttacatcaagtgccgcagtcagagccctcccttgtggccacttcatgcattcagcttgctttcaggcatacacttgtagtcactacacttgccctatctgctgcaaatccttgggagatatggcggtttattttggcatgcttgatgccttgttggcggctgaagagcttccggaggaataccgtgatcggtgtcaggatatactttgcaatgactgtgagaggaaaggtagatgtcgatttcattggttataccacaaatgcggctcctgtgggtcgtacaacacccgagttatcaagactgccacagcagattgctctacaccaaactagttggagggaacatttgtgcttaattagtcactgtattctttgtttctctttgtacatatcttctagagagaaggaaaaagagaagttgtgtagcatagttataccataatttcattcgtagccatttcagttttgtaagtgtagcagtttacaatttactaggtctagtgcgttatactgacaaaattgacggttctgatggaagaacataacctgaggaaattggcttgttagaagtactcgtgagcatgttctgcaatttggcggccacttagactatcttcaattatatcttctatattccttctctatatccctcttttatggactcttaaaagatttctttctttatatctatctcttctatacgttaattaacttacaagagatatattttgatctaga

SEQ ID NO: 25319 - DNA, 960 bp, Zea Mays
cccaaatgtagcagcaacgaactgtggaagccaaatgtacctggcttcaggtatcggaggacaaagagccttgaaactcattcgtcagcatggttgcatagaagaagttctgcaaaatctgaaccagacgagattcagtgttccagaagactggccttaccaggaagttcggacattgtttaaggaacctaatgtttgtgcaggaattccagatttcacgtggacctcaccagatccagagggccttatggatttcttgtcaacagaaaacagtttcagtcctgatagagtaacaaaggcagtagaaaagataaaggttgctagggataggtattccccaggcagaatgaagcatttaacaccagttgctagcttacgaggatctcatactgagaaggaaccccagtgcatactaggttctccaggacaaactctgaaggtcatgtcatctccacaagtatgcaagagtccaagctctggtttcagatatggtagctcaaagccatttatgctgggcagacagtcaggatttcatggaatgccttatgctctctcttttatctaaaatctgtagctgctctggtttatgagaaggttgaccgaagctgtagctgcggctacatttttagatgatggaaaccgatatccggctttcacctcactgggaggatatggccaagtagctgtagctgcagctacatgaaaggatgctcacttataatatgttaatctcgtgctactattgtaatctttccatttctattgtaacgtagttaatcagctactgcagttcatcgttgacatctaatgctggttgctgctacaccggttgaccttaccttttgtcaatatattctgagttttcgggatggtgtttttaaacctatgctgagagggtaaactggcagaaatgtcctcgactttcatgtgatggcattgtatgcatcgtgtgcttaccac

SEQ ID NO: 25320 - DNA, 1823 bp, Zea Mays
cagtgcttcaacgacccccttccctcattaaaacaggaggcttagttgtgtggacaaaaggagacatgcattttgtctacagaggaagcaaatatcagcaaaacgcaaagcatagtcacacttttctaactaatgttcataaaggttatctagtaaaacataatgttcatacaaccttacttaagtatgggagcattggtccagtgttaatcaacaattatggtgaagcagatgatgcttttcaagaaaatgatcaaagcatttgtggccagaaggatgaagaacctgtcaagggtacactatatgagagagaagtcaatagactattggacactttgggccctcgatttgttgattggtggtgggacacaccattacctgttgatgctgatctcctcccagagtttgttccaggctttaagactccatataggctgtgccctcctggggtgagaccaacactagctgatgaggagctgacatacttgcgcaagcttgcacgccttttgccaacacattttgcccttgaaacacaagattgcagggtttggctgctgctatactgaagctttgggagaaaagccttatagcaaaaattgcagtgaaaataggtatccagaatacaaacaatgaacaaatggcatggaacctcaagggaaaggcttacatcggtttatcccttactcagagcactgagtctgtccttttgttatttgtattttcttgtgtaacactgaagctcctcagtgcagcatcttacgggaggcactgttatattgagaaacaaggattttattattctatatagaggcaaggattttcttcctggtggagttgctcaaactgtcattcaacgagaagctcaggtacatgatgaacaggtgaaggaagaggaagcccgactgaaagcagttgactcacttcagatggttggtgaattatctgaagaaagttctttaggaactttcagggagtaccagggtttccatgctaagtttgtgcatgaaaatactgaaaactctaacaccatgattgaactagaggctgagaagtatagattggaaaaggaactgaaagaccatgagtggaagctttccgttctcaacaagaagattgaaagatctaaccaggcactggcaaagcttcacagttcttggagcccttcagagcagtctgctgatagagaacacttgacagaagaggaaaaaataatgttccgccggattggccgcaaaatggatgggcttgttctcctaggaaggcgtggtatctttgatggtgtaattgaagagattcatcagcactggaaacataaagaggttgtgaaagtaattacaaaacagaatcaaactcgacagatcatgtacgccgcgagtctgctcgaggttgagacagtcaatgaaatactttgttcgggagagacagaagtccattttggaattgaaaaggaaactgaggtatgtgacaaggcaaatcaggtatcgaaccccatgatcatgaagagtttggatagcatggttagtaaatgatagttagaatttgcaataatgactgcatccaatttttttccttaatatgggatagccgtgtaaactgtgaagcccaacatgaacaattctgaagtgtacagattatataatagtgtctgttgtacatatgtgacacttttgactttacccatatttcatgaaacaagagatttttttttctgctttggtataattagcctatccgattagtgtttgacatgtataacaacattgtggctagtgttcgaataagtgatgcaaacacatatgacttttcaattagaatatgattac

SEQ ID NO: 25321 - DNA, 1341 bp, Zea Mays
cgctcggcgcccatcgaaaaaccctctcctctcccggacaggcggacagcggcaagctggccaccgcgtcaccgcctctacagccccaggctccactgctaaacgccggtaatggcccaggctccggcgcgcgccgcttccgccgtacgtctcttcgacgcgcactgccacctgcaagacccccgcatcgcggccgtcgcccctgcccttatacgagccgccggcgcatccggcgtcgcacgcttcgctgtcaacggcacctccgagaaggactggcacctggtgaagcagatggccgaggatcacccagccgtcgtcccctgcttcggcctgcacccttggtgggtacccgagaggtcgccggattggatgaatttgctccggcggttcttcgccgaaaccccggaggcggctgttggggagattggtctggacaaaggttcacatggaaaaaccatcaacttcggagaacaggttgaagtgttccagcgacagctcgaactagctaaggaattggagagacctgtttctgttcattgtgtgcgggcatttggtgatcttctggaagtattgaagcaaactggacctttcccagcaggcgtgttgttacattcttatatgggatctgcagaaatggtgtctgcccttgcaaatttaggctgttacttttcactatctggcttcttgacaggcatgaaatccactaaagctaagcacatgctgaagtcgattcccctggataggattcttttagagacagatgcacctgatgcattaccaagattggacaatgtttctgtatcaccagtccatgttcacagttcagatgcagatactgaaaagcgtcacatggattcagagtcacaggctgctaatgcatcaaatgagtccttgaaccatccagaaaatatccatattgttttggagtatgtcgcatcactccttgaaatgacagagtcagaattggcggagttgagttacaagaatgctaccaagctgttttcttatcctggctccaaagttcaacatgaacctgaagacatctaaatcgggttcaacactaccttactcactgagttgacttgcatccctacaggctacggtctacagggatgggctggttctggttgtaacgaaacagagcgagaggagggacatagggcctgtttgttcagcttttttgtgaccagcttttccaagaatctagctgtagggagaatctggctgtgtagagaatctgagtatcattaggattacgtgcggaggaagataaagttgtccatgaggctcagatgtataaagcgacggattactactattgcgatgattcaactgattata

SEQ ID NO: 25322 - DNA, 2280 bp, Zea Mays
taatagtgatattttactgtacacttttttttttctacatagcaccgttttcttatattgaatatttttctatataaaactcactcgcagtaatcaagtcgagttgtaccttttcatttttaataaaatttctcagtagcctcctgatcttttaaaaaaaactcactcgcaaaaaaaaactttagaactcggatgtcggaatggctaaccatccactgactggtagggccgcataggatggtcgacttcggctctacatgtcgcctcccccgcgcacggtgagccgctgctgccggcgttgcgtacccgctaaccgccgcggacaaggccaccacgacgtcacagaaaaagggaaggggtcgaaatatccaatcgagacccaccaccgaacgagtccaaatccgctcgtctcccctcgaagtcactccctccagccctcgccggctccgcgtcctccggctctcccacccgagccgagaccacccatccaagcgcgcgcagctccggaagcgacagggccggacgagcgcctcccaaatttagcagccgcggagcgcgtgggcgtgggtccgtaaggagggtcgatggggtacctgccgtccctgagcagcaaggcggcgcacttcgtgtccgacctcaccaccgtcatcctcagccccgtctccgagcgcgagacgtcccacctccccgaggttgacgaagtgctagaaaatttggacgatgataaagattccgagcacaattccgatagccttgatggccctgacacatcttcctttagagcattcttgatctcatttttgtcatcatcgagctctaataacgattcaatggagataattcctgagcagaatggggacatgggttaccctactttaacacccatggggaagggaagcaagggaagaacgggtctgttaagtagggggaagcattccatcggaaaaatcattaacaaggcggcaaggattagtggtttcaaacaaacaactgcagagcctaaaattgacagggaggcagtaactcatactgaaccagatgcacctgtactggagcaccaggaaccaaaggaagttgcttccttcggtagtttgccaactatgtcggaaccatctgttcttttgtcagaactgatgcaaaggattctttatgcctctctcccggctcttgcccagggaaggaactgggtcttgctatacagtacatggaggcatggcatatctttatctactttatatagaaggagcatgctttgccctggtttctcactcttggtaatgttgctgtttcctaagtgtctcaaatgttatgttttttcactgttataagaaacggcagcctctttcacctctgcagttactgaatgttccatattttaggtgatagatcttattttaactccataagttgctatattgttgatggtgtcgatttttttgggggtactcatagcattatctgatattatttcaaaaaaaggtgtcatggattgcttattgctacttttccattcttcatcatctgatgctatgttacaggttgttggggataaaaaaggcacagtttttggtggtttagttgaggccccattgcagccatctagttcaaagaagggaccaataattcctttgttttcactaatttacacaatcgccctgtcatctatcgaccgacaggtgcaaataactactttacgatgtgctctaccgactatttggctctggggggaggaggtcatttcgcactttatcttgacgcagaccttttgattggttcaagttctaattcagagacttttaacaacgggtgtttatcgcattcttcagacttctcagtgaaagatgttgagctttggggcttcgtctacccttccaaatacgaggagatgctgacactctgccggactgagaaaccaggaatctgtcgatggtgagtggtgaccaatcccatagccagttgaacagacaaatggacatgtcgcgtctgtacagtttttagtaggctttgagagttgcgagcatttttgtgcgccggtagtactggagacttgctttttctcaagcgacttcgctcagatttgtaaatagtgtacttttgttactgtcacatggcgaaacatgtacgctactagttgttccagtgatgggcactttgaggtaaactgtcactggtggatcaggcttctacccaggactcgtgaaacagcatcaacctgttcaaagacagccttttagatccggaagcaatcaaattaagcgtccactgatgaatgctcctcat

SEQ ID NO: 25323 - DNA, 1655 bp, Zea Mays
cctctggcctcttcgcgcagagccgcacaccgacccacgccggccgcgcccaccaggcagccaggcaccacgacgcggcagcccccggcctcggaagccaagagccataccgcctctttttcctccaaaagccaaaccaccacaccccctaatctctcgctctcttcctttctcacccccgtgaccctgtctcgccccttctcgcctcgccgccgcagccgatgggctccggggaggagccgtcgcagatgcggagggcgctggtggactcgctcgcgggtgccatctccggcggcatctcccgcaccgtcacctcccccctcgacgtcatcaaaatccgcttccagggattctggagaggaaatgtaccggctttgttgatgtatatgccatatacagctatacaattcactgtcctacacaaactaaaaacatttgcttctggttcatctaaaacagaggatcatttgcatttgagcccttacttatcctatgtaagtggagctctagcaggatgtgcagcaactatagggtcatatccatttgaccttctgaggactattcttgcatcacagggtgaaccaaaaatttaccccaacatgaggtctgcatttgttgatataattaaaacccgtggtgttcaagggctttattctggtctatctccaactcttgttgaaatcataccatatgctggtttgcagtttggttcatatgacactttcaaacgttctatgatgacatggaacagatataaatattcgcatcttaactttggaagcgaggatgattctgtatcaagtttccagctatttctttgtgggtttgctgctgggacattttcaaaggctgcatgccacccacttgatgttgtaaagaaaaggttccagattgaagggctaaaacgccatccaaggtatggagctcgaattgagagcagcacatacaagggcatgtaccatgccctaaaggagattgtcgcaaaggagggatttggaggcctttataagggccttttcccctctttggtgaaatcggcccctgctggtgctgtgacatttgtggcatatgaatacatctcagactggttagagtcgatactgatgtgaaaatcttcaatgcagatagggagcaaggctggagttgagtgaggtcttgatggatcatggagctatcaagataccatgacgagaactttttgcacaccgtggacatggaggatggagaccggaaggtcaatcgtcaagtgcatacaattcctagagatccgatacatgtaaagccttacatagaaaagagctgttttgtcgtttcttattctttccccaattgcctaatgtggtggtagggcattcgttggcttgtaaaacaaggctgactacaactaacttagtgatcgcgacgcgtcatacatgactaagtcaaaagcagccggcagttttgctgggatcgtgttacgaatcttttctcggctgcagtcatgttttccttgcggcttgttggggctgcgtcttctacagtcttttttatttatatggattgcacctgcaacagactgcagcagctacggttgtagggcagccgaacaaatttcatggttgatggcagtcgtaatttattcaaccattttgttgagcaccatttatagtactgag

SEQ ID NO: 25324 - DNA, 1212 bp, Zea Mays
gccgggcccgagttatgttcaccccacaagacaatcacactggagtactggacggagtcgaggagcaggcgacaccttcaccgcttcggtaacggatcgacaggcgacagctcacagctggcggtggtttggctcggggacggggtgcggcggcctccgcgagcagttcggcagcgacacggcgcggggggtgggcgccttgctggctggtgtagcgtagtgcgggccacaacgaggacgcggtggcatccagcaggcaccatcagaaaaccacatggctcggcaaccttggagcaataatggccatagaaattccccttcaaattcattagatggaggagttcctggacccatgcctctggtcccttttcaggaggaacttgcagttggttgtgaagagattcgtagaattgctgctgataatactcttgtgctagaggatattctgggccttaggcaagaattagctgtcattgaagacgagatccatatacttgccaaacaaaccattcccagacttcgtgttgataatgaaatggaatacagggatattatccagggaggcatgaagttagaggaacagatgcatgctcttaaacttatcaaggaagaagtgttggtcctaagttctgaaaagatggagttggaagctttgtgcaaagagctatctgtgaaggttcagtcattgtacagggagctggagcagatcgagaacaagcagatacctgctacaagagaagggttgcatgatatacaagcggagatttcgagggccaggatggcatacgagcatgagaaacgtgcaaaagttgagcttcttgaggagagtcaggccatagagagtgattttatcaacataaaaatggaagcacagagattgcggacagagctggagaagaggaggtctggtgtgttcaagcatcatgcatttggctcatactataaaagatagagcatggcattgcatcctccaactgataggtgggcgtcacaaagcgtagctaagggtttggtgtctatcagagaaattagtcgaactcaggagtcaagaccaaatgcgtttgtctttcggatgagcagctgacagttatttgcgaacacgttactattactatatctcattattaagtaggagtacaaattggacgattgaaagaagaatattatcaatttggtctttattgtactcctacttattttctctctcgaaaa

SEQ ID NO: 25325 - DNA, 4305 bp, Zea Mays
agcccaggcacacacgactagaaccaggcaaccagctgcggagggaggaaacctagcggaacactgtgcaggtgacggcggcgcgctaccggtgacaggggatacggcggcatcgtcccctcctccatccccggcgcggcggcgccagcagccggcctgcaggcacacaagtggccacccttccaatggcggtggagaagtccagcagcggcacatcaactccctccaccacctccaccatggaccggtttcagaagattgtcctaagctgggattacctccgtctcatcgctgaatccaagggcggcaagcaggccaaggtgctgcagcatgtgaagaacacatacgtctcggtggctgagtaccttggtgtctttgagccactgctctttgaggaggtcaaggcacagatcatccagggacgcagtaacgacgaggaagaatctgggatggactggaggaggggagcagtggggtcgtgcacggagtctgaggggttccacaagctctctgtggcggtggaagacaattttcaggataatgtgtcagagaatgatctactgcttatctccaaggagaaatttgaggagggatcgacccctaatgcatatgcatttgcattagtggagcagcgaggtggtggcatacatatttcacttagaacttttgtggcaggtgaaattcaaaatctgaatgttgcaaagcctgtgaagtctacaaggctgcaacattttgcttccattattgcaagtcaaaacagcttgctgtggatactgaaggtctgcagcttgtctacaataatgcgggagttcacagctatgcattccgtagcttctctaccttttaaggatttgattctttcagctaccgaggcgcacaaggatggtgatgatcaaagtcgtgcgtggaatgtccctgagccacttatggattatctcaaagtgaatcttaatgattcccagctagaagcagttaatgcaggtctttcacgcagatcctttgttcttattcagggccctccaggaacaggaaagacacaaactattcttggactccttagtgccgttctccattctgctcctgcaagaatgcagatcaaaggaggatttgatgttctaaaacatgggccagaactggacattgatggcaagcgtgcacactggataaaggcatctccttggttacttggtgcaaatcctcgagatctgattatgcctgttgatggtgatgatggattttacccaacgggaaatgaactggttcttggactatttaccccttacatggaaaagaaaaaaatctttatagaaacccgaaatcgaattcgagatgaaaataacaacacttataaccctaaaattgtgcgcattggagtgaaggcccttcattctgttaaagcagtttctatggattatcttattcaacaaaaactttctggtgtagatcgcacattagatggtgggagacgaggtgctggtgaatatgatcggattagagcttcaatactggacgaagcagccattgtattttctactctgagtttcagtggatcatcaatttttagcaggatgacccgtgcttttgatgttgttataattgatgaagctgcacaagcggtggaacctgcaactcttattcctttgatccatggctgcagacaaatttttcttgttggtgacccagttcagttgcctgcaactgtcatttcacagactgcacagaagttgggatatggaacgagcttgttcaaaagatttcaagctgccggttttccagtgcaaatgcttaaaatccaatatcgcatgcatccagagattagtacattcccttcaaaagaattttatgaaggggtactacaagatggggagggcctgagcaggaaacgtccatggcattcctacagctgcttcggaccattttgtttctttgacgttgatggcattgaatcccaaccatctggaagtggttcttgggtaaaccaggatgaagtggaattcataactctcctgtaccaccaattggcattgcgctatccagagctcaaatctagtcctgaagtgggtgttatatcaccatacaggcatcaagtaaaactattgaaggacagttttcgatcaacctttggggatcaatcaagggaattgatagatgtaagcacagttgatggattccagggacgtgaaaaagaaatagtcattttttcatgtgtaagatgcaataaggaacaaaagattggctttgtttctgattttcgacgaatgaatgttgccattacaagagcaaaatctgctgtactgaagggcaggcctggtgtagtggttgtaggttctgcttcaacattgaagcaagataaacactggaacaaccttgttgagagtgccaaggagcgaaactgcttattcaaggtccccaagccattgaccgcattctttgcagaggataacctgaagactatgaaggtggaaaggcgtcctccgccagagctgaatgctcgagtactggaagagatcaaccaagaagttgtaaggcaggagctcatgaatgtcgatgatgctgccgaccatgcagacgcaggggacgacgatgatgctgatatggatgctgacgatggaggcggcgatgattgattagatatgtggcgctgaaggtgcagaagagcgctcaacactacacagaagcagccatggatgaggtcaagatcttgaagcagattgctgatggtgatcctgacgactcaaaatgtgttgttaagcttcttgatcacttcaagcactcggggcctaatggtaaccatgtgtgcatggtttttgagtttctcggtgataacctgttgaccctgataaagtacacggactatcgtggaattccccttccgatggttaaggagatatgccgccatgtgctcattggccttgattacctccaccgtacactttctattattcacactgaccttaaaccagagaacatattgcttgtgtctaccattgatcccacaaaggaccctcggaaatcaggcgtacccctagttccgccttcaatgaggacagacgagccacctcctaaggtgcctgcacaatcaggaaatggtggcctcaccaagaaccagaagaagaagatccggaagaaagctaaacgtgcagttgctgcaacttcagaaggaagtagtgctgtggcatctgcggacacagatgggtcagatgaccgaggagatctgggtacaacaaatgagggtagtcctagacaggatggagctaagaagcgggtgacacgagataggcgcggtagcaaaggggccaagaagatgatggcaatgaaggctgatctaaaatgcaagctggttgactttggaaacgcatgttggacatacaagcagttcacaaacgacattcaaacaaggcagtacagatgtcctgaggttatacttggttccaagtattctacatctgctgacatgtggtcctttgcatgcatttgctttgagcttgccactggggatgtgctattcgatccacatagtggcgataattttgacagagatgaggatcacctcgcgctgatgatggagctgctaggaatgatgcctcgaaagattgcgttgggtggtcggtattcacgtgatttcttcaatcggtatggggatttgcggcacatccgacgcttgcggttctggcctctcaacaaggtgctgatggagaagtacgagttcactgaaataaatgctaatgggatggcagattttcttgtcccaatacttgattttgttcctgagaagcgccctacagctgctcaattgcttcagcatccatggcttgatgttggtcccctccgacagcaacctaaaacacggccagagtcagcacggagtccaggtgatggtgtttcagagaagcaaaagaaagagaaagaagaaagagaggcaatggccgtagagttagggaacattgccatagatggtgcttcttccaggatggcaaatgacccccaatcaagcacaaataaaacaaccgctacctcttctaagaagtgagctgcatttgatttcatgagttaagctgtaaaacttgttttcattcgagaattgctccatgagtgggaaacatatgtttttttttaggtttgagatatgttaggatagctaccgagggaaaagaacagtaggctaaatatttgttgtatggggttgggtggacaaggttagatttgtcggggttgcagtaaccctagcccttttctttgagaacatattcttttgtacaattagaatccgcgatttgtttaatggtagcattgagcaactggaaa

SEQ ID NO: 25326 - DNA, 3737 bp, Zea Mays
ggcgtccacagggggcgacacccgtgaccctgcccccgttcgacatcagcgctcctccccccgaccaccgtcgatttggtgtctgagccctcgctagatctcgcaccctcaccgaagccctcattggattcgacgccctcactggaggttgcaccgcgatgggatctaggaaccgtagatggcctcgaccacccacgtgggttgttgcctctgcggatgagacgcagcgccaaggggccagaggaaacgacgtgatggacctcatatcacagctcatgtcatggttcatgcctctcatcgcctcccgccgtggttcgccgaggccgccccatgctgcacgccatgggcagcgatgtcgccttcacgaagctcggcatggagtgctaccccaaggaggccaccgctgttggggtcaagggattccccgacatggaaaaataaccgacgacgagatcaatgccgcctccgtcacttgctgccgcatctacctcaggtccgagtctgaacctggtatatcgcaagttcttcggcgggtactgcaactgctcataccatgattgcagagctgagaacaccttgaagctaggagatgtcatccagtaccatgaatgtggttaccgcattctctataagaagcgggcaccgatccatgtgtagtaccagcaaacttcccattttctatgactccaaggccttatgtcatccagcaatggcagttgccgttcagtttggactatagaattcaattatgagttcagtttgttgatattaaaggaaagatacaggtcagcctcttttacttaacaaggtaagagctctaaatttatgttagtatagtagaagtttttttgttgtaaatatcacttgcatatacgccagctagatgctcactatttgtcctctctcaaggtctcaatctgtctgatgtttattcaaccgattagctatcatcataaacctgaataacattttgctttgttcatgttcaggattcatacttaaatacttaacaaggtaagagctctaaatttatgttagtatagtagaagttttttttgttgttgtaaatatcacttgcatatacgccagctagatgctcactatttgtcctctctcaaggtctgaatctgtctgatgttttattcaactgattaactatcatcataaacctgaataacattttgctttgttcatgttcaggattcatacttaaatttatctgatgcaatttttcaactgaacgtgaacttggcaggggtgagtacggagtagtgtacaagcgagttctgcattgagctgtcgtagagagcgtagacagacactctagccaacgttgttggctgggattggaacacaaaagcgagacaagggatgagaagcacaggaggagccaggtgaggtgaggtggcgacacacaggagtcgggcaagctcagctcatctcatctcatgctctactaaaaaggattagcccatctcaagagaaaagagtaacattgtcagcccactgcaataaccacactattaccagtcttgaaattcactttttgtttgtttgtcatagaaccagggattcatgacaggaaatgatctccttctcaagataagaaaattgcatttaagttactaatcagtgtatggtttactagtttggcggaggcctcaatccgggtctagaccaaggtcatggtggcgacgaaggtggaggccgaggtggagggtgatgcttccactctcagtcttggggtggggtcgtggggatgacatatgagagtggggtgcagtggtggctcgtcgacatcagccattggcacccttcccctgcccagttcgatgatgcaccctccctcctactacttcacgatggcaccaccatctccaggtaccgtgccgatggaggaaaggagaaacaagattaagagtgatgccacatacttagcgatggggtgcttgatatcctagatattgtactagcttcagacctcgccgaattgacaccttcgaagaaatgaagtcgccagattggtaggctttgagtgtttcaccagaggaagtatgtagtgcagttaaggaaggaaatgaacttccatcagacttgatagacacactactaaagtggatcccaagcaatgatgaggagcttaggcttcgactgtcctcccatagcaccgccacaccgcatgcgtccgcggcggcgtccgcctcggcgccggtctcgcacaccgctccctagctggggaagttcatcgcctccgagcccttcaacgtggggggattcgattgggcgatctacttctaccccgatgggaagagcggcgaggatggcgttgtctacgtctcgctcttcatagccctggccagcgaaggcaccgatgtgcgcgcgctgttcgaggtcacgctcgtcgaccagagcggcaaggggcaagacaaggtgcatacccactttgggaggtctctcgagagcgacccatacaccctcaagtaccgcgacagcatgtgatgagtctatgtacaggttgtttcctacggtatgcttatctatggtggaaagaaaaagtgattgactcatacttgaaaagaaaagatggcctttgcccattgacgcctgagacaaccagaaatttgccatgacctcgttcctgaccaagaaaaactgtcaagcacagaatcacagttgatatattgggattccaaggtatcagaggctgatatggatgcaatgtggaaacatcctgatgtgtataaggagtggataaaatctggtgagagacgtggaaatgtacgattctcccatgatgcaaagaacatgccttacctttctcgcgtcgaggtgaaggatatgattgccttctcatgttgtgtatatgatggtggtgatgaggagaaggaaatggatgcagccagagaaataggttggagagggaaatttactaagagaggacgtgtaataagaccaggaattattagaatgagtggaaaatgtcctcttacacctttggaggttgggttaatgcttcgtggaatggatttcagcaataagactgcaatctttttggcatctggaaagatttacaaagcagagaagaacatggcttctcttcttgaaatgtttcctctcctacagacaaaagagacactggcatcagaagaggaacttgctccattcaagatggctgctgttgactatagtatttgtgcccaaagtgaagtttttgtgaccacacaaggtggaaatcccgcattttttatgggtcacaggagatacttgtatggtgggcattcaaaaacaattaaaccagacaaaagaaggcttgctgtactcttcaataatccacgtatagggtggacggcattgaagcggcacttgcttaatatgagagcatacagtgatgtcaaggggatcgaaatgaaaagaccaaacgaatctatatataccttcccgtgtcctgactgcatgtgccgcttgaacagaacagaacactcgaaatccaaacagagtagatagtatatttcgtatgtagaccaaatggctaaaaccatccaatattttcatagactgaaaatgcagagaaagcaacaaaggtgtatcaatacagtcgtacaagcttagtatcggatggtttttaatttgtatagcaaagcacgggcacatacctatatatcttttaatgtatgtaaatattcttaacctttaaaagatactaacaagcaggtataacgataattaatgtttctata

SEQ ID NO: 25327 - DNA, 1185 bp, Zea Mays
cacggggaggagcaagaacacccagcccactgcccacgccgtgctggaagtggtccgtgctccggcagcggcggcgggaggaagagggaagcgaggggatggcgcagccgagcaaggagccgtgcaagaaggaggcgtgcgacatccaggcctgcctctccaagaacatgttcgactccaggaagtgtgtgagagttattcagttacttcagtcatgttgtgagcagtgtgagtacaaatcaacacactgtggttccttgtccggattactcaagaacatttctaagtgaggaacaataccgacatactttactgcagccattgaataaaagtttcttttaggttagtttagtactttatggggctcacggcaatctctcttacggatcaagaattctggtagctgccctccctgatttcagtaacatgttgcagctcgtcaaagtttaagcaaaacccaaggcataaccagactctcgacagtgactcaggtacacaagagaaacttgtaagagaaatagaacatgaaacagcaagttcttggtcctgtgctaccgagacgagagaagcatgcgtgtattgatcacctccgtatatacacctgacacatcatcatgcactactcatcaaaggcttgattttttttcagctgcgtcagatgggcggcgccttccgcgacggggcggcgccggacttgtgcgccaggaagagcttcttgagcagcctgagcatcatgaggaggcccatcctccgccggcggacgacggcgtgcttgcgcgtctccaaggcgccgtcgagccagggctccctcgcggccgcccacgacggcgtccccctggtgagcgggcagggctgcgcggcccgtgcgagctcctcgttgaagtcctcccacagcatgtccatcttgtcctccaccgcgaacctcgccgagccgtggcggccacccagctgctgctggtcgccgcccgcggcttgctgctccacggccgagacgctcctccggtggtcgtgctcgtgcactgccgccgtgccaacaacgccgccgggaacgagcagccacggcgacgcggaggcggagaagtcggcgttgcattgctcgagtgggaagctggggaatgcgaactcttccattgcaaatctctttctctctctctaggtctgagctgtgagctctgactctattgt

SEQ ID NO: 25328 - DNA, 633 bp, Zea Mays
gcagctagcttagtattgtgtttcttatatgtgccattttttcggggactatgtgagctactgaatgggtgaagggaaaaccaatggatgaagttttgacaatcaagaacacggagatcgcgaagcacttgtcccttccaccagtaaagctccattgcagcatgcttgccgaggatgcgattaaagctgctgtaaaagactacgaagccaagaagtcgaagatggggcagaagggtgaagacagcccttcagagaaggctgctgaagcatgaaaggttctgccgtgaagtatattgtgctgatacgtttctcagtccatgactatccgccgcatattgccaaagataaatgattctgtttgtgaggcgagggattgtgtgtaatgttcacgaagtgtggtagtgcggcatgtggctcaactgttttaaggatggtgacgactgatttcaaataaatttgctgtcatcgtagaattagaagaaagtactatgtggatttacaggagctgtttctggaatttgtgatatcatggtactttctttttgcaagaatgttactgttggtattggcattccggcagtataggttgacgattgacgaatagctagccaaagtaatgcaaagtgaaatcta

SEQ ID NO: 25329 - DNA, 899 bp, Zea Mays
atggtacttcaacttctaccagtgaattccctatcttgaaaaagtggaaggacataaagtacctagagagtgtagctggagatcggactattcctgttcaggttggaaaaaattatgcatgtactgagttgaaacaggagcttatcacattttctcaatttcttgagaggatgtggtcaagtgattctgcaaacttggcatatattgcgcagcatcaattgtttgaccagataaaggagctccacgaagatattgctgttcctgagtactgttcagctggtggtggcaaactccagtcacttaatgcttggttcggccctcatgggacaataactcctttgcatcatgacccacatcacaacctttttgctcaggttttgggaaggaagtatgttagactctatcctgcttctacatctgtgggcctataccctaacacagaaagcatgctaagcaatactagtgaggtagacctcgacaacactgacggaaaagagtacccggagactgcagctcttgagttcgtggactgcgtattggaggaaggtgacctgctttacattcccccgaaatggtggcgttacgtgagatctctctctattagcttttctgttagctttcggtggcgaacatcacagcttccttgaggggaggttcataacgatggttttgacaaatttgatcgtacgtccacgatgtcgttccaatcatcctattggtagagacttaataagaagacttcattgagctgagcccatatttcgtggtctaagtgttgtgtgcggtcgcctcactagactgggattgtaaattgttttcacgacaatgattggtttcaaacatactaagcggtactatcaggtactagtgtggccgttttatattgtgaactgattctg

SEQ ID NO: 25330 - DNA, 542 bp, Zea Mays
ctgaacctgaacagaaatcatacacctgggatgctgcaacggccgccgggaaactcagggtcaaaaccggttgtgcgccccggtctccaggctataaaaatagggtcccacgaccctcctacatcccatcggcatcacaaataaatcacgcctaggagcaccatcatggcgaggaggaggataatagggaaagccgtcgcacctggaaatcctttgcattagctttcagcctcggggaattggtcctggtgattcatcaggtcacgctcaagcaattgaccccttgctgtgcatgtctggtggacgaagataccgtgattcgtcgttggagtgccgtcaccaccgcagagccgcgtctcatcgtgggtagagaacatcacgcctcggttcctgacgagcaagtgaccgaggagcccagagcacatcaggttgaagattctgagcagaagctcgcagaagattctggaagcacttatagcaaagaattgccgagaggacttttcgcaggaatcattagagacacttggggattctttttcaac

SEQ ID NO: 25331 - DNA, 2921 bp, Zea Mays
gtgggttgcatgtaattgtgccaagttgttttgttgacaatttgtcatagcattctgtttgtgaaagtgaaacaatgatttattacatgcaaaatttccattctcttatgctgtgctatggagatgttgtgttgcatattcattgtctggaggcatcatgcatatttgcattttctgactggaggtcaaatttcacacatccagtcagcagccaaaatttacacaaaaaccttgtgcaatatgaaaatatctagtaggttttgctgctgattgtttgctggattgtgggcacgcagtgaacacgcacagtattgtttttcacatcctgagctacggaaatgattttttggtgtcatccagctaattgatttgattggtatcctatcctttgggtctgcaaacgtctatgctttaaatgtgctgcactttatgtgcttattgcatggtttagttttgaggagtttctctgctagtacaatccaattgactgtacattgatctctaatatttgttgccaatatctttcatagaaacattgaaaaattcctcaagtacagtgtcggttcattggacatgttccatgtgcacattcagtaatcatgaaagcatggtgtactgtgagatgtgtggtgttttccgtgagacctttgtcaaatctgccaaggatggtctgttaaaagatacagccgttgcagtgtcaagtgagcctaggacatctgctgcgtcaaaaaacgattctgccaaggcgccagtgaagactcgtgctgtaaattctgatggtgattctatgagaaagcatgctagcatgtcttatgataaagccaattccacgcagttaccatctgctggtagctcactaggtgctgaaaaaaagaagaaaacccctgtactttctgaagaagtacctgtggagaggatagctctgttggcttccgatggttttcagtcaaagggtaaccagaatagcggggctagcagttcttcgcagaatgacaatgtgatccagaaactctcttctgacgtaggccagctaaatgtaaacaagaacaatgtgaatgttacgaaatcttgtttgcctgatgagtataagcctgagaagtggatgttagctgatctggagtcaagggcgttgagccaactgaaccttgcaatagtcggtcatgttgattccggcaagtcgacactatctgggagattactgcatctcttaggaaggatatcaaaaaaatatatgcacaagaatgaaaaggagtcgaaagaaaaggggaaggggtcatttgcttttgcatgggccatggatgagagcagtgaagaaagggaacggggtgtgacaatgactgtggctgtggcttatttggagaccaagaaattccgtgtggttttgcttgactcacctggtcacaaagattttgtgccaaatatgatatctggtgcaacacaagctgatgcagctattcttgtcgttgatgcttcaactggttcttttgaagctggcatggatggcgaaggaggaaaaagtgttggccagactaaagagcatgctcagcttgttagaagctttggtgttgaacagcttgttgtcgcagtcaacaagatggatgctgttgattatgcaaaagaaaggtttgatttcatcaagctacaacttggtagtttcctgcggtcatgcaacttcaaggactcagctattacctggattcctcttagtgctgtagaaaaccaaaatttgatcaaagctccttcagatgctcgtttgacctcctggtatcaagggttttgcctcttggatgctatagattttctgcagcttccttctcgggatgtttcaaagcccttgattattccaatctgtgatgttataaagtctcagtcaacaggacaattggcagcttatggaaaattggaaactggagccatccaaattggttctaaggtgttagttctaccttctgggcaagaggcgactgtgaaagccattgagcgggactctaattcatgcaccgtagcgagagctggtgataatgtggcaatttgtttacagggtattgatggaaaacaactaatacctggcggggttctttgtcaccctggtttccctgtgcctgtagctaaccacttggagctgaaggttctagtcctggacatcactactcctattcttgttggctctcaggtggagtttcacatacatcatgtgaaggaggctgcaagagtaacaaaaattgttgcattacttgacaagactggcaaaccaagtaaatcggcacctcgatttcttaaatccaagcagaattctgttatacaggtcacactagatggagctgtctgtgttcaggaattctccaagagccgagctcttgggagggcatacttgaggtcggctgggcgcaccattgctgttggcgttgttaatcggataattggccaagatcagaactagaagacctactacactcttctgaaatctgaaccaaatccttgtcgttgccttgtcgttgctacggttatactctacgtagtagacactggcaacatgatgttgggaaattttgtttagcagctgcttatagccattccattgtattgagttatatgtgtaagatagtagtcacagctgagttgtgttctaacccccggcttttgcaaaaatgctatggaatccttcgaagttatatatgctgactacttgtgattcgtgaccgctgattcgttatcgttcattactatatgtagtggacccaagtaaaacgatgttggcaaattttgtttagcatttgcatatcttcattctcattgtacttagatgtgtgtaagatggtcacagactcagctgagttttgatttctaatccttgacttttttttggagaagtgctatggaattccctcgaaatgctgaagttttgtgatttgagagttgag

SEQ ID NO: 25332 - DNA, 1324 bp, Zea Mays
ctcctcagaccaccactgcgccattggccagctagagccaaccagaagagcttgcagttactgagagtgtgtgagagagagaggatgatgggtggcagcggcagggctgctctgctgctggccctggtggccgtgagcctggccgtggagatccaggccgacgccgggtacgggtacaccccgacgccgacgccggccaccccgaccccgaagccggagaagccccccaccaaggggcccaagccggagaagccgccaaaggagcacaagccgcccaaggagcacgggcccaagccggagaagccgcccaaggagcacaagccgacgccgcccacgtacaccccgagccccaaacccacgccgccgacgtacactcccaccccgacgccccccaagccgacgccacccacatacactcccgcccctacgccccacaaacccactcccactcctccgacgtacaccccttcccccaaacctccgacacccaagccgaccccgccgacgtacaccccttctcccaagcctccgacacctaagccgaccccgcctacgtacactccaagccccaagccaccggctaccaagcctccgacgcccaagccgaccccaccgacgtacaccccttcccccaaacctccgacacctaagccgaccccgcctacgtacactccaagccccaagccaccggctaccaagcctcccacgcccaagccgaccccgccgacgtacaccccttcccccaagcctcccacgcccaagccgaccccaccgacgtacactcccacaccgaagccgccggccaccaagccgcccacctacactccgacgccgccggtgtctcacacccccagcccgccgccaccttactactagaaaccgatgcctaccataccacactgctgtcagtctctggagcatttaggtggtctcgatcgatggaagaattgtgtcctagccagccggcaaaggtgacctgctgatgatgatgatgagaggcgagtcctacgccctagtcctactactaccctctttgtgtgctgccatccatccgtccccgctagacgatcgaggagagaataacgcagagctctgtgctcccggcctctgtcttctgccgtcccggccgtttaatttatagtctctactgtgtgttcgtcccatgtgtttagcagcagcagcaggtgtattgtgcgggtatgtaatggtattgcaactatattgggtgtaaaaccataataaatgtggaaaaaatgcaaggaaaaaaggcttctactgtttacacttactaccgtacccctttcattcggtgacgtgacgtgac

SEQ ID NO: 25333 - DNA, 4159 bp, Zea Mays
cgctgtttcgagcccttccccgcgccgccttcctctgtcgtctccccgaccctgcattctcctctctgggaagattcaaatcccccacgggccacggcccacgccacgccatctctacccagccacggcgagcgccaccggccccgccgcgccgcaagaactctaccgtaacgtaaccgagaaaccccgccgccggcgcgatggactggtactccgacgactcggaccccgacatcgacgaggacctgcgggaggacctcgacgcgctgcgccgctcctgcatcctctccggggccgacccggacgctgccgtagcgcaggtctcctccggcctcgcgggcccctccaccccagccctcgccgcggcgccgggggcggcggccgaccatcatcatcatgcctcctcttcggacgacgaggaggacgaggacctcgccctcgtccgcagcatacgcgccaacctccaccacctccataatagtaaggcctcgaccgtcctcccggacgccgcccccgcgccccgggacgacgacgacccgtcctcgcgcccgatctgcacgtggccgccgtccgacactgacgaggaagaggatgacctcgagacgctccgcgccatccagcgccgcttctcgcattaccagtcaagtacctccactgcatcgccaaagaccatgaaacctgaggcgtcacagggagtccacagtgacctttttgccgacaggtctggtgatgattttgctgtgcagaagcaaaatgcaattgttcctcatggagatgggtttccaaaggctgcgctattgttagtggatgctctcaagaagaacagagcataccagaagttcattagaagaaaaatggtaaacattgaagcgaaaattgaagaaaacaaagatctcagggatcgtgtaaaatgtcttttgggctatcagttaagctgccgaaaatcagtcagcagatctttaggacagaaggaggatcctcgtgtcaggttgatttcccccctgaaatcaactcagccgtgtacaaagaacaaatacaggaagattcctgcactatttctcggcccagctgagaacccacatgtttcaaagtatgaaatggcgctgaagcaatttccaatgtcatttaagaagcaaccatggtcagatgcggagaaagataaacttgccagaggaataaagcagcaataccaagaaacattgattttggattcgctgaataatggaagtgctgatggtgacttcagtgcacttgatatggcatatgcactgacaaatggtgctggtaattttgaggtgactccggaaaatcttagatcggttctaccattaataaactgggataagatttctgccatgtaccttcctggtcgatctggtgctgaatgtgaatcgaggtggctaaactgtgatgatccattgattaaccatgaagcctggactgcagacgaggaaacaagacttctactaattattcaagaaaagggaatgtgcaactggattgacattgcagtcacattgggtacttaccggactcctttccaatgtcttgttcgttatcaacgaagtttgaatccccacatactgaacaaggcctggacaaaggaggaagaccttcaactccaagcagctgttgagacctttggtcagaaatggcaacttgtatcggctagtctggatggtcgcactggcactcagtgctctaataggtggagaaaaaccttgcaccctgaaaagaccagtgtgggaagatggcttctggatgaggacaaacgcctcatggtcactgttaaactaattggacctggcaggtggagtttgattgctccgtttattcctggccgaacacaaacacaaatctttgagaggtggtgcaatattcttgatccagatctatatcttgatgactggcggcctgacgaagattccacattattggctgcagtatctgagtttgggccttgctggtcgaagatttctaaaacgataattcctggacgtaatgatagtatgtgctatagacgatggagaaaactttgtaaacatgaagtccagaaagctagagaagccagacaattgaagaaagctatttttcagaacaattttgttgatagagaaaaagagcggcctgcaatttgccctcgtgacctaatatcacttttaccctcgaaaggtgacggatgtgatgtggccattgtaaggggtggatctgaaaagcaaggggaagagaaccacctagctctgtccaatattgtcaacatttcatctggtcttgattgtgttgctgctaattctgttttgaatgctagctcaaggaggccaaggagagtatcgtcaggacgtagatcaaaaaagcataccgaagggaataatattgctgcgcctgatgatctcaatgcttcatccagcgcccctagcagttccataaagagaaaatctactactggtaacaatgtagctgcaaaaaagagatcgagggtatctatcagtgttaatgctgataacgaggtagagaaaaatagaataacagactctgtggctgttagtgaagaggggttagtcaaaaagagaacaaggcgtccaaaacctgttggcaatgagggggctgtcagaaagagaggaggctctaataatgaggtagggacaaatatcataacggaatctgtggctgttggtgaagagggagtagtcaaaaagagaacaagacgttcgaaacccgtagggaatgagggggctgataatgaggtaggaacatatagaataacgggctctgtggttgttggtgaagagggagtagtcaaaaagagaacaaggcgtagttcaaaacctgttgacaatgaggaggttgtcagaaagatgaggggctctatcaataattatgatgaggcaggaacaaatacaatgatgaattctgcgtttggggaggaggaagtagtcaaaaagaaaacgagacactcaaaacctgttggcactgaaggggctgcctctattggtggtgatggcatggtcaacaagagaaggacaggttctgtctccaccgagaatcttggtgctgtgagaaaaaggaagatagtgtcatcaaggaggaaattagctgaagttaatttgccaacagaggagggtgtaccgaatgctgtccctgacttggactttccttgtgcaatttctgaagaaagagctgttgatgttggaaatatggataaaggcagaagaaaatcaactccgagacccaagcagataaacatgcctgaagaggatgctgataaaaactccacattcacacgacttgtcaattgcctgtcgtttgcccgtatgaaaggaatcgacaggaacaaaagataattgaagttgagaaaccgtcgcttgaaaagggtttagtttcacctgtgatgatggttttgcgcgtggaggttgcagtcagtacgcgtggaatgcccaaaggatgacgctttttaagctggagtgtcatcaggcacattgccttgtgtgtgagcagctccacagtagattcccttacacaagggatgttttttttagacagaaccagggtcatctggatgtcatctgttgattcgaaaactggcaccacatatacagaggtcatttctatcttggatggggaacgaaatttgtacgacctgtttcgttggagacccggcagtttgtttccagttggtggtatataggtgttgggcatttaatgcgtcgatgacagttgacggcatccattgttttatccatactctgaaatttctgatcttgccccatcaattgatgaatcgctacctttatcagattcatgtcacgcagcagtgcaagaaattcattagcaacattgagaccaacaaatagctgaaaccaaagggtgcctagctccatctgttctccgtggggacttgttgtttcgttatgcattttatcaattataaatttgatttacaaagtatcactattaacttttgtatatcaccttccaatctctcaactaggcctgggcaaaaagaaccggaaccgaggaaccgaaccgaaccgaaataaccgagaaccggaaccgaactaaccgaaccgaaggaaccgttatgaatttcggttctggttttttgagaaccgaaataaatgagatattttcggttctgcactccaaagaaccgaaagaaccg

SEQ ID NO: 25334 - DNA, 3636 bp, Zea Mays
cacctttgtaaaactgttgttggtttgcttctcaacaattaggcaatagactgttctaggacagattcaaccatgagccaagaactgccaatttccaacatttttgtttctgttgttaccaacaaagttgagatgcgttgatccgaggtacacaaaggagtcaattgggctgagcttcaagctgctcgagacaaatccagaggcctacacggcatggaactaccggaagcttgcgttgcagcacaatgtcaaggagctttctgacccacaggccatcaagtctgctattgatgatgagctgagagtggctgaggttgctttaaggcagaacccaaagtcctatggggcttggtatcaccggaagtggttgctaaaccaaaagctagcgcctgtggatttcaaatatgagcttggcctcttggataaactgttaaaggtggacgccaggaatttccatggatggaattaccgaaggttccttgcgagattcatgggtttgccagatgatgaggagcttaagtatacgatggataaaatcagtgacaacttcagtaattactcagcatggcataatctatacttctgtccaacctactaatccagcagagcaaaggttttgagtcaaagcagaagattttttccgaggagtttgaacttgttactcaagctctttttacagatccaagtgaccaaagtggatggttctatcacctctggcttttagctcaaacatctagtccagataacccacagctgattgcttcatggccttctaatgctgcaaagctcagtttctcttttatcaaggaaaaggctgagcagcacacactgtcatccgtctggtcaaggactgtacccattgttctttattttaatgagcctgtcaaaggattaaatcattcaagtgtgaacttaaagtctgatttggagttcggtaaggatatccaatggaggcccctcacaatggcagactctgggtactctaaatgttgggccacatatcttcaaattacaaatgaatgtagcagtttgcaggaatattctgttgaaatgagcataccctgctcggatgacattgtgtctagaagtggctctaactacaactgtcctgtgcattttacattttacattgaactgatcagcaacaacgcagcccagggtttagatacgtttgataagccagttgcctggaattgctcagactcattccagtctcatggaaaccgtgatcctatccctttggatctgctaaacattactagtgccttggtcgaacatgactcagattggcattttgaaaggctgtctgaggagatagatcttttcagagagttagctgatgacaataggttatgctctaaattcgttctgaatctccttttccatgattataacccaaatgccataacatactcccttttccagcaagtttgggaagttgacattagcccggctattgcttgcttgtgctgctataaaatcccgtggaagatctctaattgaaaggaagggatactgtgaagaggcactggggctcttcactgacttgattcacctggatccatctcataagcagtactatgaggatgaacggagcttagccctgatggataagttaacatgtgacatggagactttcacgaagcattgttctgttcaggttcaaccaaattcagctcccctgcatcatgtgcagtttcgcagattgtctgtaacacgcatcggatttgctgagcgcctgttgtgggttcaaatgctggacctaagccataatagtcttagatcagtcgaaggtttggaggctttgcagcgccttgtgttcttgaacatcagcaacaaccagatcagtagtttcacagcacttgaaccccttacgaagataatctcactgaaagttctggatttgtcgttcaacgagattggagctcactcaattgacacagcacggtatatctgcccgtctccgttctcacacaaaactgaagcaagtgaagcttttgaagagtaccaggaggtaaataatatcaacgtgacggaatactgggacgccatattgttcttcagatctttgaagctggcacagcttgatatcagaggaaatgcagttgccagcaaggacggcttcagaactcttgtcgtgacgctcattccttgtctaaaatggtttgatggtgaaggtgtcagttaatcggtggagttccacttaggagttgggcaatcttggtagtgtcaaggctcactatgtgaactattttttgctagaagccattgatttgcttcatatgcagtgctgtatttgtttatgcgaatctgagacatgatcatgatgttacagagttctgaattttcaggattgaactgtcataggtcatacaagaaagaagatgttatctaattgcaagttgttctactttcagaattctttaataagtttatttattaaaatagaacagagctacactgctaccatttacatttttgttgtgagcgttgctctcttccagaggttatctgacgatgatgttgtaattgaactttgggagttttgaatgcagtttatgtactacagattttctcccgttctcttttcacaaggcctgaagctaaaatcccttgtcagaggctcttgattctagtgtcgcagtcccagacttaactagtccaacaatctgtagtttctatttagatgcattcttctaaacttctgtttttgttgatagctgtagctctggagctaactaaagactatgtaaaataaactctgcatcatagtagaaaatagaaaagcttatgtatgaactctgaagttttctaataaacaatccttcaaaaataggaaacaccaatcatgcctctcagtttcagatagcagagatgagccccagtaacttagtacatgcgtagtgtattccctttgaagcacgattcactcaaaacacaggagcgacatcttctcttcaacggagcaatcgacctggcacgacgaccggcaggcggccgggatcaggatgagccccaggcaccgctgctccgtcggaggcgagcagtggcgggcgctgcggtactctacggcgtcctggaggatgatgttgccctgcttgtcgatgcagtggaacaggccgtggaagtagcggccgtcgttgacgccgatgagcatccgccggaacagcagcttccggagcttcgcgacagacggtgagctgctgcccacgggcgcggtggagctgttgcggtacgtgtctccagaatccgggatggcttgcgacggccctggtgctccttcttccattgtgctaaggatcccctctggtagtggtagatgagcatgggcatgggcatgtaacagggttaaagaaaatttggatatgggttctggtacgcagaattactaggcaagattttatgcctggtacttaaggatctcgatggcaggggtggataattttcgcagaaaatttcgaaactggtaggtaactgggtcagatccgaatacagatagcttagctatggttttgggtgctctgtttcgagaagtaggaagggaggagaaggatcgggcgtaccttctacgcgctcgtcgccggggaagacctggaggagggctgggtgctcgcgttcggggccgggaagacctgg

SEQ ID NO: 25335 - DNA, 2321 bp, Zea Mays
caacagcaggggctcttttcacagactcctcaatctcttccgttccgtccttccccgaactcgctcaaaaccctagccaaacgccacagggtcgccgccggtcgcccggccgcatccgctgccgccgctgccgccggggacgatggcgaagcctcggcgtggccgctccgcgtctcgctccacctcgggatcttcctcccgctcgccgtcccactccgtctcctccggctccgtctcgtcccgctcccgctccttctcgtcgtcgtcgtcccagtcccggagtcgctcccctcctcctgctaagcgcagttcgcctggagcacggaaaggacgatcaccttcaccgccccctaaaaagggttcaccttcaaaaaaagttcgttcgccatcaccaccccctaaaaaggcttcaccccctaggaaagcgtcgcctcctgctgagtcggttgttctctgcattgatcatttatcaaggaatgttaacgaagctcatctgaaagagatatttgggaactttggtgaagtggtgaatgtggagctatcaatggaccgaatggttaaccttcctcgtggctatggatatattgaattcaagaagagagctgatgctgagaaggctctactttacatggatggtggtcaaattgatggaaatgttgttaagttgaggttcactcttcaaccacgccaaagggctgtatcacctatgaaagctccaccccctcctccaaaacgagatgttgctcagattgaaaaaggtcttagcagtgctgaaaaggatgcccagcagcgtcctagggaatcatctccacgaaggaagccagcttcaccaccgcggaaacgatctccaaatcgaagggctgaatcgcccaggcgtccacctgacccatcacctaggcgtcgtcctgattctccgcctattcgtcgccgaccagatccttctcctgtcaggcgtggtggcacacctcctcgcaggagaccactgtctccagttagaaggcgttctccttcaccacctaggaggcataggtcaccgatgcgtccttcacctaggaggggacgtggcagtccttcaccacgcaggcgctcccctgggcctcttaggcggcgctcgccacctccaaggcgtttgaggagcccaccaagaaggccaccacctccacgtcgctatagtcgatctcctcctcgccgaccccttcgctccagatcgatttctccaagaaggggacgagggcctctcttgaggcgtggtaggtcaggctcatcatattctcgatcacctactccaccgccaagaaaggggccaagaagggtatcaaggagtcgcagccctagaaggcctcccagaggaagaagcatctctagtgacagccgaagcagcagttctccttcccctagacgtggcaggtagaaggaacccgttgcattgtgtatccggcaggtaaagccttttatcccctgactcagatcaagtgttggtttgaggagaagataaaagaaccctacggcaatgcttccagtggatctgcttaacatgcctggtgggctcactggcttgtgatttgtacccgagacagaattatctgccatgtgacatctggctcatgtacttgattgtaccccaagtgttgaaaggtttcatctactttgttggaaggagtttttcaacattcccattgtattatgattccgttgatcaagcaatttgtgtatgcgcaggcgcacgcacagcgtacaccttttctaatctgaaaagagttgtcattttgccaaaccccgccctgcttgttgccctgtcccatcagtcattggtttactgacgcgacgcaacgccgtttcctacaacatcctcatcgccgcctactctcgcgcgggcctacctggcgacattcgcgcgctaggaacggcaatgtagggtattgggcgtacccacgtgacggcagaaaaacatattgatgttcttctaagggctcagtccctttgggaccaagggtaatgaatggaattttgaggggatcaaaatcccttactatttaaaattgaatattgagggattatggtcctcttaatcccgttcattacacatacacttgctgtcgaagaagtggaatgttgggacttatgactcatctatttgtaaaattgtctcaaatagttaaatgacacaagattatatttgacatttctatgctcgtaattgaaggagagtaaaattggtgtaactggatatatgtactgccttgccttgtgaaaggatcacgatgtacaaatggaatggagggacaaattagactttaattttttttgtgacaattaaattc

SEQ ID NO: 25336 - DNA, 2683 bp, Zea Mays
ctggccaggggagcctcctctcctctcgtctcgtctcgtcgcacgcgagcccatccccccgcccgccgcctgcgcttgacttgacccgcgctcctcctcggcgtcggggagaccgggctcggtccgcgttgtctcggcggacggaggaggaccgtagcgcgaccgcccgtccgccgccagagccctcgtcatcgtgccggctgctcctgccgctcgtcccgccgcgttgagcattggggatctcgcgggcccttcgtctgtacccgccgactcttcaaaccctagcctctgtggcccgccgacgccgacgggaggagctggagctggggctggggctggagggcgcggaagctggtggctgttgtttcgctgattgaaagtactccatggcttaatgatgaactggtaataaagaggtcaatcattgtcagctagctgtctgaggagggtttttggagttcttactaagaagagagttactcatgctagccagtgaaggacggacacagatcttgcttgctttactgaactgaagacatgcccaaaacacctcctgtcaatgcaagcaagaacactgaaccgcagaaacaatctgcacccaacttaacaataacaaatgggcacacaagtacaaaggtagtggttaaaaaagagcaccctatcaatgatgtgaaacacattagcacttgggtttgcaaaaatttggcctgtaaagctgttagaccagcagaagattccttctgcaagaggtgctcgtgttgtatttgccacaagtttgatgacaataaggatcctagtcaatggttagtttgttcatctgacaatgatagcaagaattgttgtggttcttcttgtcatattgaatgtgcattccgagagaagagggcaggatgctttgatctagagcaaattatacatcttgatgggagttattcctgtgcctcgtgtgggaagatttctggaatactaggatattggaaaaggcaattagtaatcgggaaagatgcccgccgagttgataatctatgccaacgcatttatttgagttacaggctattagagggaactgtccattttaaagaattgcatgagattattgaagatgcaaaagcaaaattggaaagtgaggttgggccacttgatggaatgtcggcaaagaatgcacatggtatcgtaagcaggttctcagctggtatcgctgtgcagaaactatgctctacagcaattcaaagagctgacgagtggttgagttctcctgacctgcatcttcgagacataacatcttcttccctcattgtcatcttgaaagaaacctcgtcttctgacactatcaaaggttataagctatggtactggaagagcagagagcaaccaagtatggaaaagcctgttattgtgtccaaagatgaaagaaaaatacttctttatgaccttaccccatgcacagaatattctttcagagttatatcattcacagatgatggggtacttggccattcagaatctagatgccgtactgaaagtagggagatatttgtcatgcgtgcaccaaagaatgcagtgggaggaggggctacacatgcgcaaaaaaaagacaggaaccagtcttgtaagtcaactgggttcaagatccgagatatttggaagaactttcaggaagctttagatgcagaaggctgttttgaaggattttctgaagatgtacatgaaggttcctgcagcagaagtgttacagagacagagttatctggagcttgtcgcaaacttcatttcaactcatcttctgtccccgacctaaacgccgaggttcctgtacccgtggactacactgagaaccattattattctaagaagggacttgtgaggtcaaatgacagtggtgactctgagacctgcgccgttggccagactgcagagccgcctgcagttgaatctcggcaagtaagcaaggtgaatagcgtaccagttaataaatgcgagcagaatggtgcttctgctatttgccatgaaaagatgctctccggatcgacgaggcaactggatggggattatgagcactgcgtaaaggtagtaaggcagttggaatgcgatgggcacatcgaaaatggtttcaggatgaagttcttgacatggtatagtctaagatccacagaccaggagcgcaaggccgtgagcacatttgtcagaacgttaagcaacgaaccaagcagcctggccgagcagctcgtcgattctttcggagaaatattaaacagcaagaaggccaaaaccggtttctgcagcaagctatggcattaggacaaaaaggactagatctcaagatactgctaactcactgattatccatatttttcactgaccggtgcagtgaaattctagtttattccatcaaatttgacagcgatgaaaagggggcatctgtgagaataggagattattttgggcagcaagtagcctgctctgaaataattcttttccatcaggaagtagtggaaacttgattttcattggattacctgggtcaatccagaaattattgtagaaggttgtctttttttcccctttgttgttgtggttcgctgagaaattctttggagatagcagtccgttggttattctgggttattatataaatcatggtaaatggaatgtgatggtacaaagtctctggtttacttgtgct

SEQ ID NO: 25337 - DNA, 764 bp, Zea Mays
ctacgtctgccttaaatccctctggcgtccctccggcgcgatgcggccaaccgcgcggcctccccatcctcaacgcctagccccaatgcactgcacccccgcatcatccaccccctccctctcatcaagcctttttctcgaccgcgatagtgacggcgacaagccgacaagcacgacccccctctgcctcgccacgtgtggcctcctccaccgcctggtttggagttttcccatccttgacggcccggttcgaaccccgatcaactatcctccagatcggatcatggcgacgacgcaagagcgagatgtggcgcagccctaacgacggaggaggcgacgtggagtaactatgtggtggcggagcgcaaagtcgacgaagactctctctgccgccttctcacgagtgggattgtgctaccacttgaacagtcagatatcatgctttgtttggaggcctaactctgcaagcaaattcacaccgatggttaccaattgagtgatgaatattgtgttatctgaataatctgtagagagggtcttgactatgaggttagggaagaatgatagctactactatattagcaatgtctgttttactctgctagtatccagtgtaatgtttgaatcagcgcaatcggtcagttttgactactactactactatgccatgtactagaacttcttgttgtatacagtgtgtggttcttattttggtagcaagactgtaatttgataaagcttataaagcagcagtaagacatgcc

SEQ ID NO: 25338 - DNA, 2143 bp, Zea Mays
cacaaaggcggtgcagcgccagtgccgagtgtactggccgccaccactcgccactcgccactcggccccaggaccctcctcttcctcgccagcaagccggcacgatccctcccttccgggaaaaaggctcccaatctgttccgagccagccggccatggcgattagggctggccgctcgccccttctccacctcctcgccctcgccttcctcatcctcgccgcctctccctgcctccaagctcgagtggaccatcgcaaacagaatgtctcatcgggtcgaaaggatggccctcatctcctgggtagatcaaaggaaataacacacatgaaattaaggagagttgctgtaaggaagaaaatggaagtagtgcagcaggatgatgaagcgttagttaaacttgagaatgcaggtatcgaacgttcaaaagctgttgactctgctgtgctgggaaaatacagcatctggagacgtgaaaatgaaaatgaaaaggcagattcaagggtccgtttgatgcgagatcaaatgatcatggccagaatatattctgttcttgccaaatcgagggacaagcttgatctctatcaggagctgcttgcaaggctcaaggaaagccagcgctcccttggggaagctactgctgatgctgaacttcccaagagtgcttcggatagaaccaaagcaatgggccaagttttatcaaaagcaagggatctattgtacgattgcaaggaaattacccagcgtttgagagcaatgcttcagtcagcagatgagcagagaaaagaaagttccccaatagtgagaacctggaaaatcctgatctttaccattatgctcttttctcggacaatgttttggcagcatcagttgtggtcaactcaaccatcatgaatgctaaggagcctgaaaaacatgtatttcatcttgttactgacaaactgaactttggggccatgaacatgtggtttttgctgaatccacctggggatgcaacaatccatgtggaaaatgttgatgacttcaaatggttaaactcttcttactgccctgttctgaagcagcttgagtctgcagccatgaaagaatattatttcaaggctgatcgtccgaaaacactctctgctggttcttctaatctgaagtatcgaaacccaaaatatttgtccatgctcaatcatctaagattttacctcccacaagtctatcccaagctgaataaaattcttttcctggatgatgatatagttgtccagagggacctaactggactctgggaggttgatcttaatggaaatgtaaatggagccgtggaaacatgtggagagagttttcaccgatttgataagtacctaaatttctcaaacccaaatattgctcagaattttgatcctaatgcatgtggttgggcttatggaatgaacatgtttgatctggaagaatggaagaagaaagacattactggaatttaccacaaatggcagaacatgaacgagaacaggctgctctggaaactggggacattgccaccagggcttctaactttttacaagctgacacaccctctggacaaatcatggcatgtgcttggcttagggtacaatccaaccattgagcgctcagagatagacaatgctgctgtcatccactacaatggtaacatgaagccctggctggaaattgcaatgataaagtatcggccttactggacaaagtacatcaattatcagcattcctacattcatggatgcaagatcagccaatagaaaccaccctcagatattcttctgtgatgaacattgaagttggatgggactcaaaatgaaatcagtataactatcacatgttctttattcgtgttatattagatttgttagttatcacgtgtatgtagtttcgtcgcccttttgtggtgctttctcccctagctcattgttggttcttgtccctttttgtcatgaaaagaatgatgagctctatgattctcatcagctgataaatgtaatgtctgaatttctgtcggtggcaaattaatgatcccattcaaacggtatcaagtgttcgaacattcatgctagcatttgatggcaggttgagagttatttacgagcatctgttcgttcgtggttgagattgttttttta

SEQ ID NO: 25339 - DNA, 1986 bp, Zea Mays
ttttaaaacctcctcttcctccgcacctgttcacccctttcttttccgttcttctccgtaccccaatcactgctactcaacagccaactctttcgcaaccaaatatttcttctggcgttttggggtttgcaaaccgctatcaacattggagttggagcagaatgtgatctgtccaattcttctcttgtcttatttttggcgtgctttgctcttctttccccctatttcctgaggaggggttcccgtcttaatctcttgcgtttagtgtggcttcgaagagttagcagctgccatggcacataatgtgtgggaggcggacaagatgttggattcctacatttatgattacctgttgaagaggaacctgcagaacacggcgaaggcattccaagccgaaagcaacgtgccttcggctcctgtttcgattgatgcgccaggggggtttctcttcgaatggtggtcggttttctgggacgtcttcattgcaagaacgaacgaaaaacattccgattctgccacttcttaccttgagtcaattaaagcacgggagcagcagcaacaatcgcagcaccagatccagacgcagcaactcttgctacagaggcatgcgcaacagcatccgcaagagcagcagcaatggcggcagcagaagcaacagcagcgcagcgaaaacactgattttccaactagtgcccagaatggtactgttgctgctgatccaccagcgcgacaaaatgatacaactgcaggtactttatctgcaaaagtatttgaggatagaatgaaaattactgttcagagggacgtttcagaagagacttcaatgaagcaaaggctcactgaaaccatttgcccattactggaatcaaacccaacttcaatgctaaagtcacctgcaagatcatctctagcttcagggccaatcttccaaagatcagctgggggcatgtccggttcattacagcaagctcagttcaggagccagccacttctgggatcaacacaggatattaaggcggaaacaaatgtagctttgaaccagagagctgcaggtgcagatggatcactatttggagtaccaggctctaatcaggcggggaacaatttgaccttgaaaggatggcctctcacaggattagaacagcttcgatctgggtttctccagcacaaatcttatatgtacccggcccagccattacaacaccagctccagtttctcactcctcagcagcagcatgctctaattcatgttcaagcacaacaaaatgccacttcacctggagacatggataacagacgacttcggatgctttttagcagccgaaacttggttcctgggagagatggtcaatcaactggtttcactgaaattgttcccagtgttggccagtcattgcaaaacatgtgcttacctatgcagcgcactgagacagatatgctgatgaagatagctgctctacagcaacaacagccgagtaacaatctgcaacagctcctccaacatccattactgagtcagcaacaacaaagctcaacttatcttgaaggtgagcaggaaaaaatgggtgctggaattgtaacagtggcttttgctggaaatgaacaggtttctaagaatcgaaatgggcgaaagcgcaaacatcctatctcctcgtctggcccagccaatagctctggtactacaaatactgctggtgcttcccccagttcaacaccttcaactctttctgcacattctcccggagaaacaatatcaacaccattgcagcaccaaaatgcgagctcatgtacgactttagttgtttatggttctgagggtccagtaccaataggatcgccgaccaatcaacttgttgatatggatcactataccgaggatgactccatggaagataatttagaaccattcttgccgcataatggcacaaatccaagagctgctggtagccattgtatcagttctggaaaagatatgagctctttggg

SEQ ID NO: 25340 - DNA, 1531 bp, Zea Mays
acccacgcgtgatgcccttatggccccacacccgcggcacagtgatgaccactgtatccccgccaccgacgcagagccttcttcggggctgttggatctccgcggcggctagggaaggcgccatggaggtggcccccatggcaggagctctcgtcgagggcaaattggacccagtcgttggtagacaagatcagattgagcgtgttactcagattttgggcaggcggacaaagaacaacccctgcctaattggagagcctggtgttggaaagactgctattgctgaggggcttgctcagcgtattgctaattgggatgttcctgaaacaattgaaggaaagaagagcgtcggctccatggacgaggacgatgacagtcccgcctccggctccggtcgccataagaagaagctgcgcctcatcatgggcctccacgacggatcagcaaaggttcaaacaggaatatctctgaacaccttgggctctctaggctatgagatagatcatggatggagacagagaatagcagtgtgtcattctaaactgggagtggtggtcaacccaactcagcaggccgctgccgatgcaatgccaacacaacctcgcggtgtcgctgtgctttctgtgatgctatttggctggcgcacagagttcagtggcgagaagaagtacatgtgggtgaggcaggggttgatatttccatttttagactacatgaaccggtgagtagtagtttaaaatgcataactacatggacaactgttagaatgctgctaaaacacctgctcgagtagttttgacaactttactatggttagaatatgccagcttgtgccttaagaacaagttgtatttgtcatttcagatttcaagggcagacagaactaagcagttgcaaacctgttgatttccggagggcagtagaagaggcctttttggctgatcagggattctcagaagtagtcgtacattgcagcaccaagggcatatatgctcatacaaatgtttcccaggagttatttttttcaaaacacagttgaaaggttgcacttcaattatgagaactaaatctaactcttttcaattctaaaaaaacaggtgaatatttagcgaccacagaggcacagaccattacagggatatactttaacacaagcaagcaatacctcttctcccatcagaaaaacagaaggatcagcagacatctcttcatccagtgcagagttcaatgcatcacggacagtcatctgaacatgtagaacaataatgtatatgacttgccacataaagatgtagaaactacagcatgggaataaaacactagcgggtgctggcatagggtcaaaatagagtaaaaatcaagaatgaaacaatgcataaaatgcataaacacaatgatttgatgacacatcaaatgaaccccaagtaaaaaattaacataagaaactaccaagtgtgcttcatatatatgtatcagtatatatatacaatgatgtatattctctgtttttcgagcatacaaatgtttccca

SEQ ID NO: 25341 - DNA, 1379 bp, Zea Mays
ccgccgcctccgtcctttctctctcttaccccttcacccggacccgcgcccgcgccaagccaacgccacgccatgccgctggctcctctgtcgctggaaccccctcccttccgtctcatccgccccgccaccggcagcggcggacgcgtcctcccggtcccagggcctgcaccgcgcctatgtcgatcgctgagggcggctccggtggcacccgacaccacggaggagccgtttgcggccgcgcggggccggctagagtcgctgagccaggtcacaggagtgctgggcacgcagtggggcgacgaggggaagggaaagctcgtcgatatcctctcccagcgcttcgacgtcgtcgctcgctgccagggtggggctaacgctggacataccatatacaattctgaagggaagaagttttcacttcatcttgttccatcaggcatccttaatgaaaacactcaatgtgtaattggtaatggagcagttgttcatcttcctggattcttcaaggaaatcgatgggctagagtctaatggaatttcttgcgagggaaggcttttggtatcagatcgtgcccatcttttgtttgatcttcatcaagttgttgatggtcttagggaggcagagcttgggaattcctttataggaacaacaaagagaggaattggaccatgctattcgaacaaggttacaaggaatggacttagagttggtgacctgcgacatatggatatctttggtgcaaaactcaacaccctattaagagatgcagctctacgcttcaaagattttgaatatgataacaagattctgaaagaggaagttgagaagtataaaaagtttgctgaacgattggaacctttcatcaccgataccgtgcatttcgtgaatcagtcgattttgcagaagaagaaaatattggttgaaggtggtcaagctaccatgttagacatagactttgggacctacccctttgtcacttcctctagtccctcagctggtggaatctgtaccgggcttggtattgctcccagaagtctcggtgatatcattggagtggtaaaagcctacacaactagggttggatccggtcctttcccaacagaactattgggtaatactggcgatttgcttcgtgcttctggaatggaatttggtaccacaacaggtcgccctaggcgttgtggctggcttgatatagttgccctgaaatactgttgccaaatcaatggtttctcgtctttgaatctcacaaagctcgatgtcttaactggactcaaggaaattaagctgggtacctcatactacaccgatgatggtaactctgtccaatcattcccagcagatctctctcttttggagcaagtaaagttcctgtg

SEQ ID NO: 25342 - DNA, 1101 bp, Zea Mays
tcccatccgaaaaccgaaatcccccactcttctcacccgtttccccactcgctcgctgacacatcgcacattcgcaccataccagataccaccgccgctgcacacaaacccagaaaccaccggcaataaacaactcccgctcccagtctccgatccgaggaagccggaagaggggatttcgagccgcggcgatcggggctagagtggccctcgacgcgtccgcgggtggaattgccgagaagccgagagagagggcttggagcggagttgcgggaggtgggagagaaggcggcgatggggcgcctgttcctgatgcacctggacggcaacgtctacagctgcaaacactgcaagacccacctcggcgttgccagcgacatcatctccaaggccttccagtgcaagcacggcaaggcgtacctcttccataaggttgtcaacgtgacttctggagtaaaagaagaccgcatgatgatcacaggaatgcatactgtttctgatatcttctgtgttggctgtggatccatagttgggtggaaatatgatgcggcacatgagaagggccagagatacaaggaaggcaagtttattctggagaggtgtcgggccctgacggaagccaatactgggttccacaagatgctcacttgggcggaagcgacgccgatgacatataaaacacgatccaacaagctcaagcctgtcgttgatcccctgtaaataacctgggtggcgttgctctttaggcagccgacagccggggattgctccattgaaataattcgccggcgtaaattgttgctgttccaggtgacatgatcgtatccctccctccctcccgttgtccctggaagtcattagatgttaccgctgtatatgtgcgtaacctgtgttgcttataagtccatctgagttgtatgccaagcactagtgaccaaataagtaaagtaaatttctcaagtgtctggtcgacctgggtgtcaagcgagggcagtatgtacaaatctgcattgtattgtgtgttcggttccaacgtcactcttaaataaccgaatagctgcacgcttgtttttaaggtgtcctgtgctactatcatgtctg

SEQ ID NO: 25343 - DNA, 2931 bp, Zea Mays
gttccggccacgaaaggacagatgttccgctcggttccacgtcatcacctatctccgtttgcatatccatcacgcaaaatgaataaaaaattaaaacaaaggaaaacagaaaagctgcggaagttgtcaagaactccgacgatcccacatatccgtcaatcgatcgactcccgttcccctcggaatcgaaatggccccgagaattccaacgcacaagaaggggaacaagggaaccaggcatcgcgaagagagcccggggtgatgaattgttacggttcatggacggagcaagcaaggagcctctccgcaaggactactacaaagttctggaggttgactatgacgcatctgatgacaccatcaaattgagttatagaagattagctttgatgtggcatccggacaagcataagggcaatagcaatgccacaactaaatttcaggagattaatgaagcatacaaagttttgagtgacccagctaagcgactagaatacgatgtttccggttgctacgagatcgaccaatatactttgcgtgagtaccttacaaaatttaagggtatgatacttacctgtaatggccttggcatagaccattcttctaagtgggcccgacatttgagggaactgaaaccccattgatcaacgggtatggatttactactctatgtaagacacaatgtgctgtatcacaattcacaaacaatggccccctactccccttagccactttctgccaaaaagatgcatgtatgtttactaattccagatggaggatggtctgggctccattctcaatgtttagtgagttgtgctggaaattaggtcgggtcgggctagctcggcccaacccaagcgcatcatggttcgagccaagaaagactacaaacttttgggtcgtgtcataccagcccaaagggtagaaacagtggctcagctcgatcctaaaccacgttatgttttcgttgggccgtgacgatcagtccgacccattacccatatatttgaacaatataaaatctaaatattacaactaaataaagtccatagcttactaaattaaagatattaaacaatactaacatcatttaaccacataaagtgcaaatattacaacaatgtaaagtatatagcttactaaattaaaaaattaaacaattactagttagatgcccgtgcgttgcaacggcaatacaaaatatttttacacaataattacataaaaatgaacaccacatatataatcgaacccaatatctcaaaaaaaaattggcaacaatcaatacagaaataaactgatacaaattaaattatacaatacaaatatcacaaaacaaagttttagaagcatgttatttaagaatctcacaaattacatgtccgttgtcgtctcgccaccgaagtacagcacacctcaatgagaacttattctataagataagtgataatctagttaatttagctaagctggacataatcgtttaagtcgttactccctcccgaccgtggcgcccactcgatgctcgtcgataagtcgctccgccaactcattctacgccttgaacaacctcaaagtgggcctgcgttcacttgctctcaacgtcgggtaggatagaaatgaaatccaataagggactaaaataaacaaacaaaacatgacacaaaaattgactgtttcttggattgcagataaactacgcctctgctcatgacaatgaaacactatttgatattattagtgtaaaggtatggaacttatcaggatatctaggaaatttactgcaatttatgtattttggtatcaattatcaatctgccaatcaatcattttcttttgctttcttcaataaacatttattggcaagacagattagcatgaatgttttgttacacttttttttactgcttgcagtattttctaccttttgaaattatgctttatagttataaactaaacatgtatttatgtaacaatttagttttccagaaacagttttccaatctatttcagaacatgatctggtactttgtgaagttttttgtttgtttgcttgtgcagactctgatgaacctctcaattgacgagcgatgcaggaaaaataatttgtccacaagcatgattgcattatcccaggtttgaacttagaagatggccctgcacactctgcctcgacgtcatcttcaccagagcagactactgatgttgatggaagtaccaccggtgatgtcaccttctaagtataacttgggtaaccttattacctcttctcttactccaaatgctggttcggtgttatccatgttctcatcattaacctcttaaagttctgaaaagacaaggatgaatgcacactgcacttcctactgcacttcttttgaacctatcatgcaatgtccttctgcttgggtgtgagcttcaaaaacacactgaaatctactaagctagtagttcatctaaaagaaaaggtgtgtgctctgttctttctatccagcataattggcttctaattagagataaactccaatactaagaaccttctgaggaagaaaaacaaggcattgaatggttacagttatgttctgtgtaataatggttgtgtgggaaccagcatccaccttccctctgaatgcagttttggctaatcatgctggaacacaattcccatccaatgtgatctgagtctgccacctctagacatgatgattgaagccaggacaaacttcggtgatttaatttaaagagaaataaatattaaaggtggtttgattatttggactactctcaattaatagcattatctttaacaatgctacctgtaacttcaatatttggaaaagacgaaacaggagcttagcttggtgcgtcgaagcgaatcagagtagaagagatcccctcaccctttggagagacactactcttgtatcttcc

SEQ ID NO: 25344 - DNA, 3603 bp, Zea Mays
gttccttccccaactatcgttaggcttctccaccccgccctccccgccctccccgccgaacgcgcctcactctccctccatgcagatcaatgcgtccttccaccccaaccgtgctcctcgcccttctctcgtcgtcctcgttccccctagactggcgtggagtgaagatccatccggactccgattgatttcttctcctgctgttgcaggtgatcaagatccaatacttgaaaataggatgttgacatgttactgtttagatgacaccagatgataatgcccttatagctctcaaaaaaggcagtaaacttatcaagtatagtaggaagggaagacccaagattcgtgagttcagactttctagtgatgaaacatcattggtttggtattcccatagcaaagtgaagtaccttgtactgtcttctgtctctagaatcattcctggacaaagaactgctgtatttaggaggtttttacgccctgagaaggactacctatcattttctttgatatacaagaacggacaacgttcccttgacctggtttgcaaggatcaagcagaagttgaggtctggttttcaacgcttgaggcacttattacttcatgccgtaaaagttattcagctgatggtccaagtgatagattatcagtttctgacgaagtatcacattaccaagatacttttcatgatacaacactagatattgcatcgagtatcacacgtacttttaactcagcaaaaacagatgttgtatctgatcgtgcaaatatgctaagagcaagtacagacagtagccggcttagtatttccagtgcccctagttcttcaagtcaaggttctggacaagatgacattgaatcccttggtgatgtttatgtgtggggtgaggtgtggactgatatgatccctgcagaaggatccgcaaactatttgtgctccaaagcagacattttaattcccaaaccacttgaatcagatgttgtcttggacgtacaacagatagcgtgtggttataggcacattgcactcactactaggcaaggagaagtatttgcatggggcgaagaacttggcggacgacttggtcatgggaccgatgcagatattagccgtcctaaacttgtcgaagccttagcagtgtcaaatgtagaatatgttgcgtgcggcgagttccatacttgtgctataactgcctctggtgatttgtacacttggggtgatggatactacaatgctggattgcttggacatggtgctggaactagtcactggcttccaaaacgagtctcaggacctttagaaggggttcaggtattgtctgtttcatgtggttcatggcattcagcactgaccacatcaagtggtaaagtgttcacctttggtgatgggacatttggtgcccttggacatgggaatcgtcatactgtcgcatatccaaaggaagtcgaaactttgagtggatttagaacaataaaagttgcctgtggactctggcattctgcagcgattgtggagaccactaatcaggcaggtgtgaatgtgatatccaggaagctatttacctggggtgctggtgataagaatcccctaggtcacggggataaagatgctaggctagttcctacttgtgttcaatctctcattgattataatttccatcaggtagcttgtggacatagtatgaccattgccctttctacatctggtcatgttttcacaatgggcagctctagcaatggccagcttgggaatccaaaatctgatggtaaacatcctaccccagtacaagataggctggctggagaattggttgaagagatctcatgtggctcatgccatgttgcagtcttgacttcacgaagcgaagtatatacatggggaatgggagccaatgggaggctgggacatggtggtgttgaagataagaaaaaaccaactcttgtggaagcattaaaagatcgtcacgttaaaagtatagcatgtggttctaatttcacgacctgcatttgtatacataagtgggtttcaggtgctgatcagtctgtctgctcaggttgtaggcaaccatttggcttcacaagaaagagacataattgttacaattgtgggcttgttcattgccatgcatgtagttcaaaaaaagttctgaaagctgctttggcaccaactcctggcaaaccacatcgcgtatgtgattcatgcttcatgaagcttaaggcagcggagaccagcagcaacagctcacatagcaaaagaaatgccattgctcgtcgctctgttgatagcaaagacaggtcagagagaccagaaataaggtcttccaggcttgcaactggatcaacagcagaaccactcaagcaagctgagctgaaagcagttagaaacgagataaaaccagatcctatgtccacgatgagggcaccccaagttccttccatgctaccttttaacaatcttgcttttggcgcaacatttggtggtccagctagtctgaagcccatgacaatggctccaatgccaatggccatgcctatgtcaccagctcctctcacaaagaagccaactccagcagcagcaactcctctttgtggtaaaagtgataccgataacttgaagatggctaaacaggtgctgaatgaagatatctcaaagttgcaatctcaggttaataaactgaaacaaaaatgtgatgcccaagaagagcaactgcagaaagcggaaaggagagctgaacattctgcctctacagctgcagaagagtcttcaaggcgtaatggtgtcttggagttcattaggttccttgacaatgagctcaagagcatcgcagatagggtgcccagcgacgctgccgacggcttaaaagccttgcaaaaccattcggagaggtttctcacagaacaaggtgttcgtccactggaagccacaggtatgcatcgtaagtgcgcaagcataggcaacctcgtaatgtctcaggacggcagtgctggaaacgcgagcagctcggctgcttccttggcgagcgagtctccatgccaccgtatcatggagaacagctcgagagctaacggcgacttagcaccgaagctcggtggtacccatggagaagtgcagctgattgagcagtttgaaccgggggtgtatgtgacgctcatccagcttagagatggcactaaggtgttcaagcgtgtccggttcagcaagaggaggtttgcggagcagcaggccgaggaatggtggagggagaaccaggagagagtgttcaggaaatacaaccacccggccaactaaccagcctcaccagacttcaccattggacacttcaagaagaaggcaaagttttcttcatgttgcttggggcattgctcctgcggctgtgtgccgtgggcctgtggcgatgtagaattaggttgtggatggggaagatgctgatgtagattctcattctgttgttgtttacctcctacagtttaccctttctctagctcacctcctacagtttactgtttcgcagttttgatatctcaaattattcattcaacagccgtgtgtttggttggaatgtgtttcgttggatcgcggcggtgaaaaaaactgacgtgga

SEQ ID NO: 25345 - DNA, 1564 bp, Zea Mays
cgatccccaccacttttttgtggtcacacgcgccggcttctccttcagtccttctcccgcttccgcttccgcgatggtatcctaccatccctcccttctccgtccatccgtcctcatcgcccaggccagcggcatcggccggtgcccaacactcaacgccttcctttccacccccgtcgtctccgcggtgccacttcgcctgcggcctctgcgcgccgccgccggtggagcagcctcgccggtcagtggcgatggaggcaaacgcgctgttccgccgcctgccgcgctgcttgtcttcgcgcgtagcaacttcctcccgcttgctctcgttagtggggtgatatttggtctcctagatcctactcttggatgccttgctcacaaatactctctgtcgaagttcagcacttttgggatattcattatgtcaggactgaccctgcgaacgaaggagcttggtacagcattagaagcttggcctgctggattatatggattaggatctgttttgctctttacgcccttcctttctcaatttatcatgcaagttcagttctcccctcgtgaatttatcactggattagctatattttgctgtatgccaacaacattatcaagtggagtcatactaacacagcttgttggtggtaattctgcacttgctcttgcgatgacagttgcatccaatttacttggcattataatcgtacctctttctcttgcaagatacatcggcactggagctggggtgtctttgcctactgagaagttatttagaagtctggtcaccagacttctaatccctcttattatagggaaggttgctcgagaagcctcaaaaggtattgctgattttgttgatggaaaccaacaaggattttcagttggaaacgcggtgcttcttagcctagcttctacatattgcactgttggctttcaacattgcaacgttgcatatcttgtcacatcttgaaaagaaaggggattcagtctttgcaaagaaagagtacacacgagctgtcattttggtgactagtcagaaaacattgccagttatgataacagtggttgagcagcttggaggagccctcggggagtccggacttctagttatcccttgtgtttttgcacacattaaccagatcattatcgattctatcatagtaaattggtggcgccggagggatcaacaatttagtaatccaaagtaactccataattcaattttggcgtgcaaaacagagaattagtcaggaattgctgactgcgaggctgattttgtgaagatgtaattgtacttgtccagcaagttcagtaatggaagaattgctgactgcaaagctgatttcgtgaaggccgttatatatgtcttcaaagcaggaaaatgaattcatctccaattgacaggcttatttgtttgaggcctgagtgggtgctgttgtagtggccgttatgttttccttcacatctaaaactgaatctccacataaacattattaaatgtccagatttaggttaagtaaaacctacgcccctctttggtagtgctccatacggatctagc

SEQ ID NO: 25346 - DNA, 2124 bp, Zea Mays
ctagctagtttctaggaccttcccacgccctgcgcccctttgctgtctcaaacctaccttaaacccttgttagtttctagaaccttccagacctccagttcccgacctcggcgccatggacctggacccagaggggatcttccgcgacgacagcgatgaagacgaagacagtgtccaggagagggaggcgaacaaggagatggttgtctaccttgtcgacgcctcgcccaaaatgttcacccctgccaccacccaggacaatgaaaagcaggagacacatttccataccattgttaactgcatcacagagtctctgaagacacaaattattggtagatcttatgatgaagtcgcaatatgtttctttaacactaaagagaagaagaatttacaggactcagccggtgtttatgtttataatgtcggagacagagagcaacttgatagacctactgcaaaactcatcaaggatttttctttgatagaagattcttttatgagcaccattggaagtcgatatggaataacagctggatctcgggagaataccctgtataatgctctttgggttgctcaggcgctgttgcgcaagggatctgtgaagaccgatgcacaagatcttggcctgtctattgaacttcttccactgagcccgcctgatgaccagttcaacatgtccctgttttatgcagatttgattggtctggatggagatgagatgaccgaatatttgccatctgctgatttagatggtgtttatttaatggcacatatattagtatccagtgggacgagactgggaatagctaagccacatgaatacatgattttggagctgaagtttatcagtgatctgattgaatacgttgagaggtctttcatatgcaatgatactggggctctacttcaggatgcacagacacgtttccagatgtacaatgacacaattgtcaaattttctgtacgtgaactctctgaggttaaaagggttgcaagccatcatcttcgccttataggtttcaagccattggattgcttgaaagattaccataacttaagaccatcgacatttatttatccgagtgatgagcgtatatttggaagcacctgtgttttcgttgctttacatagctcaatgttacgtcttggaaggtttgcacttgcattttatgggaatccaactcgaccacaactcatagcccttgttgctcaagaagaggttacttcgtctggtcgtcagtttgaaccgcctggcatgcacatgatctatcttccatactccgatgatattagatatcctgaagaagttcatgtgacttctgatgatgcaccgcgtgcaacagatgaacaaatcaagaaagcttcgaacatattcaaacgtattgatctgataaatttctctgcatgccaatttgctaacccagctttgcaaagacactatgggatcttggaggccttagctttaggcgaagatgagatgcctgatataaaggatgagaccctgcctgacgaagaaggcttgtctaagccaggggtagccaatgctattgaggaattcaagacttcagtctatggtgaaaattatgaccaagaggaggcagaagcggcagcagggaaagcttcccgtggtaatgcttcaaaaaagcggaaggaggtcactgatgcagctgcgcagataagtgctgcttatgattgggcagaacttgcagacaatggaaaactgaaggaaatgaccacggtggaattgagatcctacctgaccgcgcatgatctcccggtttctggtaagaaagatgtacttatcagcaggatcttgactcacctgggtaagtgaagccgggtatccgaactgttagtttcctgagacccgactgacatctgtagtgctgtctcgcggatccttgtggaccgtaatcctcccccgtgcaggctacgtgccgattttttgtatagcgacaggacagcaccagttgccaatgtaacctgtgttaagtttcgtcttgtggtatcatctgcttgtcattgtcaacatgaaacataatgtaattctggatacttagacccacaatatggagcataactgcataaggtatgttaaagcataggccctctttagcatggcta

SEQ ID NO: 25347 - DNA, 664 bp, Zea Mays
tggccccagcagtatttcaacagcaacagcgcccatgttcccttcaatgcttccaatccttggtctccagctccgcctcgcgtcttcctttccgctgcaggaaagtgcaaacccccactcaactaaaaaaagccgcaaggcaaagagaaaaagcaacgcgaagcaaaccaccatttcggcctccccacccccatcccatctcatcccctccgaggctccagggacggcgtgatgaggccagcggcgccggctgcggcggcggacgcgcaccagtcgcggctgctctacgagctctgcgcgctcctgctgaccgtcctcggaggtgtatagaaacaggggaattcgagcagactgttttgtctttggcagcctatattttccttcctggacaaccttttcttttttaccatgtaacgccgcagcaagtttggaaatggttttatactgtggggctaggaggatacttgtctgtacatacggaaaagatgatctggtctaaacatcacgtggagcttgtaattgtttcagaaacgttgttccttggcaaagaaaacgagaggtcccgtatcgctgttccaccaaaaaaaaacagaataggtaggtcctatgggagagaggagagggtaggttcgggccgctctagcgttggacttttatcctagtt

SEQ ID NO: 25348 - DNA, 1723 bp, Zea Mays
ctcgcgggagctgtacgccgccgctccactcccaggctcccagctgcccttggcgaccgtcgccgccggccgccctactccgagctgttcaggacgctttgctggcgagcacccaccacaccagatgttatccctatcgaaacggcaaggtctagattcttggacctcgttgttgaaagctttatctgtgagcatgttactgagttggtggaatgctctagctctgactgcagccaggtggatggcaaatcaagcaagagaaagcagcaggaggttcgatacgagggtgacccaagggttgctttgccattgatgtatatagcaaacctgtacgaaaccttgataagtgatgtcaatgtgcgtcttgcggcactgattgggttccgtgagaaaactataggtctagctcttgaagcttcaggtggcttgtacaggaaactgatccagaggttcccaaagagaggccactgcagcttcaagaggagggagttagcgacttctcatgcaaccaggacaaagtttcctgaacttgtggtacaagaagaaaaacgagttcgttttgttgttattaacggattggcgattgtagagaggccagaaaatatgagaatggaagatgcggaatggttcaaaaggttgactggtcgaagtgaagttgctatttgttcaagagattacaaattctattcaccccggcataagatcaggcgttccccacaggcagcatttgacatccctgatacaagtgctttggcagaggatgagaactcttcattggtttgttcttcaggatttcgctcaccaaacgagatacaaaatcagcatcagtcaacatcaaagagacctatcgaacatctagaaaatcaaccctttttacaccttttccatcaagcagaagatgatagcatgcagcaagttcaacattgtgctcagttcccacccattcatcaatgtacgagcactccacatctatcagataacccccaacaccagcaacaggcttatttatctcaacatatatcttgcttgcaagttgggcaaggtcatcttggaggacgcatgcatattattccaaccagccctgcgaagttctgtgatgagtgtggctccccatatttgagggcgacatcgaagttctgctcagagtgtggtaccaagaggctaggaatgtgaggtgacttgatcaatgtgtatatgaatctgatgatgtagcaattgtagtcttatgtttgtaaaagggtctctagcgtaatggttaaggcagcccggcgaagttctgtgatgagtgtggctccccatatttgagggcaacatcaaagttctgctcagagtgaggtaccaagaggctaggaatgcgcggtgacttgatcaatgtgtatatgaatctgatgatgtagcaattgtagtcttatttgtaaaagggttatttgtaaaagggtctctagcgtaatggttaagttttcttttaagttttctgagtagcaactctggttgggccgttttagagtgggcggtgatatcttactagtgatgggggccagggtttggaaattttctcgagaccatgttttggtctcctttttaatataatactggaatgacggtcttttggaatgacggtctttctcttcccgaggagttttttttatgcctttaaagttgtgtgagaagtgtattcttgagatgatgactcagcagagagtatgcagccacctttactaga

SEQ ID NO: 25349 - DNA, 2520 bp, Zea Mays
aggcgtcctcgccgtcctagcgtctgcctttcgacgctgctgccgtggagcgcagatcaaccctgactctgcccgatttcttctctcgttgatgctgaaggtcatttcttacatgttgcagagtgtggaaaaaccttgcaatgaaatggaaaaatgttttgaaggaaatggcaccgctgaggtccacaggcagattctttcaacgccatccttcagctatctgcttactgattttcctacttgtgttgtacaagtacttcttcggctggttcaccctcatcgtcaccacatcacctatcttcctaatcgctggcatctttcttggaatcgtcctggtgtacggtgaaccgaacaaccctgaaaaagatcatgtctacaaaaaaaatgataatactcggagtttgaatatccatgatagcagcaaatctattaggggtgtacctcttcctagaattccgtctggtgaagagagagcgccgaagcacaaaaacagtgttaagaaaattaggaagcagtctcgtggtgtagcctcttcttctgaaccaggatcaagtgaatcaggtggttcagatactgatattgctccaatgctccatgcatttcatcatcttaggtcgggcagcaattcgtcaaattcctctcaagatggtgactctgacagtagcaccgaagatacaacagagaatcaacagggcaacgacggcaggatatcccgcgaggggaaacaacatgttaaagttgttgcatggactgctgatgaccagaagaacataataaaaatcgggtgcttggagattgagcgtaaccaaaggttggagaccctaattgctaggcgtcgggcaaggaaatacgcagacaggaacttggcagagtttggcagcactgattccttacccactattgaagagctatcaaagttcaatgttcaaattcctgctgtttttgctcctaggaaaaatccttttgatcttccttacaatgaagataacttcccagattctgctccatctgcagtgttggaaacgagatacccatttgatctaccaagtgagcaagcaaacgagagcagctcttatggagccaactcaagccatgatgaacctattcccgtagcatgtcatttacagagtgcactgttgaggaggcatgagagcttcactgaaggagcaccattccttagtgactttttgcaagatacacagccttcccgattcagaccatacttcatgacggaaaaaatggctaacgaggaaatgacagatccagttcttgaaggagaaactagtgaaaagagcaactctaaggccagctctgctcaagactcggatagtacttcttcagttgctgaccaagaaagccagaaggatgttctagaggattgctcaaaccaaggacaacaatcttctttcagtcaaacagaggaacatgcacatatagctcggcatgcaagggaggtttctctttcccttgacatggaaccacctgtcttaattagtgattcctctgatgatgacatatcactgtctggtgaacatataaatgattgggaggaagcacaacagagtgaaaattttagtttgtcccagaatacatggcaagaggatcctaatgtcatgcaacaccatcaagaaatagatatcacaagcaatggattgaatcaaatgtcaccacattcgaatgatcttgagttgacgtcgtcatcaactgaaactactgatgatccttttgaagtgaatgacattgaaccaccagctaaggaagtggtggtcgttgatgatacccacgttgtggatcctgtatatgattcaagtccttcgggaagcgagaggcctgcacctactggtttagtaattgacggacctgtcctaaaagatggtcatgcttgtactcttgttgttgaagcaaccatcgaagaagggggttcatcatcaagaatggaggtttcttccagtgaggtagctggacctagtttgagttctgtggagcaaagcgaatccccagagaaagaagcctctgagataagagagcagtccatggttggccatgtcgaagcacatggaggttctgtcagccatgctgatccttcagtatctgatataagttctcagccgagtactgaaagttcaacaaatggtgattctggcagtggtgtaacaccatccttcacaaacgcagttctttagtttcttcataaaaaaaatgacagcggcaccgatcgagcatcatcaggttggtcgtcttcagcagtacttcgagctaggcgacttttgtgtggggcgagttcattgctgaggaaaccactgggagggtatatgtttgttgcaggaaatttcttagtgcttcaaagggactaggcaacattagcattattagcactgcactgtaaaaatggctagatatggttgttgcttaatttggccagcactctcgtttgtgaataccttgtggatccgacagtcaattttgtgccgtaaattaattgttaatttgctgcttcgagtaccttagtctatggattgc

SEQ ID NO: 25350 - DNA, 2968 bp, Zea Mays
cccacaccagaaggagccaaccccccctcaggccccaacccttttcccacttcccgccggagcgctctcctcttcgccgctccatcaccgcctcccaatcccatgggcgacccgcaccccctctcctccgcccacctcaccgctgctgcctcctcggctcgagaacaccgtggccccaccaacgagcgcctcgccgcgtccgatccttccacgtccttcgctaagcgtcctagggttgcggcggagccgtccgattccggcggctgcgttccatgcgtcgaggcggacgtacgagctcttgtgtcggtgtccggaggaatttacccgctggcgcgggcaggagcgctccgtggactcaccgcggtccttgagaaggtcgacaccagcagctgtgtcagcgcagcgatcacggactgttgctacaaatgcgcggtggagctcatgagggacgacgacaatggcgtcaggttagccgttgtgcgattggtggacgcgtgtgctcgaaatatttcagcgagattggattttgatgccaatggctatggtgacctgatggacatgattttcctacagctaagctccatggctagggacatgtgcacgcaggtgagaatggaagcattcgctgcacttggtaaaatgcaacgagtttctgagggtgttctgctacaatcgctagaaaagaaggtcatgaaaactgacaggatgggtgtttctatcatcaacggccaaaaattacctcctaaactaaaaattccctgtgctgctgggattttttcccatggagttgaagatgaattttacgaggtgagaagaactgcctgcaaatcattaggagcgctggcaaagttttctactcagtacacagagaaggccttggacttgttgatggacatgatgaatgatgatacagaagcagttaggctgcaggctctggaagcactatttagtatggcaacatatggatgtttgagtgtgcaggagaagcacatgcatatgtttcttgggttgctggttgatgccaatgtcttaattcgagatgcagcacgcaagatctttgggttagtcaacatgccaaaacttcaaatattcaaatctgcagttgatggtcttgttacaagtttggagaagtatccagaggaagaggatatatatggtattatgttttccattggtaagaaccatgggagcttttcagctaacatagctaaacatttggccaaagagattactatggcatctgacggagagcttatcttggacaaaccaagggtcaaagcattgttaatagtgtctatttcagcacctttttctgatgataagcacaagcagctgggtataccttcgattatcttctcgtatgcaattcccctactggagaagatctcatgcgcactaggagaggttgatcaggattcactcttatcttacttgtatcataaaggtggaatgccattttgggaaaacaggtcagtatctgcagagtttggagaatctgaaagctgcaatgttgaaacagtgaaaattggtgcccatatagaaaacactgcaaaggaagccaaatgtctagatgaagttctggtaatgaaatccatactagaaatagttgaaggagtctggactatgagaatgtcgtgcaatgtttgtgaagttcgaactattttcagaacatgcaaagaagagctgagattattggcagaaaattcttctggatcaattggtgcattattgagctttctgagtgagtatcttgatgcaatattattcattgttgaaatatggcagttgattcagttggacaagccttatacttgtggcctaacgtcacttgatattttactggagaggttggatatgtctgtaaggaggatgaaatattgttatattggattaaatagagtattggaggtccaagttttggagctttctttgatagctcatttatgtagactctcaaagattgcagtgtgttccaaggtagttctgggtaaggtgctctgggtaattaatcgcttagaggatctgtgtgctgatgggtcctgtgaactgtctgacttcagtggagaaattaagaaggcctgtgataccaaccgtattggagataatctgattggcaacatcaacaatttgtttcaactcttccatctgaaaccaacaacagactttggaatgcttaaagtgataagtgcaatgttgcgggtctgtgataacgattctgaaaatccattacaatacatttgtggattaccggtgggtgtcagctttaaaatatctctgtggaacatatctggtcaccatcgactgtggctccgcatgaccattggtgaatctgtgcaacataccttcctagaattttctcgttttgaaggcaatgatgagggatcagcacccaccagggtggacatggaggaccgagtgattgtgtggttcaactctctgatgaactgaatgtttattttgttagtgctagccaatggtgatgattaaaataagcgaccatatgctttccatgctcatcgtcttaaaggcttttgcttgagtggacattcttgatccaggtctcttctggggaaaagggttcagttgtgctgaaatttttgtagttatggcaaaagcaatgcagatgagctgcatgctccatgaccgtatgcatagtgtggagtgcaagtgggttttaacctggtcgaagcactttgagttcgttaggagctacaacttcagacggaaagtgaaggcgtgaagctcaccaagtgacgatggagaaagtgcagcgtgggggtgaagctgacgatggagaaggtgcggcggaccacgctgcgcgggtttttttttgtcaccaatttgtgtggccttggccggcggtgagtgagaaacagccgggtcagaaattcgcaatcctgcagtacggttcatattatattaataatacttccgttttcgaaaatttatcttgtagttcatttcttca

SEQ ID NO: 25351 - DNA, 3628 bp, Zea Mays
catggccatgtctccgtgtacatatctccgttccggtgcacatcccgccaccgccggacccgtataccatcgctgaatcttagcctcccacacgagagttaaacacgcagacagctcctcgtcgatcccctgtcagttaaccatacccacgagctaagcccacactaagctagccttattagccctgcaatcgctgcatcctctgctgctcatatctattcgcaaaaccagcagctattcttctccctacaactcttcctcgctcgctcaattggccgctcttcttctccatgctgccgcttgtggtgcgcgcgatatcgtccctcgttgacgtcgaactaggagggctgatcaagagctagggagggagggaggaaggtcttctgaatctcaagacatccatgtgatccatttcttcagagatcttccagcaccatctcctggcaatgggtggagggcaaatgcttgcctgccttcctctaggtctgatcacgctcctctcgctctcgctgagctccagctgccaaatcgacccccaaacacatgccctcctccagttcaaggacggtctgaacgaccccctgaaccacctcgcgtcatggacgaacgccacctccgggtgccgcttcttcggcgtccggtgcgacgacgacggctccggcacggtcaccgagatctcgctgtccaacatgaacctcaccggcgggatctcgccctccgtcggggccctgcacggcctggcgcgcctgcagctcgactccaactcgctgtcggggcccgtgccgcctgagctggccaaatgcacgcagctccgcttcctgaacctgtcctacaacagcctcgccggggagctgccggacctgtccgcgctgacggcgctccaggccctcgacgtcgagaacaatgccttcaccggccgcttcccggagtgggtcagcaacctgtccggcctgaccacgctcagcgtcggcatgaacagctacggcccaggggagacgccgcggggcatcggcaatctcaggaacctgacgtacctgttcctcgcgggcagcagcttgacgggggtcataccggactccatcttcgggctcaccgagctggagacgctggacatgtccatgaacaatctcgtcggcaccatcccaccggccatcggaaacctccggaacctgtggaaggtcgagctgtacaagaacaacctcgcgggcgagctcccgccggagctcggggagctcaccaagctgcgagagatcgacgtgtcccagaaccagatcagcggcggcatcccagcggcgttcgcggcgctcacggggttcacggtgatccagctctaccacaacaacctgtcggggccgatcccggaggagtggggagacctgcggtacctgacgagcttctccatctacgagaaccggttctccggcgggttcccgcgcaacttcggccggttctcaccgctcaacagcgtcgacatctccgagaacgccttcgacgggcctttcccgaggtacctgtgccacggcaacaacctccagttccttctcgctctccagaacggcttctccggtgagttcccggaggagtacgcggcgtgcaacagcctgcaacgcttccggatcaacaagaaccggttcaccggcgacctaccggaaggcctgtgggggctcccagcggcgacgatcatcgacgtgtccgacaacgggttcaccggagccatgtcgccgctgatcgggcaggcgcagagcctcaaccagctgtggctgcagaacaaccacctcagcggggcaataccgccggaaatcggccggcttgggcaggtgcagaagctctacctatccaacaacaccttctctggctccataccgtcggagatcggcagcctgtcgcagctgacggcgctgcacctggaggacaacgcgttcagcggcgccttgccggacgacatcggcggctgcttgaggctcgtcgagatcgacgtctcccagaacgcactgtccgggccgattccggcctcgctgtcgctgctgtcgtcgctcaactcgctgaacctttcctgcaacgagctcagcgggccgatcccgacgagcctccaggcgctcaagctcagctccatcgacttctcctcgaaccagctcaccgggaacgtgccgccggggcttctggtgctcagcggcggcacccaggcgtttgcccggaaccccggcctctgcattgacggcaggtccaacctcggcgtctgcaacgtggacggcggccacaaggacagcctcgccaggaagtcgcagcttgtgctcgtgccggcccttgtctcggcgatgctgctgctcgtggccggcatcctgtttatcagctaccggagcttcaagctcgaggagctcaagaagagagacctggagcacggcgacgggtgcgggcagtggaagctggagtcgttccacccgctggacctggatgctgacgagatctgcgccgtcggggaggagaacctgatcgggtcgggcggcacggggcgcgtgtaccggctggagctcaagggccgtggcggcggcagcggcggcgtggtggccgtgaagcggctgtggaagggcaacgcggcgcgagtgatggccgccgagatggccatcctcggcaaggtccggcaccggaacatcctcaagcttcacgcgtgtctgtcgcgcggcgagctcaactttatcgtgtacgagtacatgccgcgcggcaacctgcaccaggcgctccggcgggaggccaagggcagcgggcgcccggagctggactggcggcggcggagcaagatcgctctcggcgcggccaaggggatcatgtacctccaccacgactgcacgccggccatcatccaccgcgacatcaagtccaccaacatcctgctcgacgaggactacgaggccaagatcgccgacttcggcattgccaaggtcgccgaggattcctccgactccgagttcagctgcttcgccggaacgcatggctacctcgcgcccgagctggcctactcgctcaaagtgacggagaagacggacgtgtacagcttcggcgtggtgctgctggagctggtcaccggccggagcccgatcgacccgcgcttcggcgagggcagggacatcgtgttctggctttccagcaagctcgcctcggagagcctccacgacgtcctggacccgcgggtcgccgtgcttcccagggagagggacgacatgctcaaggtgctcaagatcgccgtgctttgcaccgcaaagctgccggcgggcaggccgaccatgagggacgttgtgaagatgctcaccgacgccggcacggggccctgcagcccgcgcggacagccgccgtcaagggtctgcagcaacaagagctgctgctgaatttttggagcaggctctgcgtctcttgccaccgaaccgacacatatgcctctgtttcttcgttggattcctggtgccacctgcgttatgtggtaggacaattcgtaggatcatgtacttgcaggtattttgtacaatgattaaactgcagtactccatcctcattaatgtaagccataatctggttaaaaaaactttgaaagttatgttatcacctttttgtttctcttataagttataatgatatg

SEQ ID NO: 25352 - DNA, 2951 bp, Zea Mays
cgctgacgtcgtctcgcccgaggccaagccccagcccgcctcctccaccttccgcttgggggcttccacgtttacttacctctccgtccgtcggtccgcccgcgcgcgtgaccgcatcattgcgccatcagcccgccgagccgaaccgccccgtcgccgcgccggacgaccaagaccaaaggccaccgaacgccataatggcgggcaagtacgagtaggaaggaaggggttatacactccctgcctgctccacttcactccagagtccagacctctgagcgcacgtcgtacttgtaccgttcgttcgcgccagcagcagccagccaccagcgccggcgccaggcacgcgatggggtgcaaggggtccaagctcgacgaccaggaggccgtcgcgctctgccgtgcccgtgccgagctgctcgccgcggccgtccgccaccgttacgcgctcgcggacgcgcacgcggcactcgcggactccatcgactcggtcgccgcgccgctgcaccgcctcctccgcctgcaggccgagtcgccggggctcacactgccctccgcgcgcaagggcggcggcgcgcccgcggaccgtttgccgcggtccttccgcccgtcgtcctccgcgccgcagcctgcccacggccattcctcgcacctccagttcggcgcgtcgcccggatcggagccgccatcgccggcagaatcccctccgcgccgcgtacccgagcagctgcagcacccgcacccgcaccacgccgcgtacgggtacgagtacgactacgcgacgcagcctgcgtacgcgtacccgccgacgccggcgggctcgctgcagttctactacgctcgcagccgcccgccccccgcgtccgtcgccgtcacgcagcgcgttccggggccgccagagcgcgtagtgcgcttcggctcgttcgacgcagcgggcggctacccgcagcagtacgcctacagcgcccagcgggccccgatcccgcctcccgctccggccgcgctgcagcgggcggctccgcctgcgccgccgaaggcgagctcgtgggacttcctcaacgtgttcgagaactacgactcgtacgaatacgacacgtactactacgactccgccacggcagctactgcggccgcggcgccttacacgccgagccggagctcgcgggaggtgcgcgaggaggagggcatcccggacctcgaagatgacgacgacgaagacagcgtggtcgtgaacgaggtggccgggcagtactcagcacctgggagcggcggagcccgcagccggcgcagctcgctcggcggtgtcagtgccaccgccgagctcgaccaggcggagaatattatcgacgtcatcgcttcctcaaagatgatgtcggctatctccgtggctcatttggggtgcaaagacatggacgccgtggacgtcggagtggtagcgatggtggactcgcagagcctatcctcggcacttgagaaactctatttctgggagaggaagctgtatgctgaggtcaaggccgaggagaaaatgcgcctacttatttccaagaactccaagcgactgaaattattagatcaaaagggtgcagagcctcaaaagattgatgcaactcgaaatttgctgagaaagctttcaacaaagataaggatagctgtgcgcgttattgccaagatttcaagaaaaataaacaaattaagggatgaggaattgtggccgcaagttaacgctttgatccaagggtttgtattaatgtggcaagataaattggactcttaccatagacagtgtcaagtgatatcagaagccaaaaactgtacctcggttctgtcaggtgaaaatgggcaggatttggtgttggagcttgaggtagagctgatcaaatggatcatcagtttttcctcttgggtgaattcacaaaggaactttgtaaaggcactgaatggatggctagcactctgtcttaactacgagcctgaggataatactgctggagttccatcttattcaccgggaagcatgggtgctccattggtttttgttacctgcaacaaatggtcccaagccatggatcagatttctgagaaggatgtggttaacgccatgcaagctcttgtgtctagcgtgcggcacctgtgggaacaggagcatcttgagcaaagcgaacaaataatctcaatccgagaaagggaaaaatggatcaaatttttggagaggaagacccaggatattagtaaggaggctgatgaactaaacaagaagctggcattaataccaagtcggcatagactgcatgtgcctcggatcgtacaattgtacgaggcgcattgtgttgaggcaagtagcttgcacataaatctgaggctggttcttgaagccttagagaactttgctgccaattcgctgcaagctttcctgggtgtgtcaaaaagtgctgaagggacaaggctgcctagggataatgtgaggagagagcgccgtagttcgaatagaggttcaaactacaaaaccagctcctaagatgcagagctggtagcatgagtcgctcaggtgtggtggcttgctgtgcagatgaaaaggccacggtcttgtgccacaggcaaaacaacttgaatggggggtttgagccgttgaaaatctggcattcatgaagttttggtttaatggtacaatttatttcgggggggaggggggtttaaaaaactatcaaggctggttggtgaccagagaaatagagcagatccataagatgaaaccctaatagtaaggggtttcatccctatggtctatggatgcccttcatttttctggtcactaaaccagtgcttagacagaacattttgcccagtggcagtgttgaggtgcctaacgtgcgttgtttgccttggttcatggacgtgtatatataatgcacccctttgttgaataaccacaaggttataccgttgcgaag

SEQ ID NO: 25353 - DNA, 3958 bp, Zea Mays
ccagcaccaaccaagagaaaagtagcaactcacacacagtaggagaggagaggaaagaacccagcgatagatcagagtcggagagaaaattttgcctcctcccatcggaatctagctaattattttccagtccttctcccccatgtaagtctccctctcccatccccgtcgcctgcacctaccggaagcgaagccttctacagttcaggtccatatccgggtcgccgccgtcggctagctctaggcggacatggtggccgcttgccggagcacggcctccacctacgcgtttctgctgctcttgctgtttgccgctgcggtcgccgtctcttcttcctccgggttgcgccgtgtccaggaccaggacagatcggcgctgctccagatcaagaacgccttccctgccgtagacctgctccagcagtggtccccggactctagcggccgcaaccactgctcctggctgggggtaacatgcgactcaagctcccgggtcgtcgctctggaggtgctctccccttcacggcgtttcggacccagccaggagcttgccggcgagcttcctgcggcggttgggctcctcaccgagttgaaagtggtctcttttccgctccacggcctccggggcaagatccccggtgagatctggcggttggaggatctcgaggtggtcaacctcgctgggaactctctccggggcgcccttcctgcctccttcccgccgcggctgagggtgctctcgctcgcttccaacctgcttcacggtgagatcccgtcttccctttccacctgcaaagacttggagaggttggatctttcaggcaaccggttcactggatcggtgccgagagcacttggcagcctgcctaatctgaagtggcttgacttgtctggaaaccttcttgtcggtggcatcccctctggtctggggaattgcaggctgctccgctcgctgcggttgttctccaattcattacacggttcaattccagcagggattggaaagctgaggaaactacaggtgttggacgtatcaagaaacagattaagtggcctggtgccaccggagctcggaaattgctcagatttgtcagtgctcgtattgtctagccagtccaattcagtaaagtcacatgagttcaatctgtttaaaggaggaattccagagagtgtgacagctttgccaagactccgggtgctatgggtgccaagggcgggcctggaaggaactctcccgagcaactggggaaggtgttctaatttagaaatggttaatctggggggaaattttctttctggagcaatcccaagggatctaggacagtgcagtaacctcaagtttctcaacctcagctcaaatagattatctggtttactggataaggatctatgtccgcattgtatgactgtattcgatgtcagcggaaatgaactttcaggatcaattccagcatgtgtgaataaagtctgtacttctcagctaatgctggatgaaatgtcatccagttattcttcattcctcatgtccaaaactctacaagaactgccatcagttttttgcaactccggggagtgttctgttgtgtatcataattttgcaaagaacaaccttgaaggtcaccttacatccatgccatttagtgctgacaggtttggaaacaagacgtcgtatgtgtttgtcgttgatcacaataatttcagtggatcgttggattcaattctgttggaacagtgtagcaacttgaaggggttggttgtaagcttccgagacaacaagatatctggtcagataacagcagagtttagcagaaaatgcagtgctatcagagctttggatttagctggcaatcaaatatcaggaatgatgcctgataacgttggtttgttaggagcccttgtcaagatggacatgagcagaaattttttggagggtcaaatacctgccagtttcaaagatttcaagagcttgaagtttctctcattagctgggaacaacattagtggcagaataccatcctgtttgggtcagttgagatcactgagggttttagatctctcatctaattctcttgctggtgagatcccaaataaccttgtgacactaggagacataactgtgcttctactcaacaataataggctctctggaaacattccaaattttgcctcttcaccatcgctgtccatattcaatgtttcattcaatgatttgtctgggccactgccttcaaaaattcactcactgacatgcaacagtattcgtggaaatccatcccttcaaccttgtggactgtcaacgctctccagtcctttagtgaatgctcgagcactaagtgaggcagacaataatccaccagctgataatacagcccctgatgacaatggtaacggtggcggattcagcaaaatagagattgcctccataacttcagcatcagcaattgttgcagttctcttggctctggtcatcctttatatttacacacgaaaatgtgcatcaagaccatcaaggcgttctctaagaagggaagtaactatttttgttgatatcggtgctcccttgacatatgaggctgttttacgtgccagtggaagcttcaatgcaagtaattgcatcggaagtggtggcttcggagcaacgtacaaagctgaggtagcaccaggaaaattggtggcaataaagagacttgctattggaaggttccaaggcattcagcaattccaagcagagggatgtcaaaccaagtaacatcttgcttgataatgattacactgcctacctttctgattttggattagcaaggctgcttggaaattcagaaacacatgcaaccactggtgtggcaggtacttttggatatgtagctccagagtatgcgatgacatgccgcgtttctgataaggcggatgtgtatagttatggagttgtacttcttgaactcatttcagacaaaaaggcactggatccttctttctctccttacgggaatggattcaacatagttgcctgggcttgcatgcttttacaaaagggtcgagctcgtgaattctttatagaagggctgtgggatgtggccccacatgacgaccttgttgagattctacacctgggcatcaagtgtacggttgattctctttcttctaggcccacaatgaagcaagttgttcggcgacttaaggaactcagaccaccgtcttactaggaatagcaagcagagactggtttgcttctgcataatgagaccaagactgcaacagccagtaatgttccaaataaactggtggcaactggcaagcaattcaaatgtcatttctcaagggatcctcaagcaggacattcatggtatttaatcctgtggtcgtcatggccactgtatggaacgccgatatcgcttcaatgccactgcaagcaagcatcaaggatgcctgaggaagttcttctatgcctgccaaatctgatgactggattaggcattaccgacccagttaacaggatgcattatataccttgctgtgcaattattacggcgtaacctgcgtcgctgctctcctgatcggagatcgaccaccttgactcattggaacatagccatatatctggcagctagcatatatctgatcaaagcaaagccatatatctggcagttctggggtgatccgtccgtggaaaaggcttggccactgacctgcgcgaggacaaagcagtagaaacatatcagccaatcaaagcaaagccatatgaattcatgttaaacatgtccatacatatagcagtgaaaagtatcaaatcactgatttcctctcttggcctttgtaactgtacatactgctttcgtggcctttgtaattgttcatacttcttccgggcattcattatgcaggcatgctgttgccgtgtcattctgttcatgctgataacagccgaaaataatttaattgctcgatttgcaagctgaag

SEQ ID NO: 25354 - DNA, 2015 bp, Zea Mays
tccacaattgcccgtattgtttaacactatcccgcacggtgcgagaacatccaaaaatggacgccaccgtcgtcgccatcgccgacgaccatgatgactccgactgccgccgccccctgctcgcccagaacgaagagatccacctctacacagagccccctaaccgtcaacatcctccactggatgctgcggcgacgcagctcgaggagcagcggaagccggagagagtggcctctctggacgtgttccgcggcttcaccgttgccatgatgatactcgtggacgacgccggcggggcgtggccgggcatcaaccacgcgccgtggttcggggttacggtggcggacttcgtcatgcctgccttcctcttcatcatcggcgtctccgccgcactcgtattcaagaaaatggcaaacaagacagctgcaactaagaaggctgcaattcgggcttcaaaacttttcatattgggtgtgattttgcaagggggatacattcatggacgacacaaattaacttatggtgttgatttggatcatattcgatggctaggtgtgttgcagaggatagctattggatactttgtagcagcaatgtcagagatttggcttgtcaacaataatttggtggattcacctgtaccatttgtgaagaaatacttcatagagtgatccaatgtggagtcagaggtagtcttggaccaccttgcaatgcagttggcttggtagatcgagttttgcttggtgaaaatcacctatataagaacccagtctacaaaaggacaaaggaatgcagtattaattctcctgattatggaccacttcctccgaatgcaccagattggtgtctggctccatttgatcctgagggtttattaagtacgctgatggctgtggttacttgttttgttggtttgttctttggacatgttttaattcattgcaagaatcattcacagcgaatgctaatatggctgctagcttctgtggtgctgacaatctctgcgtatttagtgctattattaggcatgccttttagcaagcctttgtatacagtgaactacatgctactcactggaggagtatctgggttcttgttgctgctgttgtactacatagttgatgttattcatattaagaagcccttcgtactattccaatggatgggcatgaacgcacttatagtctatgttctcgctgcttgtgagctattccccacccttattcaagggttttattggcggtcacctgagaacaacctggtggatgttactgaatccctgctccaggccatcttccagtcgaaacgatggggcaccttggtgttcgtcctcctagagatagtcttttggtgcttggccgccggcttcctgcacatgaaaggcgtttacttgaaactgtagaaccaaatcgtggacagttctctgatggaacggaattgacgtcctgcaaacattggtggaaggcccggtatccctgttttttctgtaaatgcaacgcgattctggaaccatgggtgtagcggttgattacaggacgttgtggtcccaaggtcctccaactcatccgcctccatgcacaccaggaaaacatcttgctgaaagtcacaagcgtttcaccacgtgaagacccagtctgatggtctttcagttgtttggtaaaactgtttctgttttcctgcagaaatcatttctagtttctagtgattttggaaaccaggatgtttctgtttatcacttgtaatcttgggtaaatctcaaaaacgtagtgtattttgctaatgattccacgatgaagtgagtgagtggacatgtacacagtagacagtatgaaagtatgtatgaaccgtcgatcaccgtataatccatctactccaactcattgcagtgaaatgctgtgttgtacctccaagttctggcctctcaggcatgtacatatcaatggaaaatgctgtaccgtttaatttcatggcatgagtatggccattgaattgaaatgccagaactcttaacaaca

SEQ ID NO: 25355 - DNA, 3630 bp, Zea Mays
actggctcgagggaaggcacacaggacacagccgccgccgtttcttcttctcccatcatctccctcgcagcgccggcgctccatcttccgctccctccctttactcgcgctcggtaagcaggcgacggcggcggtgctcaggtttgggctctcagcgacggtgtcagcggcttcccttcccgcctctcgctggtcgcctcgcgccctcgcctccggtcctccgcgcaccggccggtgaccctacttgattccaagcatggaaactctaccaaatggctcagtaaataatgctgagcttaaccaggaaaatgagaagtccatgtatgctagtgagtctgaagaagcacgggatatttttgtttacagagaagatgttgtgagcttgaagtccaaggaggatgtccgtggtgtagtattggaggtagctggggaatatgattatgatggtagcatcactgatgatgacattgatactgaggaacatgaagataaaactgcttatggagctgaaaatggtgttgccgatggtggcttgcagtgcagtttggggcccggggagcccggtgcctccacatttgttcttgtggcttacgattatatcgaaagcggaggagcttttggggatccatacaaactctacggtgtctcacagagtcagaaactattaccaaacaaaacagaagatgatagcatgtcgatacaactagaaacgaagggagatcagcaatctgttcctctagaggagcagaacccagaggaccttactcttttgtctcgtttctcatatacaaactggcaattaactgactggtgtctttctcagcgatacacttcatgtactaacgataccatgattgattctgataagcatacatggcagatatgtacatgctcagaaaactcagttccactgtctggtattccagaatctcaagctgatgctcagattgatacagatacaggtcacaggcagacagatgttgattctactgcagatgtattgagtatgtcggatggagataattcatgcatagccaaagaatcagaaacaggaactagtgcatcaagcatctcaaatgagggtccacaggacaatgcaacatctagaaaaaagtttaggaaagtattttttaaaaaagacaaaagaacaaaaaaaagagatgacaactttgagcgagctctactcattgcgaatacttgtaccaaagtcgatgtaatctggcaggatgggacaaaggaatgtggagtagccgcaacagcattgatccctatccacagtccaaatgaacatgaattcttcccggagcagtatgttgtggataaagtcacaaatgatgttggtgttgatgattcttctgaaccaaggcgtgtgggtcttgttagaggtgttaatgctaaggaccgaacagcaactgtgtcatggtttaagcctcctctacatccagaggagccaaaggagatcgcatgtaacgaaattgtgagtgtatatgaactggatgtccatccagattatgattattgctatggagatattgttgtccgcttgccgcctgttaaaccggtaattgagtcaaccaatagcaaggaacaaatggaactggataagacgttagattcctcggaaggatttgctgcttcatattctgcaccccctgatactagtgcagacgaacagctttcacagaaggaatcctgcttgcagtttacaagcctctcttgggctggaaatatagttggctttcaagacggtgagattgaagtcatttggggtgatggatcgatttctaaggttggtcctcatgaaatatatgttgttggtcgtgaagatgatggtgcctcactagatgatggaacagcctctgatggttctagctgggagactgttgatgacaacgaaatggatgtacttcatgattctgcaaagcattggaagggaaaatggttcattcagctcccaggatggaagttctgttgcaactggtcccctttcagttgcttttgagtttgtgacccgactggcgagtgatctctttgctcgaggtagaaggcatttagatggatcatcagatgctatggatgaagttgagtctcactggtctaatgagatttcagaaattggtgatgacattgataagtgtaataagaatcatgtggaatcaccagagcatgctgcagtcatagaaaatgattcttctgtcgagaagtctgtagatgtggttatggctgataatcctgtacattctgaatgtttcaaacactttgatgttctgcaatgtcctctagaccaccactaccttgaaaacacaacccagggtacaggtggaaaaaagtgggtcaaaaaggtacaacaggaatggagcatacttgagaagaacctaccagactatatttatgtcagggtatttgaggatcgcatggatctcttgagagccgtgattgttggagcaagtggaacaccctaccaagatggccttttcttctttgatttccaccttccacttgagtatccgctagtccctccgtcagcatactatcattctggtggtttgcgtgtaaatccaaacctgtatgtggacgggaaggtttgcttgagtctcttaaatacctggactggcagagggaacgaagtttgggatccatcatcatcaagtattctccaagtactagtttcacttcagggattggttctcaatgaaaaaccctattttaatgaggctgggtatgagaagcaagttggtactgttgaaggggagaagaatgcagtgccgtataatgagaatacgtacctgctgagcgtgaaatccatgctgtatatattgagacggcctcctttgcattttgaggattttgtgaagagccacttccgcaagcgtggtcactacatccttaaagcttgccacgcctatttgcaaggaaatgttgttggcactctcaccgacgacgcgtgcaccaccgacagaagcaaagagcactcgagctctgttggcttcaagcttgtactagcaaagattttaccacggttgattacagccctgaaggacactggagctgactgcgaccaatacgagcacctcgggagaacagaaaccgttacagaaagctgatcattgagtgatttgtacttgattcttttgctttttctctgttttttggggtttcagaaagatggtgacttcaccaccaggctgttttcctataaatgtacattcaaagtttgttgtttcagtcaaacatttggaaaatttggcccaaatgatttagggggggggggggggggggtttgaagtcactagagataatagttagttagctaaaaattgttagtgttattagctagctaactattaccaaatttgctaaaagtatctaatatctaaactattagttagactgtttggatgtcttggctaattttagcagctaactaatagttttagtgcatttaaacacctcttattcgttacatggaactgaactacactgtacagctgatgtttggttaaacttgtaccagcgaagagttggcaatactggaaccaggcctagagattcctggaacagagatttgatgtccatgtatttacgggtggtattggtttcacgaatatacactcgcgggggataaaaaac

SEQ ID NO: 25356 - DNA, 623 bp, Zea Mays
gtccctgaggatgaaggctgaaggtgcttccacagagcaggcattatcatcagctctaacaagtattatggatgcgctgaagagtactgactggaatacaaggaaggatgcctcactagctctttcaagtattgtggtcagttctgggtatttgattacctctttcagaacttcctgccttcgctcacttgagtgtagtaaatttgacaaggtaaaactggtacgtgacaccattatacatgcagttcagctgtggaaagctattccagggtctcatactcctgaaccatcagaagctggaccatcaacataagattgcaagcattgtagcttctggtattcaacctctccataacctcacagtgttgaggttcattgaccagaaggttggtgcatgggagagtgtgttgtggactcaacaacaaatcgagagaggtttcacagctattgagaacctgatacaactaaaaggatgcgccgggaagtatgcaacaggagatgaagtccaattggcctgacttctcaaattgttctgatactggagaagtttaagagtgtccttgacagagatggcacactcaacaatatgctaagctcgatctgccaggagactcgtgatcaca

SEQ ID NO: 25357 - DNA, 1354 bp, Zea Mays
gtttcctgagcatcttctaggacactataaaatagcccaagaccttgtgatttgctcaagccatattgatggcctgatagctttcgtaggtgctagctactaccatataccatatactctcacacaaagattagtacagctagcatggctaatgactccttgacgaggggccacataatcggggatgtcttagacccgtttactagctcagtgtctctaagtgtcctgtatgatggcagaccagtgtttgatgggatggagtttcgggcgtcggcggtgtcggtgaaacctagagttgagattggaggtgatgattttcgagtggcctataccctagtaagccatcacgtactccgcagatcgagtccatttggcgcgcggtaggccatatctatggccaagatgtctcgactactctccaaactctcatgtccaagtgacatccatggcttttggctcactgtgtgtgacggctaaatcagtctcctcgatcgtgcccatagctcggttgactacaaagattggctcatgctaataaatatatagtagtattatacactgagagagacactaacacccccccccccaaaaaaaaagtgcagggatttctgatcagcccagccccgaaaaaatgctcaggtttacttttaattccctaacatgttgaccatgtgtttgtgttaatgtaaatatattaggttatggtggatcctgatgcgcctaatcccagcaaccctagcctgcgggaatacttgcattggatggttactgacatcccagcatcaacagatgatagcttcggccgagagctcataccatatgagagcccaagccccaccatgggcatccaccgtcttgtgttggtgctctaccagcaattggggcggggcacggtgtttgcgccgcaagttcgtcagaacttcaacttgcgtaatttcgcacgccgtttcaacctcggcaagcctgtggccgcgacgtacttcaactgtcagcggcaaacaggcacaggtgggagaaggttcacttgtgtttttgatcatgtcgttcaaggtgaaggccggcaagcttgaacctactactactagtaacgttcgcgtgtgcttatatggccgtatcggcgtacactacgtagcatgaaagctagctagaaataaataaagatgtatttctttcgcacatgtagctaggcttttataaaggcgtacctccaagggtattatgtccggcttttaattaataatcgcgtgataagggtggttagtataccgagtttgtactgctgtgatatttctgtcacaccttggcaataattgatatatatatatatatatatatatatatatatggatctctg

SEQ ID NO: 25358 - DNA, 257 bp, Zea Mays
acttaatcggattcaattctaacattacacaacaataaactatgtataagcattttattctcctaaaacctacccctcgacattcaaacttggaataagtatagaaattgtttaattactctttaaactaattctctaggttaacttgtttagcacaataatttacatggcgtcacatcattcgctttagcaagtagaacctcatcagacatcaaagactaccaccaaaccataatctttaaatctaaagacctaaa

SEQ ID NO: 25359 - DNA, 1643 bp, Zea Mays
ctgtggagcaacacgctcccagtttatattggcccaaaacaaacttgcggcccagttacaaatttccagcccacgtcatatatattgtgcccccgttcacccgttcacccgttgtttatcttgcgtccggcgtcctctctctctcgtggcgacgactgggcgacctccccgcccccgccgctctacgccaggtgcccagatcttcgtcgggcccttcgccgaagagcagccaacaggttgccggtctgcgggttgaatcatggcggagcacttggcttcgatcttcggcactgagaaggacagggtcaactgccctttttacttcaagattggggcctgtcgtcatggggatcgctgctctcgtctgcacaacaggccaactatatcaccaactcttgtgcttgctaacatgtatcagcgccctgatatgataacccctggagttgatgctcaaggccaacctattgaccctgagaagatgcaggagcattttgaggacttctatgaggacatctatgaggagttggggaagtttggtgagattgagaatctgaatgtttgtgataaccttgctgaccacatgattgggaatgtctatgtccagttcagggaggaagagcaagcagccgcagcatacaatgctcttcaggggcgcttttactctggccgccctataattgttgagtattctcctgtgaccgacttccgtgaagcaacctgtaggcagtttgaggagaacagctgcaaccgtggtggctactgtaatttcatgcatgtgaagcaaattggcagggatctcaggaggaagctgtatgggcgttctgcttccaggaggtaccatgggagaagccgaagccgaagcccgccaccacaaaggaggggccaccgtgaccgtgatgactaccaccaccgtgaccgtgatgactaccgtggtggcggcggtggtggaaggggaagaggtagcaggtatgacaggtacgatgacggagcaggcagaggtggcaggcatggcaggtatgatgatggagcaggcagaggcggcagacatgacaggtatgatgatggaggaaggcgcaggcatggtagcccctcaaggcgtgcaaggagcccagtcagggaaagcagcgaggagcgaagggccaagattgagcagtggaaccgtgaacgggagggaaaacagtgagctctccgtggctactgtttgccggacttgttgcttagctccggctctcatcgctatattctaagtatgcttgtgtggattgcattctgcatggctaagtaaaaccttttaagatcaggattcctcggttcattttatggttaaaccagacatcatttgtttccatctgtgttgtgtcggatcctttgctattatgttattttgacaattggtgtcaaatcttttgtggtgtgctattagcttatgatgatgtcagttgtggtttgtcactagatttgccatctggctttcagtcgtgtgttatgctgttccatggcggatttcttgttttccctcttctcatttttgctcaatgctcctagacagtgcttgggctgccgtcattgtactatgtgcagtagcacggagcaggttctattcagtttgagctgtcttttgtcttgggttcatggcaatctgt

SEQ ID NO: 25360 - DNA, 2008 bp, Zea Mays
aagcaagccgagatcgttgggccgcccagggcaagagaagcgtcggggttttggctcctgttcaaaatccgcagctcgccgttggacaagtgaggaaaggagagagaaagagaaagagagagagagagacggtcagccatggcggcgaaggcaagggtctcgctgacggctgtgctcgccgccgcggcgtgggcgtgcttatctgtcgtggccgcctccgcattcgacgtcccgaccgtggccttcgaggaggggttctcgccgctgttcggcgacggcaacctcgtccgctcctccgacgacaggagcgtccgcctcctgctcgaccgccggtccggttccgggttcatttcttcggactactacctccatggcttcttcagcgcgtccatcaagctgcccaaggactacacggccggcgtcgtcgtcgccttctacgtgagtgttcgttctctatcgacgctgaaatattttgattccaactcggaacactcctgtccaaaggcaagggaccctttttgtttaccatatttagcgtattcccgccgccgctctttcgaaccgttggttcgtgcttggtcacatggcgtgtcaacacggattcagcatttcagcaaccgccggcgagtcatagcaagagcagtagagggtgctcctgcgcccatgccctgcgccgcagagcaggctacagcgcgtcccacatgggctgcttggactttggagcccagaaaggctgcgccgcctggccccgggaataaatgttccctcttcaggcattcaccccccttgatgattgattattagacgcaccaaaacatagttaatgctactgaattgatagcacccccgtgtttggttaaatttctagtgctactattcacgcgcctctacgccagtgatcgcagtgaatgaatgaatgaatgaatgatgttccagtggtacatggaatatcatccaactgctctgtggttgttcgaggttgcaagcttcagagattccaactaacacatgatgaagttttgaattgccgtgacttttccttacgactctactcaatagagttccccttttcatgctgcagctgtctaacggggacgtgtacgagaagacgcacgacgagctggatttcgagttcctgggaagccggtggggcgggcagtggcgcgtgcagaccaacgtctacggcaatggcagcactagccgcggccgggaggagcgctacctcctccccttcgaccccaccgtcgaggcccacagctactccatcctctgggctcccacccacatcatcttctacgtcgacgacacgccgatccgggaggtgatccggcacccggacatgggcggcgacttcccggcgaagccgatggcggtgtacgccaccatctgggacggctccgcgtgggccacggacgggggcaagtacaaggtcaactacaagtacgcgccgttcgcgtccgacttctcggagctggccgtcgtcggctcccgcgccgacccggtgctccgcgtcccgcgccgggacggcgccgcccaccaggacctcctcgcgctcatgacggccgactacgccgtcgtgacgccgcggaagcgcgcggccatgcgcgcgttcagggcgcggcagatgacgtacacggtgtgctacgacgccgtgcggtacgcggacgggctggcgtgtcaagcagctgacatccttcaaaataatataaatgccagggtctgtcgcgaaagctattggcacaatggttagggatgatggtcgattggtccggtaacgtagtaggtcgattcgttttttatttttatattttttggcgacccatatgcaggctgtaaagctaggtgtagggacggagtactagcagggattaatgcgttatgattctttgattccttgggtggcagctaataaaatgctcattataagtattgtgcaattattgctaatagtattatatgatccaatcattaacataatcagcaaacatgtatgtgagtcatatgaaag

SEQ ID NO: 25361 - DNA, 2033 bp, Zea Mays
tcagaactgcatgacagggagaaaatactcttgttatttggggaaatgaaagcaaaaggtgtcaagccagacaatgtgtttcatacatgcatgattcatgtgcactcaaaggaagaaaatatagttcaagctttaaactgctgggataagatgatagatgacggatgctctccaaatgttatcacatatacagttttaattaatcatctatgtaagtctggatatttgagcagcgcagagatcctctgtaaagaaatgttagctggacacttccttcctaatagctatacttataattgctttcttgattatctggcaaatgaaggagagctcgaaaaggctaaagttctacacgcagccatgcttgaaggctgtttagctaacacagtgacatttaacacattgatcaaagggttctgtatggctgggcagatccaaggggcaattgaccttatgcagaagaatactgagagtggtttctttcctgattgcatcagctattctacaataataaatgagctctgtaaggttggtgacaccaataaagcatttgagctttggaatgaaatgttatacaaaggactgaaacctgatattgtggcatacactattttgattcgctggtgcaacattcatggtgaatttgataagggcttaggaatttacagtgatatggttaaaaatggtgtgcgaccaaactgggacacatatagagctcttttcttaggagcttctttgatgaccacaaatggaagaactttactattgaccacctgatgttagggcaatatctgttctcatctactggaataggctgaatcaagacggatgcaagatgcaaaaatcaatctgaccctgaactgttgcttcatatgcaagtggctataagcctaaaacatacgcatgcatatctgcatattggcttttttctatgcttgagaagatggattccagtctgaggtcaatttaaagtatgaatattatacaatcacaaagggtcaggaagaaaagtgatcgaaaacttcatcaaatttatgctgctgaacttgcaaatatagattttgcatatggtggtggctggtgacagtgttgccagagtacccagaggtttacaacatagtaaacaagctgagggtggagtcagtggttgctgttgaaggtgtgatccagccacgcccggtggatgccatcaatgcagatatgaggaccgggactatagaggttgtggcacatcatgttctagtgctgaactcagtaacccggtcactgccgtttccagttacaatttctgatactgtaaaagagaagtttccagaagaaattagattgagttgaatactgtaggtttagaatgttgggacttgtgtcgtccacaaatgcagtcaaatttgcggttgcgccataatgttgttaaactcatacgccgctacttggaggatgaacatgaatttgttgaggttacatgttccaaggtagattgagactcctgttttgtccaagtctacacctgaaggtgctcgggagtcgggactatcttgtaccatcgagagttcaggaggcattgcctatggattggatcggttggtgatgcttttggcgggtgagagctcgatccgagatgtgattgctttccccaagaccacgactgctcagtgtgcactcaccgaagcaccatcagctgtagaaccacagcaactgaaggatctcgccttccccaaacctacttcgtgagacgctgttcatgtgttcatgacaaaaattccgtgctctcaaggacagctatagtttgcttcttctagtttttgagtgtattggcctattctatttttgcatagtatagaatgcacagtttttggaccgtgaatccgtgataaatttgtagaagatgcttaacatgccaaagttctggaagagtattgttttaatagcggtgcttatgtgtttgtgcttgtgcacaaacttacctggcatattattcaacagaatccattttccaaggctagctagctgagtcgctagctactccttttccg

SEQ ID NO: 25362 - DNA, 1245 bp, Zea Mays
tcgcgcccaacaacatggtttgggatgatggatgttgtgggcttgttgagcatggctggtgagattatgaagcttgagtatcagaggaaggttgctttgttaaatagacaaaagaaacacaatgctgccattgaggttcttgagaaaacgaaagctgcggatggcaaaaatgtgggaggacatgaagatacatcacgcaaatcagctgaaaattgtcctaaatctgaagtctgttgatattcctgattccaatattgaaacaagtgattatcaccacagccacacacggcagctgcgtgatattgtagataagtggatcacaaattttactgacttcatgaactgtcaaaaggaatacataaatgctctctatggctggttgaagttgaaccttatacccatagagagcagcctgaaggagaaagtagcatcgccacctaggatgcagcaacctcctatcaaagcctttctttatgcctggcatgagcacctagccaagctgcctgatgatcttgccaagacagccattgtcacttttcgagcagtcttggataccatattgggtgttcaagatgaggagttgaaacagaaggagatctgtgagcagactcgtagggaatacatacgtaaggcccgggcttttgaggattggtgccacaagcatccacagcccagagcgatcgacgtcgatccagatagcggtgaggggacaggacataaggatgtagtcaccgagaagagattcgcagtggagagcttgaagagcaagcttgacgatgaaattgaatcccataataagctatcaaagcaggtcagggagaagtccctctcgatcctgaaggcacatctcccagagctgttccgtgctctgaccgacttctccgacgcctccttcgaaatgtactcgaagctgaggctgatgtcgttgatgcaggatcagggaaacaactagatggacagtatgttcagaagttaggatcagtaatatccctcccccaagtgttgtaatgcatgtgttctacccctttctgtggtatgtgtaaaaggctagtagctcattggatgaggattcttgtttaatttattggcttgatgaaaccatcgggtactttgtagtgtggacatatgctggatagttagcatgtgatgaactgattacaatctgtgggggtaaaagccgtcgtctatgtaaatgataaattttgttgagatatccagccgtccagttttttgaggcactcgtga

SEQ ID NO: 25363 - DNA, 762 bp, Zea Mays
ataaaaatgtaataaaatagtccaatcgccttgactaccgcttccggttccggatccgaatctcgccctcccctctctttcttgcctccaggtccggccgtccgggcggcgccgggaggagagaatggcctccacggcgtcgccgccggtgttcgagagggtggccgggatccgagccattgccgagtccggccgcttcaaggcatggttgctggaccagtttggcgttcttcatgacgggaagaagccgtaccccggcgccattctggcattggagaagctagcggagaatggggcaaagatggtgataatcagcaattcctctaggcggtcatctgtgacaatgaagaagctcaagagcctggggttcgacacgtcctgtttcctcgcgaccatcaccagtggggagctcacacatcagcaccttcagaagagagacgacccatggtttgctgctcttggaaggaagtgtatccatatcacttgggacgatcgaggggcaatttctctcgagggccttggtttgcaagttgtgaacaatgttgatgatgcagagttcatattagcccacggtactgaagctcttggctcaccttctggtgttcctcttcccaaaagtcttgaggagcttgagcaggttctaatgcttggcatagaaaagcgacttccaatggtggtagctaatccagattatgtcactgtcgaagctcgagatctccgtgtcatgcctgggcagatctagtgacggaggctcacatgagt

SEQ ID NO: 25364 - DNA, 1005 bp, Zea Mays
acgcaaccaaaattgtattgattacgggatgaggttttgcttagatcaattctgtcatcgaacagtggtagtagaaaagtttgggtatgagctgaaaattctgggctggaagtggagacaatttagtaccggttcttataaagaaccagtactaaatactctagaaaaaaacttagtattggtcccttttagaaccaaaattaaagtcatttggttgggaactaaaacttctcgacacgaacagagaaaaaacatttattatcgatcctttgctagaacatgtactaaagaactctcagcttttggcgttagcttgaggtagatgagtatcaatgggtgttttcaacagatattaaggacttgatatcagtaccgattggaaacatcagccgatactaatatcctctacgaggacgcgacgactaaaatcgatactgatgattttatcagtatcattttagtgcaatccatactaatgttctcggatgaaatcattattctccggtagtgtttgctaaatactcttaaattttgaccacagatacaccctattatgtatatgtgctacttaatcggaaggaattgtattccttttgtttaaacatcctagcatgaaaaatataagaataacttattagccttaatctcaagattaggaaaataatgcaaacgcaagcaaataattagtgcactttctcttgactcatgttaaggtagagcttctgaaccattagttgtggcatgcaagagtacccaaagcgaagccacgataccaacacctacatttgaatgatgataaggcatgcatatcacttgtatcataattcataatcatatatggagtagtgcaacttacatctatatcaatgcatggagtaaaaaagacagttgtaccttccttccaagtcccaaaagtactgcatgcctaaattttctaacaaatcttgagattttttttttaatattggcagcgagaatgaaatctattagcaagaaagagttagc

SEQ ID NO: 25365 - DNA, 138 bp, Zea Mays
ctgatggagttgtgatcgaatggtgtggcttttcgctgccctttccttcacccactaaaaagcatagaatgtggagaattttacctttagccattatagaagtttctaatactttatgtgccacgaattttttggttg

SEQ ID NO: 25366 - DNA, 2374 bp, Zea Mays
acccactctctgccaggttgtggtggaaaacactcgtgtgggatctagctggctcttgtgcaattggtatgccacagctgctcttctcaccgtgtgaggacgagcacagtaaaagctaagcatttcttgattcatcctcccagcttcgttaattactatcaatgatgttgctgcatatttctttggcatcttctttgggaaaacaccgctgatcaagctctctccaaagaaaacgtgggaaggctttataggtgcatcaatgacaacattgctttctgcatttgtgctactcctgctgaaaatgtactaaccacaccttccatggtggagtgcagggcctccctgttggggcacgagatcgcccacccgtcgtctacaccagattatttctatcataccatcagatagtggatggacaaccaagcgtgcaccgtttcatcatttctgattctttcttagatgactaagataagtgtgaggtctgtactcatattctttccttttcttttcaatgcaggtatgatcttatacgagtggagattggcaacaaagatataaagcttgaatacttagtggaggcatttacaacttcaaatgacgtagcctcctcgacaccttctgcttctgctaactccggtgcaagatccttgctatacttgacaaactaaaggaggaaagggagcaacaagaaggaaaatatggggaggaagatgtggatggttcatgtatatcagaagaagaagatggtgactgggatgtagatgagccagatgaggaggacatcatttacgtaaaatagcccattgtcttctaggaacttggtcatcattcatccagaacacagcaggttgcgttctgcatacataatattgcctatcaaggtagatttgccagagcagacttcgatcttcttaatctacctgacagtttcttaccatcatttgattttattgatggacatgttaagcctgttctagggagaaagattaactggatgaagacagggatcgttgagagtgatctggttctaacagttagtccacattatgttaaggaactcacttatggcccagataaaggtgttgagttggatggtgtccttcgcacaaagcctcttgaaattggaattgtaaatggcatggatgtttatgaatgggatccttcaacagataagtacaccagcgtgaaatatgatgcaacaacggtaactgaagcaaaggctctcaataaagagaggttgcaagctgaagttggattgcctgtggactcgagcatccctgttatagtttttgtcgggcgtcttgaagaacagaaagggtctgacatactcattgcagccattccagagttcgtgggcgagaatgttcagataatcgttcttggcacgggaaagaagaaaatggaggaggaattaatgcagctggaagtgaaatatccaaacattgctagaggcatagcgaaattcaatgttccattggcacatatgatgtttgctgggtctgacttcattattgtcccaagtaggtttgagccatgtggtctcattcagttgcaagggatgagagtttctagctcgctttgttacagttcagatttgagtgcgcattcccatctgttcatcacctggaggacttgttgacacggttgaggaggggtgtcaccggattccacatgggttctttcaatgtcgagtgtgaaactgtagacctagctgacgtgacggcagtagcgtcaaccatcacacgggcctagaacagtacggcaccccggcgttccaagaaatggttcagaactgcatggcgcaaaacctatcctggaaggggcctgcgaagaagtgggaggaggtgcttctgggccttggagtcgaggggagtcaagctggcatcgacgacgcagaggagatcgctccacttgccaaggaaaacgtagctactccatgacgcttggtgcctcggaaacacgcgttggtgataggaagcatcttctaggatcctcctggccttgtggctggagtgagttgttcagtcagacacagtttcgcctctacaacatcttcctcctcctggtggtggtccgaactccgaagcaaattccagtgataaaggatgaactaagaggtccatgtttctattgctagaccttttgcctcctaaatagacgatgtactgcgcttgtaacaagaacctcactttcgtgtcaagtaatatcaacaggtttcataatggtagtgaactgcactggaaaaacctgtaaacaatgcaaacaggattcaaaactaaaacaaatctgctattaaaagctgttattcaaaattgaaaaaaacaaaacctgttaattcagtattataactcagcaaacataaataaaaaaaaca

SEQ ID NO: 25367 - DNA, 1045 bp, Zea Mays
gtaccagattcttctcctatattgaagagtgcaatgtagctcttcgcatgcaggagccttttctgcttcttggacggtgtagaggcagtcagagcatcatcttgggtttttcttttggtggaggcgggcgttgaggtttcattaggttcttgttttgaaggagaaggtgaaacacttgtgttcctaactctggagggcttttttgttgagtctttggggttgtttggcaagggtgtggatttgggggtagcaattgcagtggcatccttggtgggcgttttagcagatctgtgaaggggtggtgtgtcagcaagtctagatttgtgctttcctttgttttctcgagtggacctcctgaggtttggtgtgtgagcactggcagctgcggtgttcctggtctcccttccatcggcaagcttccttgtggcagttgcagaagcagcagctggaggagaagaaggggggggaggggcatctcctcctcctcctgaccgggtattagccatggatcagtagtagcagcagcagatcaacacctgggtcagttcaaccgtttgttcctccgaggtgcgaatcacgcccccgcccgcggcaccggcagcgaactcgtcccccaaaatcgccggcgagcccgaaccccaacaacccgaggccactacctctgcgagcgcgcgatcagtcgtcagaaagaaatctgtgtaagtagcagggtagtctgaggaagagcaggggagcggaaggaaaacgaaagagaagcatggattacttaccagccacgctccaccggcaatgggttgagaagaagagatttgtgggtcctggaatccgctgcaccagctaccctagctagggcttggcagggacgggagtgcttgcacggcgctggaggaggaaggtcagcaggaggcggcccggcacggccctgccgaaaccctattctacctccccctccctgaccgcctcgtctgatcgtctcgcgaacacgaggggttttgcgggtgaggaggcggagtcgaccccaccgaccaaaggaagacggagaaag

SEQ ID NO: 25368 - DNA, 2063 bp, Zea Mays
tgttccgtgtgtggagttaaaaacagctcttcttttttcacgccgctgtaggctgtagcgtcggttggacgtcgtgagcgtgcagagcaattaagcaaagcagggcttgggtaaatcattattgaaagcatctcccttttacatgtaaccttgcatacaatatctgttaagatgagttcactaaataaagttgtttcaaatagtggagatgcatgttcagtcttagctagtaaagtcacatcattaaatcccaatgcagcggagtttgtaccgtcatttgttaaaccatcttttggaaatggtacagttctagataagtcagatttcaggggttcttctggaaaaacaattctagataggcctgagccatcaaagtctaataactcagatgatgaggcacaccagttttggcataagcagcttccggatgacattattccagacttcacttcttttgagaaagttgaacaagggcctgaactgtcccttgctggattatccttgaatgcaccccccttttatgggacaacttccagtcgcttctcaagagaatatcacgaattatcttctccagttaccaagggcctggaactggaactagaacatactaatatgctatatgaagataaaagcaactgggagcaaaattatattggtgatcttcatattgctaatggaaaccaggaccttcattatgattctgaatctggtgtaagcttttctgatagctttgctagtgagtatgttgccccatcagatggcctttttgctcccctggagtacttggcatctcagttccctggattttcagcagagagccttgcagagctttactacgcaaatgggtgtgatttcaaccatactattgaaatcctcacccagctagagatgcaagttgatgctacacccaatcacacactgaatctgccccacagcacaccgaacttcagcactggggatttccctgcacttccaacagctgaggaccaaaatggtttcaatcagggtaatgtggatgtacttggcatgttcaatgggcgcagttcatctgcgatgcctactggagctggtgattttgtttcagccgttcgcaaacttgcatcgcagaactctggccagtggaagtttaaaaaaggtcctgagtatggtaatggcatttcagctctttctgtacccaagcagtacagttctagcactaaacaatcgtctgggaacaagtttcaaagcatcagcagtggaagagttgccccatggcttgagactggtgatgcagtgggtaatactcatctgatactctgaagtctttctggtccatattgcacagttccctctacgtttcatgtttggatgacaagtatgtactcagaatcaaggggagaggctcgtgattttgctagggtccggaatacctgctttgagcaggctagacaggcttacttggttggcaacaaggctcttgcgaaggagctcagcatgaaggggcaggcctacaatgtgcaaatgaaagcggctcatgagaaagctagagaagctatttaccgacaaaggaatcctgtttcttcccaacgtgggggtggtgaccacctgattgatttacatggcctgcatgtgaacgaagcaatccacatcctgaagggtgagctcaccgccttgaagagcgcggcgagggcagcaggggagaggatgcaagtcatggtttgcgttggaacaggccaccacaccaagggctctcgcactgcgaggttgcccatcgctgtggagcagttcctgctggatgaaggcctccagtacacgcagcctcaggcgggtctgctccgagtgatggtgtactaacatctcttaggtgagacatcacggtgaggaaaaaaactccaaaaaaagagaaaagagatgtacgaaaacgcaggaaaaaaaagcgtcgttggagcacgcactgttattccgtgtagctgtatattaaaagaggcagcaggagaatagcctgacaacaggatacagtgtaaaattatacgtagcttccttcattcaattcacattccttttccatccatccgctgctgtgc

SEQ ID NO: 25369 - DNA, 2467 bp, Zea Mays
cgtctccaaagtaaaaaggataagagagactctgggttgccgaggtccgctttcgtaactacaggaggtaggcaaaggagacggcgacgacgaagaacatcttatagcaacggaaaaaagttagcacattccaaaaacttcaaagactgctgtgtacgacatcctatattaccgactgcttctgtttgaattgaacggcatcttcagaatctcggcgacgctaatttctaactcatatgggagaggtctatttctagaatttttgtttttctttaatagatttgccacctacattggcattttttcccactgcaatcgattataaactacagttttgcaacctttcagtgacatgaacatctaaccatattcaagtttgccctcatctcaatatccagatatctccacctcatcgactcaatagttaaccatattcaagtttgcccctttgaaaccatctgcttggattttatcgattccattacctaaaaatatggtacaatttcagtacgccagtacatattatgcaaatgaaacacaattaaaatcagcattgtgaactttattgtttgcccatttttttgataaattacccattttatgattctactgggcccttttcgcctttgccctacaattattcctcctcttcgctcttttgtttcattgtttgttctgctttgcacttctattcattgcattcttcgtcggtgattgtgctcgtccagttcgtcggccatgtgttctatcattttcgtcagaaatcctttcttaagccctccacttttctccttttttgttaccttcgcacttcgtttttattgttcatgttctctgtcgtcgagatctactgtctcaggtttattctggctttcatagtaaataaattgctcttcttcccctcatttcttgctggacgcatattatgcttttccactttgcgacaacactgtttcccttatttgtgttcgagtaaagttcagactttatcctcagaggtaattgttacttgccttagcttgcactctatacacataaagcgctactgtgctgttgcatcaactgtttcgttccatagtttttgttttatcccacttggtttatgtcttatgtgcgcatcaaacacttcaagctaacaattacgctttctagttttgtagacattaaaacaaatgtttcactccaatgtaggccaaacatatttaagcggtatcgcaacatgtgcatggtactttaatgcagacatttctaaggcacatatgtagtataacatgtacgggaaaatagataaacaaaacactatccattcttgtaattacatttccccttaaacctgttctccttacatgtcatgttgacaatcatctacattatctagctgtctggtagtagcatttttgtaaaactaacatacaaatctagcattaacttttgccccaaatttctaaaatctattatgaactacaaacaagttccaagtattccttttcacatgaatatgagcacactttttaagccatccaataacatttaatcaacatgtatcgtctacattatctagctgtctggtagaagcatttttgtaaaattaacataccaatctagcattaacttttttccccaaatttctgaaacatattatgaactacaaataagttccaagtattcctttgcacatgaatatgagcacccttttttaagccatccaataacatttaagcaacatgtatgcttaaattccacaatactgaccaattacacaaatgtttgctactatttcaatttttgttgtcacatcatttaaaggttacaaaatattgaactttagttgctacgacctacaatacttgaagaagagatccaggtttcccagacacctactttcgaggacaaaaccatcaatgaattggttgaaattgatccagatatattccatgaaggtagatggtggttcccatcttgcactaaatgcaacaagtcttcaattcagacctctactaaatatcgctgcatacgtgtgattggacagaaactaaatttaggcatgtcacagccttgcatattctaatgcactacatgatatagagataattgctttgcgtatctacaacgaccatcactacttttgaagcgcaaacgcttttatgtacatataaccaaaccgatgaaacttctctagcttagtatttgtttatgcgatcctcagctctgctttctgtacctatgacgatcatcgtcacttttgcaaagcaaatgcttttgtgtacatattaccaagttgatgaaaccttgccagtttagcgtctgtttattatgatctttagctcttggaacacactgctgaaatacaatgtaatatgtatagtcctctcagtctactctagacttgctgtaaccgctataattattatcttagtacaacaatttatgtaagcactgggaccagtttaaatttgctcttaaactg

SEQ ID NO: 25370 - DNA, 2241 bp, Zea Mays
ttctccctcaccgacaggttgaagcgcacatcgttccaatcgtcgccgccggctacctcctccagccgccgcgcctccctcctccacccgctgccgcctccctccaaaacttgtcgtcgtatccctccaacacccgcatctggcgcagacgaccatacacccgctctgatgctttaaatcaatgtgtatggggttccaagcgtctgacctgacaaagaccgccccaagcaacgatgattcttgaagcgattgcagagataaaattgaaagggctgatttccttgatgtgcgcttcaacgagttggagaggatacttcgccaaccgaacaagcctaagtgggggtgatgatgagccaccggaggcgttctcgcgctgccggctcgccgcctggcgacgccagtacgggtacgccccctactcctgagaagtcgggacgggtccggccgtgggcggcgacagcgtcgaaccggaaggtgctggtgttcgcgctggcgttccgcgcggccaacgcgctgctcgtgcgcacgtacttcaaccctgatgagcactggcagtgtctcgaggtcgcccaccgcgtcgccttcgggtatggtcatctcacgtgggagtggaagcggggcctgcgcagttatctccacccattgctctttgctgctttgtacaagaccctggcgctactccatatggacactccgtgggttatggtgatggctccacgtctcgtgcaatctttgtttgcagcttttggagatctatacctatataaactttccaaacttattttcaatggtcaagttgctaagtggacgttattttctcagttggttaactggttcatgtttttctgtatcacacggactctatcaaacagcttggagactgttttgaccgtggctggactctattattggtttgctgcaatagagtcttccaaggcaacctcaatcgtttcaaagcagcacgcggcctgtgaacaaagtatcccatcaagaaaagtggctcttctgatagcagccttgtcatgtgccattcggccaacaagtgctgtaacatggctatatgttggccttttggattttattcagatgaaatcaaaatgtcgctttatccttcttgatgtcattccagtgggggccattgtccttgcagtaacaacactccttgattggtggatgtatggttcctgggtcatagtgccgcttaattttttgaaattcaacttattgtcttccggaggagactactatggaacacatgtcttccattggtactttacacagggttttccatccatgatttggacattcttaccatttgcattgtgcggtattgtaaagtctcaggaatggaggctttcaggtctaattgcttgggtgttaggggtttacagcattcttggacataaagaattcaggtttgttcttccagtgctacctttagcattgatgttctcaggttactgcttagcttccatgtcacagtccaagggcaaaaatcagcataggaaaggaagtctttcaaggctgcagctttctgttattcttctcgtcataaccaatgttcccatggctttatatatgtccttattccatcaaaggggaacagaagacgttatgtattatttgtcaaaagaagcctatgatggaagagtgaggagtgttctctttctcatgccttgtcattcaacaccttactactcaaccttacattacaatctacctatgcgttttttggactgcactcctagtgatagcaaagggaccttggatgagtcagatcgtttccttacaagtccatctgagtttgtcggcgatgtttttggaaatttatctgcattcagtcacattgtattattcgagtcagaagaaagacatgttctccagttgcttctgcacaattcctttcttgagatgaggaggtttttccactcacatttcaagattgacagagaccttcagtcggctgttgtggtttattcatggagggatgtgctatgatttagtactgatgtggcagaaaatgcctgttagctcgtgtaacaatccccacatgtttaatgttgtttcagcttttcatttgagaaatgagttgtggcattgctggatacttctgatatcttaatcctcttggaatgagatgttatgttacttttacccaagtgctttacgacggcataacaattcacagttcgctttcttgcatcgagtctctatgtccatgatatctgcttctaagataaa

SEQ ID NO: 25371 - DNA, 689 bp, Zea Mays
acaggaacgtgagcggtgagcaaccctaccccaggcccagcttgcgcgctctctctctctctggacgacgacgcctacgccagggccccaggtcgctgccgccctacgccaggtccccttcgccggcgacgagcaccaggagttgaagactagtgaagttctaaagcagctgaagtttgtaaacatgctaaagaatcagctggtggaccaaaaccagaagcctgcttaaataaatgccagtaccagagtgggcgattcctcaagagaaggatacccattatgatggtatgaatgagttgccgtatgtggcgttctcttgtagtaactagccgtctgtgaacatgtgagaactatgttgttctagcctgttaaacgaaatgatctgtactgtcttctatagggtcttggtacacaagagttatacaacatagatctgtctgtgcagtccagggagcagcgtgtcgctactgctgtgatcgccgccaaacgatcctgtgatcctgcgccaagttttgtttcttggtaacttctggtattgcgcgtgccactgcatggcgtggatgacgttttctggtagactgccgagcgtttgtgtatctgttgataggcgtttggcctgctatgcatttcatgacgagaggcatattgcattgtgtgcctgcattcttgccagaactaaaatgctgggc

SEQ ID NO: 25372 - DNA, 6132 bp, Zea Mays
atggcggaagacggcgcatccgcgacacaggctatggtggcgcagacgcgcccaacggggccgtgcaacggcgagggctgcccaggtggtgctgtccatggtggggaaggggggaggagtcgatttggtaaatttgttgaaatccaatttgacaagagcggtaagatatctggtgctgccattagaacttacttgctcgagagatctcgagtttgccaaattaatagtccagagaggaactaccattgcttttacttcctatgtgcagcaccatcagaggatctcaagaagtataagctcggggacccatcgttgtttcactatctcaaccagtcagcttgtattaaagttgatggaatcaatgatgctgaagaataccttgcaacaagaaaagcaatggatactgttggcattactgatcaagaacaggaagctatattccgggttgttgctgctgtgcttcatcttggaaacataaattttacaaaagggagagaagcagattcatccataataaaggatgacaaatctagattccatcttaatacagcaggagagctcttaatgtgtgattgtgagaagttggagaatgccttgataaagagggaaattaatacaccagaaggagtgattaccacaacagttggtccgaattctgctactattagccgggatggtttagcaaagcagatatactctcgattgtttgactggcttgtaaacagaataaatgcatcgataggacaagacccaaactctaacaaactgattggggtacttgatatatatggttttgaaagttttaaaaccaacagttttgaacaactgtgcatcaattttaccaatgaaaaactccagcaacattttaatcagaatgtcttcaaaatggaacaagaggaatacacaagggagcaaattaattggagttacatagagtttgttgacaatcaagatgtacttgacctgattgaaaggaaaccaggtggcattattgcgcttcttgatgaagcctgcatgtttccaaagtccacacacgagacattgtctcagaagctgtacgaaaagttcaagaaccacaaaagatttaccaaaccaaagctttctcgtactgcatttacaattcaacattatgctggagatgtaacatatcaatctgatcaattcctggacaagaacaaggactatgtggtagcagagcatcaggaattacttaatgcttctaagtgctcttttgtatcagggttatttccacaagcaacagaagagaacacaaaatcatcaaaatcctcaattgcaactcgctttaagatacaacttcatgaactcatggagactttgagctctacagagccacattacataagatgtataaaaccaaatagtgtccttaagcctggcatttttgagaataccaatgttctgcagcagcttcgatgttctggtgttcttgaagccattagaatcagctgtgctggttatcccacaaggaaactatttcatgattttctacatcgttttcgtgttcttgctcctgaaattttgaaagagaaataggaagaactaaggtattcctgagggctggtcaaatggctgatctggatgccagaagaacagagatgcgaaacaatgcagcaaaaggcgttcagagtcaattccgtactcatgttgctcgtgagcagttcctagtactacgggacacatctatttatttgcaatctttcgttagagccagattggcatgtaagcaacatgaattcctgagacaacaagcagcagctttgagaattcagaaaaatgcacgatggtattttgcctggaaaacttattaccaactacgattgtcagccattacattgcaggccgggctaaggtccatggcagctcgtaatgagttcacctttagaaagaaaaataaagcttcagtccatatccagtcccagtggcgatgccaccgagattactcaaattatatgaatttgaagagagccgcactaacatatcagtgtgcttggcgaagaagggttgctaggaaggagctgaggaagctcaaactggctgcaagagatacacaggctctaaaggtggccaaagagaaacttgaggaacgtgtggaagagctaacaagtcgcctggaccgcgaaaagaaactaagggctgatttggagaagtctaaagcagatgaagtttccaaattgaaagaagctcttcatgagatggagcagcgagtagaagaagtgaaagcgatgcaggaacaagaatcagcaaaaaaggctgttgaagaagctctagctcaagaaagagaaaagatcagtttattgactactgaaattgagggcctaaaggttctgctagtagctgaacgagaggagaatgataaaatgaagaaagcgcatgctaatgctctggaaacaaatgaagagttaaataaggaagtcagtgatgcagatgaaaagatcaaacaatttagtgatactgtaagaagactagaagggactgtaagcgaacatgagggccttttgctaactgaaaggcaacaaaatgaagcagctaatgctgcacttgctgaatctcaagcgagaaatgaagcactggtaagcaagcttgaagatgctgtgaaacaaaatgatctcctccatgaagctgaccaaagatttcaagaagctacaaaaaatttggaatcttcactgacatttgagaagcaacgacatgaggcaaatttgatagaattagctgaagcacgagaaaagattgaagaacttcaaagagaagttggggacactgatgaaaaattcaccctgcttcagactagtatacaaagcgttgaagaaaggttaagagagaaggatgctctattgacaacagaaagactagaaagtgaagcaactaagaaatcactaaatgaatctgaggatagaaaccaggacttactactgaaaattgaaattgctcagaaagacattgctcacttccaagaaaccgtccgaagacatgaagaaaatatggcagcactggaaacttcgttgagatctgaaaggcagcaaaatgatgcaatcatgaaacaactagctgaatctcagggggaaataggagagctgcaaaggaagcttgaagatgctgatgccagaaatgggcttcttcaagattctttacagagacatgaagaaaatatggcagcactggaaacttcgttgagatctgaaaggcagcaaaatgatgcaatcatgaaacaactagctgaatctcagggggaaataggagagctgcaaaggaagcttgaagatgctgatgccagaaatgggcttcttcaagattctttacagagacatgaagaaaatatggcagcactggaaacttcgttgagatctgaaaggcagcaaaatgatgcaatcatgaaacaactagctgaatctcagggggaaataggagagctgcaaaggaagcttgaagatgctgatgccagaaatgggcttcttcaagattctttacagagacttgaagacgatgctactacaagagaagctttaatggaaactgaaaggaaagaaactgaaatgacaaaaaagacactgactgaagctctggatcaaatcgaggaattagtcaaagaagttgagtgtgctaaccacagtgtgcatcagcttcaagatagtatgcagagaatggagcaaaccgcagttgcaagggaagcaactttactagcagaacatcaggaaaaagatgcgacatcaaaagcattagcagaggcacaagggaggattgaaggtttactgaaggaaatttattctgctaatagaaaaaatgatcaacttcaaagtactatagaaagacttgaacaagatgtcactgccaaagaggccttattgcttacagaaaaggaggcacacgacgcaacaaggaagactctgactgaagctcaggaagagagtggagaacttctgaagaaaattcatgataatgataaacatattcttcagcttcagtttactatacaaaggcttgaggaaactacagttgcaaatgagaatttgctgttgagggagagggagcagaatgacataacaacaaaagcgcacaatgaaagtcaagaaaaatatgaagaattactaagcaaatttgttgatgttgacaggaaaatcgaccttcttcaaggtaccatagaaaggcttggagaaaatacaacaaaggattctctgttgctatcagagagacatgaaaaggatgctattaagaaagcacttactgaggctcaagagaaaaatgaagagttactgatgaaagttgaagatgctaatgaaaaaatagaacaacttcaaactacgatagatatgcttgaagataatgtagctgcaaaagatgtttctttagaagctgcaatgaaggaaaatgatgcaattaggagatctcttactgaagctcaagagagaaatgatgaattactcaagaaaattagtgacagtgaatacaggatccatttacttcaagacacgatacaaaagcttcaagtagatgcaatatcaagattgtcgtcttttgtaatggaaaaacaagaaagtgatgcttcaaagagagctgttactgaagctcatgaaagaaatgaagatttactgaagagaaatgaggacctcctcaagaggaatgatgatctgattaagaaaattgaagactctagtaaaattgtcactcaacttcaggaagctctacaaaggcttgaaggaaaagcatgcaacttagaggctgagaaccaagttcttcgtcaacaagcaacttcaactccaccaacttcagctaaatctccagcttcacgtgcaaagatctcaaggatccatagaagtccagagaatggccataatttgaatggtgacattaggcaaactgaaatgaagccctccactggcacatcagaagcaataacctcagcagctaatgttcctgacttgggcgaccaaaaagattttgaacatggagaaaaactgcaaagaataccaaaacagaaatatcagccttctcatcaccagcagccccaggacgatcagcagtggctactcgcttgtattccacaacatcttggattttctgggagcaaaccagttgcagctctccttatataccaatgccttctccattggaaatcatttgaagccatgaagacaggtgtcttcgacagcattttgcatgctataaactcagccacagaggctcaaaatgacatgagaacattggcatattggttgtccaacttatctacattaacagttctccttcaacgatcattcaaaactactaggacggcaatctcaactccacaaaggagaagattttcatcggagaggatctttcatggaaatcaaacttcaaatgctgggcttgcttatctcagtggtcaatcagttgttgggtctgctggactgccccaagttgaagcaaaatatcctgctttgctattcaaacagcagctcgtggatctaattgaaaaggtttatggcatgataagtgacagcgtgaagaaggagctaaaccctttgcttgaattgtgtatacaggatccacgaacttctcactcgagtatcgcaaaaggcaatcttaatggcatgggtcaacagaaccaactcacatattggctgggcatagtgaaaattctcactagctacttggatgtactgagggtaaatcacgttccatcaattctggtgcataaactcttcactcagatattctcattgattgatgttcaactatttaaccggttacttttgcggcgtgagtgctgttcttttagtaacggggaatatgtcagagctggactaactgaactaaaacattggtccgacaatgctacaagagagtttgcaggttcagcgtgggaggcattgaggcatattagacaagctgtcgatttcctgtgcaaaaaatttcccctgtacatatcttgggctgcctctatccatccataaaccccctaaggaggctctacaacttttggtggataaagtttcagactacttgccgggatggaaagcttctctaatgaaccggtctggtcgattaattatggtacgagcagtcttgacagcctctcctatatattctatgctagcaattgatctcccaaaatgggccattaaggctgcggac

SEQ ID NO: 25373 - DNA, 5016 bp, Zea Mays
cggaaggtggcctggccctggccgggagtggttaacctcggcgagccgctttgtcttctattccccactccatcctactccgccatggcggtgaaggggaagggtaagcaggtggccgccgaatcccctggccctggcgctggcgctggcggtgcctccgggtccggcgggaagcggcggatggcctctagtgacgcgggggcggggccctcgtcgtcatccgctgcgaagcgccgccgccgcgccggggtcctccagttcgtcgacgacgtagctggcgtcgacgacgattatgaggaggacgagctcgagtccgaggatgacaccgatgatggtttctttactggtggggaacatgcacaaaatctgagtcacaaaagaactgaaaggtcacaccctcttccatttcttgtgaaggaagaggagcttagtggcgatgaacttgaggaattcatcaagaaccgatacagtaatcgtgtgaaatacgctgctgatcggagctattctagagaagacgatgacattttctccatggattgtgcactcaaagagccgactatttggagagttaaatgcatggttgggcgtgagcgccaaatggccttctgcttcatgcaaaaatttgttgaccttcgaaaaattggtaccaaagtgccaattattacagcatttgcacttgatcacataagagggtttgtttttgttgaagcggagaaggcctgtgatgttacagaggcatgcaaagggttttgtagtgtgtacacaagcagaatcacttctgttcctgcagctgaagttcctagcttgttatccagccgtacgaaaccatttgaaatctctcgtggtacatggatccgcatgaagaatggaaactataaaggtgatctggcacaggttgttagcgtggatgatggacggaaaaaagtgatgataaaaattgtacccagagttgacctccatgctatttcaaaaaaatttggtggtgcagtttcactaaaaggagctgcagttcctgctccacggttgatcagctcccaagaactagagttcttcaggcctcatattgaaataaagcgcgaccgtcagactggtgaagtttttgaagtacttgatggtttgatgttcaaagatggatttctgtataagaaggttgcacttagttctttgatttattgggggatacaaccgacagaaacagagcttttgaagttctcttctagcccaagcaatagagcttctgctgatgacttggattggctctccggcatgtatggttctaagaaaaggaaccttccagaaaaacgagatatggaatcatcatcttctaaaataagatcctccaaagcatcagaccttaaagcgtcaacttctactgaaaattatgacgagaacgatgaattcaaccttcatgatcttgtactctatgggcgaaaagattttggtgtgattgttgctgttgagaaagatggttttagggtaataatcttgtaatccacacttcaattttatatcctttattttgtctaagaatgggttctgtgtagatactaaagggtggtcctgaaggatctgcggtgaaagtgagaaagcaggatattaagaaaggctgcgtagataaaatgtttacagctgttgatcatcaaaagaagacaatatccattaacgacactgttaatgttgtggaagggccatttcagggtaagcaaggggtcgttaaacacttgtacttgggaatactgttcatttataatgaaagtgaaagtgagaactgtggatttttctgtgctcaaagcgggtcatgcgaaaagatacgaaagggtctgggaagctctactactgaaagttcggactttacaactcctatgtttcctgaacctgcttatgagcaaaatgggcatcgggacactgaaaggccttacaggagcaccagagaacaacttttctctattgggcagatgctgcgcattagaaagggtcctttgaagggctacctctgtcgagtagttcggatatttcggaatgatgtgactgttaagctagattctctactgaaaattgttacagtacaagctgatcttctctcagtcccagctaacaggggggataacttgtctggtgccccagctagtaaatttggaagtcaagatacatccttctttggttcagaagcaggcaaaacttcatgggacaatgggttgccatcgtttggaagtgactcatggcaacccttttcgagttcaacactatcagttcagaatgcaggtggagaatcagaagctgatccatggtctaagaaaacttctgccaaagatgattctgatccatggggtaagaaaactgatggtgattctgatcgatggggtaagaaaactgatggtgattctgatccatggggcaaggaagcggtatctgctgctgatggtgattccaatccatggggtaaggaaacagtaccttccgctgctggtgattctgatccatggggtaagaaagtggtgtcttctgctgatggtgattctgattcatggggtaagaaagcaacatcatcagctgttgacactgaaaaggaaggttctggtggtactgcatgggacaaacaagctggagttggtggatctgatgctgctggcagctcctgggacagagcggttgtcaatgagagtgaaaagagtgacaactggggagaggcttgcagggttatggacatgggaactggagctgaagctgacactgacccttggggaagcaaggtcaaagcagtagatatggaaggaccaaataactgggaaaaggctacagtgcctccaaacaataagctggaggatgtcagtcaaggatggggccaacctaagggcaactcaactgaagaccaagcaatagacaacgtttctaaagacgtggacaacaacagggcttgtgacagttctttgcctgtcactgaagatggtacctggggcaagtcaaaagacaacagttgtggtggagcaggtggtgcgggaggttgggatgtttctgttggcaactggaataaatcatctgttgtggctgatgcacaggatgaaggttggggcaaaggaaactggtcatctgctgagtctgaagaaacaaacaatcaaagcggaaattggaacaaaactggagcttcggaccaagctggttacaacaattgggataaaccgaaatcctttggtggtaatggttggaacaagggtgatgatcagaatagcagttggaacaggcctgaaaattttggaggtggacgtggctttgggcgtggacaagggagaggtaggggtcaacaatctggatatttcaatggcagaaatgatcaaggaagctggaagaagtcatggggtagtgacaatgctgaaagaccctcttggaggtctgataatcaggtagacaatgaggctggagagtctggtggatataggggaaggggaagaggaggaagggggcaatatggaggacgaggtaaagacaatggttggagaaatgatgatagaagcaattctgggtttggaagggaaaataacagtggcgatggaccaaaatggggtggtggaggtaattggaacgctacaaatccaccaagtagcagtgtaggcaccaagtcatatggtcaaaatcagcctttcacttggaataattctgaggataacaaaccatctgtaggtgaacaaggtgatccttgggcaagcaaggtgtcttctactgaagatacagaacaacagaatgattcttggtcaagcaagatgatttctggtggtgctgaggataccagtggtggctgggacaccaaggtgaaagactcttcctgcaatgatgggggtgaaggactacaaaatgatccatgggcaaacaagattggttctaatgaaggtagctggaacactacagcaaagggcattccatctaaggaaaaggctgatgatccatggaatagtaaggggggtaatgatgacagcaagaaaactgacacctggggtgctggctcgtcaggtggggatcaggaactttcttggagcaaacctaatttctctttgggggaccaggaatctacttggaacaacccaaggttcagtgacgatgacaatgcgaataatagaggtggatttggacgtggaaatcgaggcagagggagaggaaggaattttggggatggtggtgggtcatcatggaatggaggcaatagaaacgatgaatcaggtggcggaaggtctggagagccatggaacagaagggactttgatggtggcggaggaagaggcagaggtcgttttgggcgaggtgaccgtaaccagggcaacaacttcgggtcaggagatggtggcagctggggctctggcaggggaaatggtggccgcggtggttacaggaactggaacgataacaatgagcgatccttcggtgaaggtggtggctggtcccagtcccagtcttccgattggaatgccaacaaaggaaatggcgaaggaaatcaagctttctcgaaaagcaagcccagctgggaagcacaaaacacctctggtagagatggtcaggcaggaaagggtgatgcaaacaactcctggagtaagaacagatcatctccatctagcgcttggggcgctcccagtggaggagctggcggccgaggttcttggggaaagagcaacgaggatggctggaactcagcgggaggatcagccaaagagaagcctgcatggggtggtgggtcagaagcgtctaccaagaaagaggacaaaggtggtgaggggaacgggagccaaggaggaggtggtgtcagttcctgggataaaggggcagatgatgcatggaacggcaacacgggtagtgatattgggagtggtggatggtaagatttccgccaaaataatatgaactctgtcggtgcgtgtgtctagttcgtatccgttacttcgccatgtgtactctacactaaaaagaacatggcttgtgaccatttaaacattaccttagtggtggcagtaactagtaaaaaagataaataaa

SEQ ID NO: 25374 - DNA, 2009 bp, Zea Mays
gggctgccacaacccacaaggaggccagggaccaatcacagacagtcatcttctcccgttcacgtaacgtgcactagggtttatggtttagggcgaccgccgccgtcctacgtccagcggccaggttttcttctggccctctgcgctgactacaacccaccacctccgggttaggttttggatttggagacatggcggaagtggtggacaagctcaaggactacgatatcaagaaggagggagaagcagagatcctcctgcacaagaagaactccgtcttctttaatcccgtgcaggttcacaacagagacatgtccattgctgttttaaggacctttgttgccaagcgtaaggaagaacatgaagcgctggtggacaagaggaatacatcacataaaaaaaataaacaaagtgaaacatccagtcaaaatggagaggatgcgtcaactggccagcaagatgaaatggatgttgtttgtgaaaaggagctgaataaagctgaagatcaaattgatgatctgtcgaaagaagcaacagaaccttcttggaaagtaaccagagagcttaagccaccacttgttcttgaggctttggctgctactgggttgcggtctctccggtatgcccgtgaagttgagggcttaggaaaggtagttgctctggacaatgataaagcttctattgaagattgcaaacgaaacataaagttcaatggtgcttccgctactagtaaggtggaagcttacttggttgatgctcgaattcacatgctgacgcatccaaaagaatttgatgtggttgatcttgacccttatggatcaccatctatatttctcgactcagctgtacaggctgttgctgatggtggtctattgatgtgcactgccactgatttggcagttctttgtggtaccaatggagaagtttgttacgcgaagtatggttcattcccaaccaagggcaagtattgccatgaaatggctttgagaattctccttgccagtattgagagccatgctaatcggtacaagcgatatattgtgcctgttctctctgttttcatggatttttatatccgtgtttttgttcgagtattcacttctgcaagtgaaataaagaatacacctcttaaactttcttacatatatcagtgtgttggctgtgattctttccatcttcaatgtcttgcaaggactgttcagaaggagttacatgacgttccattgtttttcagtctccataacatagcaggcactgttaagtgcacatctccatctttggttatgtttcggtctgcagttctaaatgcagggtatcggatctcaagcacccatgttaacccacttgggattaaatctgatgccccttgggatgttatttgggacatcatgcggtgctgggtgaagaatcatcctattaaggaacagccacgtgactcacctggcacggtgatcctttcaaaatcgccaaagctagaagcaaatttttcaagagcagttgctgccctcagcaaggctcagacaaataagattaaacgattccttccaaaccccgaacggcactggggtccgaaggtcagagcagggcggaagatcacgagcaaacatgtctctctgttgggccctgacgctatcaagggtgctgtgaacggtggtgactgccagaaagaaggaaacggtgctgagccagatagtacagcctcagaacccgaggggatcaaagacgttgaggatgagccctcaaacaaacgccaaaaaaccagcgacggcgaaccagcaagcgaaccttgatttgtttgtcaatctttcgcgtctccattgtgttgtgcctgtgcttttcttgtttgtaggtggtcgatggttatttataccacctgttggattttgaacgaacaaattgtggcaggtttttattaaacttttgttgcatgtgtgatgctcctcctagtcacagagggaaaagacctattaaagcataatatatagtatagctttctgcaatgtcgagac

SEQ ID NO: 25375 - DNA, 2731 bp, Zea Mays
gaacagctgaaatttctccaaaaataccaatccgccttccatgttctcgtcgctgcctccgtctgacggctcgaagctccctccagttccgatctaaacccgccgaaaccctaatccccatggctgccgccatgggcaaccccatcctgaccctccccgcaccggagggcaacggcaccgggggcggcgacgccgaccagcagctgcagcaggcgccgcctaagccgcctcctcccggcgcgaagacggaccccccggcgacggtggccacccacacgcgcaccatcggcatcatccaccctccgcccgacatccgcgtcatcatcgagaagacggctaccttcgtcgccaagaacgggcccgagttcgagcgccgcatcatctccctcaaccagggcaacgccaaattcaacttcctgcagccctcggatccctaccacgcctactaccagcaccgcgtttccgagatagccgctgcgccgcccggcgcggacggcccctcgggcgccgatactggcgcggctcccgacgaatcgccagcgtcggccccggccgacggcgccgccgccgcacccgtagatggcgctgctgcggacgcaaaggccgatcactccgcgcccttccgcgtggggccgccgcccaaggtgctggtgccacccaaggctgagctgtacacggtgcggctgcccgagggtatcacaggggaggagctggacatcatcaagctgaccgcccaatttgtggcgcggaacgggaagaacttcctgacgagcctggcgcaacgcgagagcaacaacatgcagttccacttcatccgacccacgcacagcatgttccccttctttacggccctcacagatgcgtactccagggtgctgaggccggcagagggggtgcctgcattgctaaaagagctgagggaggggtcaaaggacctgactacagtgttggagagatgcttgaaccggttagagtgggatcggtcgcaggagcaggcaaggcagcaggcagaggatgaggttgagcaggaacggatgcagatgtcaatgattgactggcatgattttgttgttgtggagaccattgaatttgcagatgatgagtatgaggggcttcctgtgccacttacactggaggagttgaagcgccagaagaggatggagaacttgggagaggaggaagcgatggatttgactgaaccttctaaggaggttgagatggaaatggatgaagaggagatgcaacttgttgaggaaggaatgcgggcagcacggcttgaggagaatgatggagcagcacaagttagcttgccgggtgatgacgaggcacctatgaggattgtcaagaactacaagaggcctgaggagaggattccggcagagagagacccaactaagtttgttgtctcgccaataactggggaactcattccgatcagcgagatggaggaacacatgcgcatctcactcattgaccctaagtacaaggagcagaaagagaggatgttagccaagatcaaggagactacccttgcacctgatgatgaaatatcacggaacattgttggccttgctcgcactcgccctgatatttttggaaccactgaggaggaggtgtctaacgccgtcaaggcagaaattgagaagaaaaaggatgaacagccaaagcaggttatttgggatggtcattctggtagcattggacgcactgctactcatgcattatctcagcctcagggtggtgaggaacagtttgatgctacgaatgttgatgggaggcctgttcctggtccagctccacttgtccgacctggcatgccgttgcctcgacctcctcagccacttcctcttgttaatgttcctcgttttatcgctccaccagcaccatactctgttccacccccaggttctcatatgcctggagttccacacatgatgcctcacatgcatctgcctccacagcagatacctggccagccgccgatggttaggatgccaggtcaaatggttcatatgccaaccagcattcctccgcctcctggccaaactcagtttatgcctggtccaccacgcacatttgctatgcccccatcatcgcacatgccacccatgatcaatcccattggaatccctcagcctccagcaccgcctctgcctccacagcctcctgctgaagagcaaccacctccacccgatgaaccagaacctaagaggcagagaacagatgatgcttctctcatcccagcagagcagtaccttgttcagcatccgggtcctgctagcatctctgtatctgtacccaaccttgatgaagggaacttgcgaggccaaattttgcagattcctgtccaatcactgtcagacacagttggtagtctgaaggagcaaattgctggagagttgcaactccctgctaataagcagaagttgagtgtgaggactagtttcctcaaagacaaccttactcttgcttactacaatgtgggtcctggagtggtgatcaatctaacactgagggagcgtggtgggagaaagaaatgagtcttttggttctcagttggcagtttaatgcttacaactataattcagcagctatcatggagaaccaattcttctgtacaatgtcgatgacagtactatttgtttggtggttattttgaaaggtttaggctgatgaccgttcttgtagttttttcattgtgtatgatgccactgattattgaaaatacttt

SEQ ID NO: 25376 - DNA, 2448 bp, Zea Mays
aggatgtcaagtgctgatatgcaaacactttagttgatggttttatttatgacgtcaatgaagttgatttagatgcatcaaaggatgcagacttctcgatcgaaccatgttctaaatcaaagaagaaatatttgaaaaagactgtaaaacccaggcatgaagtagttgctgtaaatgaacgaaacaacacaggaaatattaaaggatcattgtcctccaatggagaaaacaaatcccttcctcttatcacggcaaaacagtatgcttgtcgtgctgcacatttgtcttcccttgtagtttcatggtctccagttgtgtcatcaagtgataaaacatcttgtttattgaggcattggtgcattattgctgttggctctaaatccggaaatctttctttttggaaactacctaagccagaatattacacaatagatgctggcgtggttaccagtgatccaatgctcatcggggttttgcaagctcacaaatcatgtgtcagtgtcatagcttggcaagttctttctgcgggctcttcaaaatcctcgttgcttttagctactggatgctcagatggaagtgttaagatatggttagggaatattgaagggttaaatcaatgtgcaagtggagaagtgccatttgcgttagttgctgtggtcgccactgatttatcatctccagtgtcatcaatctcattagccatacctgcccagtctcaacacgaggtcagtttggcaattggaagagtatctgggtcactagaaatatggatatggaatgcatctagcaacaaaattgagattttcagtgcatggcatgcacatgatcaagtggtaacaggtttacaatgggctatggatggctattgtttattcagctgcagtcaggacaattctgcacgttgttggatctctcacgaaaaccaccttgaagaaatttttatgcattcaaattttccagagctaagggagtcagcagacctatcagaactctctgatcgatgctatggtcttacactagcacctggagaacagatgattgctgtggtccgcagtttggatctgaaccttctgaaccagatgtatcaagtcaggacacaaaaggcggtggttgagttcatttggattggtggccaatttgttggtattccactagacaggagcattgatatttgcagttcacagtccacagacttatcctcaagtaatctcatgtggtggggatccaacattttgtggtcgctgaagaaatacgaaaatgtagaaaagaggcttgtgatatgggatgttgtagctgtgctgcaggagttgaagaaatccgcacctgcctttctggagactctagtgcatagttgggtctcagtgttactttcgggcgacccccagtgtgtttctatcgatgctccatcacgttcaatgcatgacatgatgccctatgtcagcacgcggaagctacacttactgaacataatgtgcagaaaagtaatggtcagcattcacacacatcatggtcctggtgctgaaaacggcaatgaggaaacaactgatttctggagcactcttttggtgaggagcgaaacagagctgcgagagaggctggttggcttcacctttgctgcagtcctgaaacggacagcgtatttgttcaatggtacctctactgaaaattgctggtttcctgttggggttgcccagatggattcttgggtaaccatgaattacgacggacaagtgcatgaccagctgcagtctatcagatcaaagatcaaagatttaggaagcaggatcgacggatactctgacgtagaaagctgcccctactgctcttcgccggtccatttcgagtcgcctgacgtagccatctgtggggaaaggcacacactgccgcggtgcagggcgtccatgatcctgtgctccgttgtgcagcctttgtggcactgcgtgtgctgcggaggcacggtcaacaagctgttgccggagtcgttcttcaccatgcaggcgtccaccatgcatgatgaaggatcgctcgatctgtcagcagcctccgtcccactttgccccttctgtggcatcctcctgcagaggtcgatgccggcgttcctgctctccacctcgccggcatagaggctctctgtggatgctagtaggcatccaccaggtgtagcatgcagtagcaatgtagtactagtaaagtttgttctagtcgatgctgcttacactcagttactcttaccaagtatggctggcagagtgtcggttactggtcattttttaggtcccttttgaatgaatacgatgagttcttttgtttggtttcttttggaccctgacggtggcagattaccaggccaagttcagctatctcgaattgtctcattcgattgttgcggacatgcagttctggcagttccaattggttgttgcggacatgcagtcctgtcagttgact

SEQ ID NO: 25377 - DNA, 609 bp, Zea Mays
tctgtccctatatacggcgccccatcgtgcctcaatccaagcactgagtcgcacccccgtcgtggaaagggaacaacatcgcccccaacaccgagagagatagggggatctgccgcacgagcatcctgcagggatcaccgctctgggctggacagatggtcaaggcaagtctccagagcacgtacgttcgtgacctcatatggtgaggttggtggatgggagcatggttgtttctcaccgaagtttccctccgccaaggaaagccccctgccgcgggccggcgttgctgcttcaccactgtcgttggtgaagttcacgcccgggtttggtgcccctaaaacccgggtgtgataggtcatgaagtacctaaagaccaaattggagaagtacctggagttgtaccaaaggattgttgtgcccttgatcacttttctttacttgataatcttctcgataatcattgtgacatgctcaggttaacttgatgggacctaataggttaccctagtattgttcaccctacaccttgcaaacaaatgaactattgggtagtcttgctattgccatacctgattttagaattaatattatatcttaattatgatcatg

SEQ ID NO: 25378 - DNA, 3533 bp, Zea Mays
ttatgattctaccagatatgtctttttgattccgtcgaaaatcgattttacggtataggcgcttatgacctcccctctatgccttgcggtaatgattcctctggcattacggcctttaccacaacggtgccgtccatggaccaatttatttcgtggattggatttcacttgcctgtctatggtttccttgcgtgtgctcaggataggtgttttgtataaatgtttcgccgtattattaagtattctcctttagttcgtttctctatctagaagtagaatagaataacccggttgaagggtaatgatcatacgtctgtaatacattgtatgtcccaaaataagtctcattcttctaccctttccgggtagtcgatggcagctaccttaacaccaaagaagagttcgactagttgaactcgaaagctcgaggcccaggcgacgcgacgcggccacgcccacgtccttccatggcgaccgctctccccgcctccgcctccgccgcttgccttctccagctctcccggcgcggtctccctggaacatcttctgtgctctccccgcttcgcaccgccactttccgctggcacggtgcctgtaacgtggcctgttcatgctctcccggcccccggccggcggttcccgcggagcgaagggacggcgtcgctggccatgccacttctccagagggaactgtacgaatcgtcgccgtggttggagaaggtagcatcagcccgattaaggacgcgccctgggaagaggtcatgcgccacacggctgataggctgaagtgggtcgatgaaggatttgaaatgcttgtcttcacggataatttggttggtcatgataacctcaggaaagagttactatcacactgtgatatgctagtcaatgttgcaataacaaatcaggatgctgttcagtggcttataaacaacagcaaacacatttctaatgtaatttgctttcagtcatctccgtctttagtaaacaaactaggtggcacatatgttcagtacactggagagcaggacatgtttgggaagctaacaagtattggaaaaccaagtggcatagaggaatcaactgaagttatgaagaccatatctaatgcttgggaaagacacaattcagatgacattagattttgcttgcttgttgttgtaaatgcatacataagaccggttgctatgctgaaaaatctaagggcaaaaggcctttctaccctaacttgcatgataaagaactgtggtcctcagatactcaattgtctgtttgaccctaactgtaggaaggcccttcagtgtttgaattcctgttctccaactgatcaagtctgcaactatcgttgcattgcatcatatgaaagtccatatctggaggctttttccctctgtgttttgcagaagaacaattgccttgacctcaatgctgagatacccagtaaaccgaatgtaatgccactaaccatgttcagagaacaaaaactaagccatgaaatagcggaagatctttttgttggttggttggacagcatggaatggagttggcgagtggcagctggacaaaatccagcatatgatcaattcccatgtcagtaccagttattttacagagggaaagctaaaggttcattttggtatgagccggtttttcaggtcaaaaccctggaaggggagctggtttggaggcgcaggaggtatcgtgtgagaagggctagcactcctggtacattttacttcagtgtgttggataatggtgtcatttccaaagaatattggacaattgttgacgttgcggaggatttcagctggggtctgttccattatcatggcgcagcacaagctgctgggctatcatacactggagcagtgcttgttactccagatgggtcttatcctgacctggaagacccaagattggcctctgctttagagaactgtgctataaagaaatgggagctctatacagtcgataactgctcctgcatgggtgcaccactgggaactcctgagggttcaaagctgcaccatcaaatttctccaggaaaagaaagtagtgttttgcagagaagatgataatctgtaatatgttaaagtgactcccaaatgattatgtcgtacgtacaaagatgtacagccaagtggacatgtattgctgaagagagctcatatgtaacctgcaggccttatttatatttacagcaacagatcacactggttgcagcaatgcagcctgcactgagagttgaagctgagaaagaatggcggggctctacgagaagcagtcggagacgtacgccaagaagcgtccgcagtaccccaaggagtggttctccatgctggccagcctcaccgcggggcaccagcgcgcctgggacgccgggtgtggcaccggccaggccgccatcagcatggcggagcactacgagagcgtggtggcgacggacgtgagcgaggggcagctccggcacgccaccgcgcacccgaaggtgcggtacctccacaccccggagcacctctcggaggacgagctggtgtcgctggtcggcggcgagggctccctggacctggtcgtggtggccacctccatccactggttcgacgtcccgctcttctacgccgtcgtgagccgcgccctgcggaagcccggcggcatgctcgccgtgtggggctacaactacgagatccacccgttcgaggacgcgctgcacggccagctctacccggccctgcggccgtacctggacccgcgggcgggactggccatggagcggtacaggtccctgccgttcccgttcgagcccgtcggggtgggcgccgagggcgcgcccgccgacgtggacatcgaggtggagatgacgctggaggacctggtcgggttcctgaacaccggctctgtcgtgaccacggcgagggccaagggcgtggacctggaggcggtcacgagggccgcgctgaagcgtgtggaggagcagtggggcggcgcgcccaccgtgccgaggaagctcgtgttcaaggcgttcatgctcgccgggaggcccaagtgctgaagtgataatgccgaataagtgtttgcttgtcagtcagcgtgagattgagatgagatcacagactacaatacatcatatagccagccactggattatgtctggcgatctaatgacatctgaagccactacatccaacccaggtagaggtagcaaactgcgtattcctttcatgctgtatgcagaatgaagaagaaatacctatttccattgcctagtgaattcccattagtatttcttctttcactggattatgttgtatgcagaatgaagaagaaatacctattttcattgcctagtgaattcccattagtatttcttctttcactggattatgttgtatgcagaatgaagaagaaatacctattttcattgcctaaaaaataattgttgctcgctcatatttcacgtctaagacataagataggcttgacgtgagagaagtgttggaatataatataagagtgtttggtttgaggaatgaaat

SEQ ID NO: 25379 - DNA, 878 bp, Zea Mays
caggaaatgactgtggctctgaagctgttgttgatgatgatacatctggcatgaagacattgcagtctcaaatactccacaatcctgataggaacggtctcttgcagtttatcagtccttagtttttggtgaagggttgctcgtcacacaatggtgttatattccttgggggaatgctctaacaaactatggctactcatgccaagatgttatgcagagtctggttttataaggaagacaagtgaggagagaatttcgaatcgttagaacaaacactcaagcctggaccaatcctggcagcaactgaaaagagggaaacggaaagtgggtagacgaatccgatgggctgtgcatctgtatggagtcctctgagtttggctactatctgttctacataaggcgcagaaagttggggcttaaaaatgacggcgagcgcgcacgcgatcccgcgggaagggaataaggaaaagcgatgttgacaaagctggatgggaatcctgcgcttttttggaggcgaagatgagaaggaatatatcgcctgtgtcgacctcgccggcctgcttcttctgttccgtggcttggttgtgctcccgctggatcgtgccagccgccagcaggatgatgagcacgtgtgaaccctggcgtgggtatgttgttgtttgctctgggagtgttttgctcagtagtcgttctttgtttatttgtacaaactcgtccatttgtgtcggttgcagaaatacgaaaacacttcaaatggtacgaattggaatttggaaagtacagagtatagaccgctggataagctgtttttattgtttggcgtaatgaactggtgatccatatgttcgccttaaaaaaaaagacctgatggttcaagt

SEQ ID NO: 25380 - DNA, 1795 bp, Zea Mays
cgccagttcaaccccgcacccgcaccccggtgcggcacggatcccaccgggcgcagcgcacgacccacaaagtcagaaagccgctgcccggaaatcgcccgcctccgctccgctacgctctcaccacctcctccgacgtctgatcggcatcgccttcgcctccgctaaaatactcgcggtccacgctctcctccaaatcccatcgccacgccttcgcccgcgcgcgtctctccctcccccacactccgccaccagcgccgaagcagagcagccatggccggttacgagcagcgcgtcgttgccgtcatcatggtcggcggccccaccaaagatccccaacctggcacagatataccttatcgggttctacgacgagcgggaattcgcgctatatgtctcgtctatctccaacgagctcaggatccctgtcaggtacctgcgagaggataagcctcacgggtcagctggagggctctacatctttagagattacatcatggaagacagcccgtcacacatagttctgcttaactgcgacgtctgttctagcttcccccttccagacatgctggaggcccataaaaaatatggaggaatgggtactttactagtcaacaaggtatctgcagagtcagctaaccagtttggcgagttggtagctgatcctgaaacaaacgaactgctgcactatacggaaaagccagagacttttgtgagtgatctcataaattgtggagtatatatatttacccccaatatctttagcgccattgaggatgtcttaaaacagaaaaaagacagagcaaatttgcggcgtgtatctagctttgaagctcttcattcagcaaccaaggctcttccaccagactttgttcggttagatcaagacattttatcccctcgagcaggaaagaaagagctgtacacataccagacacttgatttttgggaacagataaaaaccccagggatgtctttgagatgctctggattatatctttctcggttccgccgtacctctcctcatcttttagcctcaggagatggcaaaagaactgccactattgtaggcgatgtgtatatccatccatctgccaaggtgcatcctacttcaaagattggccccaatgtttctatatcagcaaatgcgcgcgttggagctggtgccaggcttatcaattgcataattctagatggtgttgaaattatggaaaatgcggttgttatacattcaattgtggggtggaagtcatccattggaaaatggtcacgtgtacagggcgaaggtgatcaaaatgccaaacttggcattactattcttggtgaagccgttgatgttgaagatgaagtagtgatagttaacagcatcgtgctcccaaataaaactctcaatgtcagtgtccaagaggagatcatcctataatagccgtcattttttgttttatccctaataaggtctgagtaccaatcacatagtttaagtttattcattctcaccatgtaagcttctattagattgagattattgttttgggtttataccttgcagcatgccactgcacaatcttgacttgctgtgctactttgattagcgagtgtggtgtaaaatgtacgaacaactaacacccgagctgctagcttcagattaaagcaagctgttcaaactgccgcagctgtaatccatagagacaaaacactattgaagacttctagcccacaagtgaaattggaagtataatcaaatcctaatataattgtcataatcatattgttaaactgtataagtgaattgcct

SEQ ID NO: 25381 - DNA, 1158 bp, Zea Mays
gggaagatgggtctgccgtgggggagtccaggtgctagagatgttgacaaagaagatgatatgtttgtcctcattgctccacaaaatgctgttggaaactgcataattgatgatatgagagctatgactgatgctgctggtgatagacctgtgattcttgtaaatcctcgcctaaaggatatgcctgcatcaagtggtgttatgcaaacaatgggaagggatattaggctgaagtatgctgcatcatttgagacatgctattcattccgtcttctctactacgctggttcattctatcctattatgggagctttaaggatggcttatccaaataaatatgagatttatcgaagggttgacactctcaatggaaaagagaactatattcttatagctgaattcacgaacaagccaactcctgatgagatcaccagtgctttcaaaggacaaaaaagggaagaaaaggcatcttctggattctggggtttcttaagtggtttattttaagtcaagcgatctgctgtacggcgatgcaatcctccttgtatatttttatctgataatggatgtaatatggttcggaaaatatccgttcggatcaggattcgaagatggtgaacactggttcagatggaattttcggatatccggacttttttcggataacggatacgaatacgaatattttgttcggatatcgaattcgaatacaatatgtctgatattcgtcggatatcgaatatctggatattttctcggataaatcttctcggatatccggatatcttatctggatagctgtgtgcattttgttgattgtttgtagaaagaaattaataatacacaaatagcctcaaaaattcatgaaaatttatggaggcataccatatgtccacatataatcctccaaaatatttggaccataaaatccacaatattgtagtgtttctttcatttcactttcacttgtgtgaattacatgagaaatcactctaattatccaagttcactttatcattttcatatggagacttgaggttatattcttatagaatgtttattagttttggtaacttatttgcattttaatgattttatacaaaataaattaataacacgcatataggctaaaaattcatgttttttacaaaaaaaaaa

SEQ ID NO: 25382 - DNA, 628 bp, Zea Mays
tggcattctaacttaatcggattcaattctaacatcacacaacagtaaactatgtataagcattttattctcctaaaatctatctctcgacatccaaacttggaataagcatagaaattgtttaattaactttttaagctaattctctaggttaacttgtttagcacaataattaacatggcatcacatcattcgctttagcaagtagaacctcatcatacatcaaagactaccaccagatcataatctttaaatctaaagacctaaagcgtttctttcgcactgaatttttagattacagttgaattaacctattggtcttatttacttccagtccaatttgggcaataacctattttaaaataaaagaacatataaagactatagttatgaccagtgactaatttcaacacatccaattattaaactagctaggaggattagtgaatcgactcactaatactaatttaactcagaagttacgaaaacggcaacgatccctagttcagacgactccccaaacacatagctcgtgtgttcaatcggaagggattgaaccagggcaacacaccatgcaattccaaagggaattaatatacaaacatacacacatgggaatttagatcgc

SEQ ID NO: 25383 - DNA, 1148 bp, Zea Mays
actgcgcattctgggggcattgctgcagattccaacggcctattcttcaatttctcgcgtgcgtttagccccggctgcattcttgccagcaagatacaactttgaaggctatatcccccgtagctgctccagttcgcttcagatctatagccggtcatcgatgttaaatctaccaccatcttcagctctcacggtgtcctcccagctcacctcctctgacgtagcccagcgttcagaggaatggttcgctcttcgcaaggacaagctcaccacaagcaccttcagtaccgccttgggtttctgggctggcaacagaagggcagagctgtggaacgagaaagtttttggcgcgacagagaccaagctggcggacaccgctaggtctgccatggactggggcacgcatcatgagagcgtagccatagagcagtacacgaacatcacaggaagacacgtgggcaccttcggcttcgcggtgcacgccgaggccagctccggatggctcggagcctcgcccgatggagtcctcgggtgcgggctggacggcgggatcctggaagtcaagtgccccttcaacaagggcaagcccgagctcgcgctgccctggcgcgccatgccctactactacatgccgcaggtgcagggcctgatggagatcatgggcagggactgggcggagctctactgctggacgcccagcgggagcagcctgttccgcgtgccgcgggaccgcgcgtactgggagctcctgcacgaggcgctgcgcgacttctggtggggcgacgtggtgcccgcgcgggagctggcgctcctggggaagcacgacgaggcgaggtccttcgagcctcggcccaagcaccggctcacgaacctggtgctgtacaggagcaggaagctggcctccgaggccaagctgctgtggatggatgttggcggccgtgtagagttctttcagtgagacgttctgccggtggttgtactgtgcactgtgttgtgactattctttgaattaactcattgccttccgagtgtcctgttcttttttttgttctgttttttacgagcgtatgatcttccactcacgtcttgtgatcgttttgtgtgtgcatcggatttgatgtatttccattcgctgaaactgtgaaatc

SEQ ID NO: 25384 - DNA, 2989 bp, Zea Mays
cacgacgccacagccgcacccccgcgaaccctagctcgcagtcgcaccgcgcgccggacgctgaccaggtgcctgctctatctcctgcggtggccgtcgcgctgccgccgccagacccgatccgtccgaccgtgccaagcgcccccccctccggcgatcgatgcgaggcgccgcgggaggcggctcgggctcgggcaggctcaagggaaccaatggctgcagcggtggcgatgcgagggggaagcagcgacagcggaggatttgacaaggttcccgggatggactcggggaaatacgtgcgctacaccccggagcaagttgaggtgctcgagcggctctacatcgattgccccaagccaagctcctcacggcgccagcaactgctgcgcgagtgtcctatactctccaacattgagccgaagcagatcaaggtctggttccagaaccgaaggtgccgcgataagcagcggaaggagtcttcgcggcttcaggctgtcaacagaaagctgacggcaatgaacaagcttcttatggaagagaatgagcgtcttcagaagcaagtctctcagttggttcatgaaaatgcgcacatgcggcagcagctgcagaacacttcattggccaatgatacaagctgtgaatcaaatgtcactgcccctccaaacgctataagggatgcaagtaacccttctggactccttgcgattgcggaggagaccttcacagagttcctctcaaaggctactgggacagctattgattgggtccagatgcctgggatgaagcctggtccggattcggttggtattgtggccatttcgcatggttgccgtggcgttgctgcccgcgcctgtggtttggtgaatctagaaccaacaaaagtcatagaaatcttgaaagatcgtccctcttggttccgtgattgtcgaagtctggaagtgtttacaatgtttccagctggaaatgggggaacaattgaacttatctacatgcagatgtacgccccaacaactttagttcctgcacgtgacttttggacgttgcgatacacgacaacaatggaagatggcagccttgtggtctgtgagagatccttgactggttctggaggcggtccaaatgcagcttctgcacagcaatttgttagggctgagatgcttccaagtgggtatttagtgcgcccatgcgaaggtggaggttcgattgtgcatatagtggaccatctagatctcgaggcatggagtgttcctgaagtgcttcgaccactatatgagtcttctagagtagttgctcagaaaatgactactgtggcactgcgccaccttagacaaattgctcaagaaacaagtggagaagtagtgtatgccttgggaaggcaacctgcagttctacggacctttagtcaaagactaagcagggggtttaatgatgccattagtggtttcaacgatgatggttggtctgtaatggggggagatggcattgaagacgttgttgttgcttgcaactcaaccaagaaaattaggaataatagcaatgctgggattacatttggagcgcctggaggcattatttgtgcgaaggcatccatgttactgcagagcgtcccaccggcagtactggtccgatttctgagggagcatagatctgaatgggctgattacaatattgatgcgtatttggcttcatcactgaagaccagtgcgtgctcacttcctgggttgcgacccatgagattttctggggggcagatgatcatgccacttgctcacacagtggagaacgaggagattcttgaagttgtccgccttgaaggacaacctcttactcatgatgaagcccttctttcaagggacatccaccttctccagctttgcactggaatagatgagaaatctgtgggttcctccttccagcttgtgtttgcaccaattgatgagcattttccggatgatgctccattgatttcctctggctttcgtgtcataccacttgatatgaaaacagacagtgttgctactatggcccgtcaatatgtgcgtagtgttgtttctgctgtgcaaagggtgtcgatggctatatctccctcccaatctggtctaaatgctgggcagaggatgctttctggcttccctgaagctgccacacttgctagatgggtttgccagagttatcactaccatctaggtgtggaattactcaatcaatcagatgaagctggtgaagcattgttgaaaatgctctggcatcatccagatgctgttctgtgctgctcttttaaggtaccagaagagttgtactcaagtccgcaatattccaatcttctaaagcagaggcagatccctttgacaagagaaacctatgtttacgtttgcaaacaaggcagggctcgacatgttagaaacatctcttattgcgctgcaagacctgacgctagacaagatcttcgacgagtcaggaaggaaagcaatattctcagatatctcaaaactaatggaacagggctacgcgtacctgccgtcgggcgtgtgcatgtcaggaatgggtcggcatgtctcattcgaccaagctgtagcgtggaaggtgctcggcgaggacagcagcgtccactgcctggcgttctgcttcgtcaactggtccttcgtttgacacgccatcccatggcctgtgtgatgagcaggccaatttttttgtatggtgatcccaatatggggaaaccatcagctgtgacagaaggctttatgttgcatgcactagttgtacgtcttgaatcgagtgtatttatgaagaaattggatactgcgcaaagtctggtgccacttacgtttgactgcctgcccggcaacaggctgtttgtctatctcaccggccaaccgaaacgatgcttattccattcagatgttacttgctgatgttaaggtatggttcaaaccagacagcaacaaaagtcggctgtttccaagtggtggaatggcatagcgacgctaca

SEQ ID NO: 25385 - DNA, 1984 bp, Zea Mays
aaggcaactaagtttgtcaggacacaaaaatgctagggggtctcagtggtcaaccattgtcaggtcctgatattggtggttttgctggaaatgctactccaaaactttttggaagatggatgggtgtgggtgcattgtttccattttcacgtggccatacagaaactggaagcattgaccacgaaccatggtcctttggtaaagagtgtgaggaagtctgtcgccttgcgctactaagacggtaccggctactgccacatatctacactcttttttaccactcacatacaaagggtattccagttgctactccagttttctttgctgatacacaagaccctgaactgaggaaagttgagacttcctttctccttggaccactcttagtttgtgcaagcactttacctaataaaggagctcatgaatatgcacataagttaccgaagggcatatggttgtcttttgattttgcggattcacaccctgatctgccggtgctgtatctacaaggtaaagctgaaggtgttctctttgaagatgcaggagatggatatgcattcacacagggagactatcttttgacatattatattgctgaactccactcatcagtggttactgtcaaaatcttaaaatctgaagggtcatggaagagaccaaaacgaaatctgaaaataaatatattgcttggtggaggtgctatgataagtacagatggtgttgatggtgaagtaatacaccttacaatgccttctgaatctgtagtgtcaagcttagttgcaaccagcgaatttgagcacaagaaacgaatggagatgattcagcctatacctgatatagaagagccatcggggcaggaaggtgctgagctatcaaaaatacctgttgatttgaaaagtggagactggttccttaagattgtaccatggattggaggccgtattatatcgatggcccatattccttctgattcccagtggcttcacagcagaattgagataaatggttatgaagaatacagtggggctgaatataggtctgctggttgcacagaagagtacaaagtcatcaggaggcaccttgaacaatctggagaggaggaatctatttgtatggaaggagacattggtggtggtctggttctccagcgccagatatccattttgaaggacaacccaaagattgttcagatcgactccagcattcaggcaagaagtgtaggagctggttctggtgggttttcaaggttggtctgtttacgagttcatcctacattcaccctgctgcacccaactgaggtagtagttgctttcacggccatcaatggttcaaagcaagagatctccccggaggcaggagaaataacattcgagggagacctcaaacccaacggagaatggatgctagtggacaagtgtgtcgggctgagcttggtgaaccggtttaatcccagggaggttagcaaatgctttgtgcactggggaactggtgatgtgaacatggagctctggtcagaggaaagaccggtgtctaatgagacgccgttgaggatttgccaccagtatgaggtgcagcaaacaacctaaacacctgcccgaagagcagaaataaaaataccaatttggaggatacttcagttgcttgcacttgttttacggtctctgtattgacggtcgcgcaccataacttccatggtattttggagtcgtgtcgttagtcattaccctcttggaggactttgggtctgctgaaaacatggttactcagcaatatctgctactgttcacgactgacattcaaagggttactcagcaatatatggataaaatttgtgttaaagataagttgtgtcgtgtgggttgagttatgtgtgttgtgttgtgctgtaccttcttctatctattaatggaaagatacgtagatctcctgcgtattcgagaaaaaaaactatatggataaaattttatgaaacatcgtaagtgtg

SEQ ID NO: 25386 - DNA, 2720 bp, Zea Mays
cagcgccagcgcggcagagagtcgagaccttctagctaggccgctgccacgtcaaaactagctcctccagacaaccaatcagctagccgaagccggtcgattagcatgcagcagcgctagtagacgtcgtctccgggtctccactctccacacagaaacccatacaaaatccgcatccagaatcaccggagatacgagtccgcgcgtacgttgcagttgaattgtgaagagaggctgtgcgcagtgctgctgctgcttcttcttcttcgacgcatgcacgcacatggatggtgctgctgagtgctgacctccggccgtacgtgatcttcgatctccacacggcggcaagcgatcgagaggcgtggttcccgtggcgtcaaccgacacctagcagctgctagctcatctgcttgatctctagctgagactccgagcaaaatgcagcagccaggaacaacaagctaggccccctcacgcagaccgcacgaccgagcgcgcggcattgaccgacccatcgccgccgccgccgcctcgatcgaccatgacgcttgcgagcacggacaaggtggtgctgggatgcatcgcgttcagcatcttctgggtgctggccgtcttcccctcggtgccgttcatgccggtgggccgcaccgcgggctcgctcctgggcgccatgctcatggtgctcttccgcgtgatgaccccggaggaggcctacaaggccatcgacctcccgatcctgggcctgctcttcggcaccatggtggtcagcatcttcctggagcgcgccgacatgttcaagtacctcggcagcgcgctggcgtggcggagccggggcagcaaggacctgctgttccgcgtctgcctcgtgtccgccgtggccagcgcgctcttcaccaacgacacctgctgcgtggtgctcaccgagttcatcctcaagctggcgcggcagaacaacctgcccccgcagccgttcctgctggccctcgcctccagctccaacatcggctcctccgccacgcccatcggcaacccgcagaacctcgtcatcgccgtgcagagcggcatcaccttcggccagttcctcgtcggcgtcttcccggccatgatcgtcggcgtcgccgccaacacctgcatcctgctctgctacttctggatgtcgcgcgcctcgtccgtcaacgggggcggcgccgacgccgactgcgtcggcgagctcatccgccggagcgatagcctcagccgggccgacactacgctaggcatgagcatgaggagccggagctacaactcggagggcggcgacatccaggtcgccatcaggtccatgcgcgcgtccagcatgtcgcaggagatggtggaggtgtccaccgtctgcgacaggcgcgacgacggcggtgccgggcccagaaaggtcaccaggaccaccagccaccagcgcagcgtcatcatcgaggacgcgcccgaggctgacgccgccgacgacgacgacgatggccacaagggcaaggacggtgacagcgtcaccaacaaggagaagaggtggaaggtgctcgtgtggaagactgccgtgtatctcaccacccttgggatgctggccgcgctcctcatggggctcaacatgtcctggtccgccatcactgctgctcttgtccttctcgcgcttgatttcactgacgcacaggcgtgcctggagaaggtgtcatactctttgctgatcttcttctgcggcatgttcataacggtcgacggcttcaacaggaccggcatacccaatgcgctctgggagctggtcgaaccgcactcgagaatcgacagcgccaaaggcacggcgcttctcgcagtcgtgatcctagtcctttcaaatgtggcctcaaacgttccaactgttcttctgctgggcacaagggtggcagcgtcagcaggcacaatctccccagagtcagagaagaaagcctggctcatactagcatgggtgagcacggtggccggcaacctgaccctcttgggctcggcggcgaacctgatcgtctgcgagcaggcgcggcgggcacagttcttcgggtacaacctcaccttctggagccacctccgcttcggcttgccgtcgacgatcatcatcacggcgatcggcctgctcatcgtcgccagttactgaaccccacacaagctagggtctcggcctcgcacaaacggcggggtgtgtagccagatggcaggcagaacgctgcagaaaacagcatgcagcactgcctgacatcgaaggagatgttgtactgattggcctttgtttgtacgttgtaacagtttttatgtcgttcgtgtaagtctgtacgtttcgcgcaaccgatgccgcaaggcgccgggttgcccatctgctaaggcaaataatgcgcaagactagtagatggcatggagtatagaaggccggcaccactgttctaggaaggcaaaaacttgctctagctagttcaggtaggagagccggcgaaaatgtatggtgtgcttctcgatttggtaatgtcaagggacttgtccttatgtttggagcaaagaaacatggttgtacgattgtgccactagtacacagaagctctataataacggttctagagctatttgtggtgacgtttttcagtaccgtcagtgctaggggttagtggaaatcgatatttccaatggtggctattttggatctgcaagtgaaaatgctattttgactggca

SEQ ID NO: 25387 - DNA, 1210 bp, Zea Mays
ggtcgccacctaaacctaggcgcgccactctccctggcagccgccgtttgttgtcgcgagcgcgttcctgccccgccacagccgaagctcccagcgtcctcctgcaggccgagctgaaggttcagcgcgccggtggagttcgacgacgaaactccgtcacgtcatacctctccgcctcccgtcttccagacgtctccaatcagggctcccagcgtctcggagaagaggagcagcacggcacggcggctgtggcgaggaaggctcctgtcccatcccaacccagttagcagccgcccaaggaggaggagattcaatcggcgtgcgggcgtccgcggtccatccatcgatccaattccaatctgcagggaaaggaatattgtagaacacgttaacaaaattgctccaaggttccaggagggaatcaaggccttctcaggcagcccaattgttggggagatacgcggtctgggactgatacttggaactgaatttgtcgacaacaaatctccaaatgatccatttccagctgaatggggttcattgttttattgatctcatgtccccttttcaaacatttcagaagtaatccaactttaaggcggcccaaaattgttctctgaagagttaacttaatgttatgaattagcgtagcatgtcgaggtgttggttcgatatttggcacggagtgcgagaagcgtgggatgctcatcagggtggctggggacagcatcatgctgtcacccccgctgatcatgactcccaatgaagtcgaagaaatcataagcaaattcggcgatgctctaaaggctacagaggaacggattggagaactgaaatccaggaagaattagccgatgctgctggttgtaacgacgtgttgaagatggctttggtgaaggaaatgtcttgttagcatcaagtaagtggcgacatcacaacccctacaagcttgtgccttaaaacaagaggatacaagaagttggagtgcttttgtgaaggcttttgcgaatcacttaaagcgttagtacttttgtgaatgattttgtaaagtgtttgcaaatatgtgcaaaacataataacatgtgtaggttttgtgaatgattttgttgtggtgtctgttgatggtttatgtatgtggatctatcattgtgcaatactaattaaatttgtatatctatgtgattatgtgtataaaaattggtgatttgtg

SEQ ID NO: 25388 - DNA, 4829 bp, Zea Mays
gtctagagatgagctacgtcttgtctatggtgtttctgagcgtacagaaagcgatggtgcagctaatttaattcagaagttgagagctataaactatgctctgggtgaactaggacagtggtgtgcttacaaggttgcactgtcattcttgacagcactacagaatgatgaaagggccaactatcaggttgatgttaagtttcaagagtcatacttgagaaaggtagttgatttgttacactgccagttgactgaaggggctgcaatgaaaagtgacagtaatgatgttgaaatgcataattctgaaaaccccaagccaaatgaacttgaggagggagagctacctgacagtcatgctgtttctgtaggtgaacatgtagatgaagtcattggtgccgcagtggccgatggaaaagttaccccaagggtgcaagctttgataaaaatacttctcaagtatcagcacactgaggattttcgtgctatcatatttgtagagcgagtggttacagcattagtcctccctaaggtctttgcagaacttccatcgttgggctttatacggtgtgcaagcttgataggtcataacaataaccaggagatgcggtcgtgccaaatgcaggatacaatcacaaaatttcgtgatggccgtgttacactgttagttgcaactagtgttgcagaggaaggacttgatattaggcagtgcaatgttgtcattcgctttgaccttgcaaagactgttttggcctacattcagtctcggggtcgtgctagaaagcctggatctgactacatattgatgcttgaaaggttgaatcaacaggtgccgttgtcagtctgaactctgcagttggactcgtacatttttactgctcacagctgccgagtgacagatactctattcttcgaccggaatttattatgcaaaagcatgagaaaccagggggttcaacagaatattcttgcaaacttcaactcccttgtaatgccccattcgagaaacttgaaggtcctatatgcagttcaatacgcctggcccaacaagctgtttgtttagctgcttgtaagaagctacatgagatgggtgccttcacagatatgcttttacctgacagaggaagtggggaaggagaaaagactgaacaaaatgatgaaggtgatccactgcctggaacagcacgccatagagagttctttcctgaaggggttgctgaaattctacatggagaatggattttatctggaagagatggttaccaaagttcacagtttattaagttatatttgtattctgtgaactgtgtaaacattgggacttcaaaggaccctttcgttacacaactttcaaattttgctcttatttttggcaatgagctggatgcagaggttttatcgacgacgatggatctctttgttgctaggacaataataacaaaggcatctctcgtattccgtggaccaattgaaattacagaaagtcagctgatcctgcttaagagctttcatgttaggctcatgagcattgtacttgatgttgatgttgatccctcaacaactccttgggatccagcaaaagcatacctctttgttcctgtgggagctgagaaatgtatggatcttttaagagagatagattggactctagttaatagcattgtgaattctgatgcctggaacaaccctcttcagagggcacgcccagatgtctatctaggcacgaacgaaaggacacttggaggggataggagggaatatgggttcgggaagttgcgccatggaactgcatttggacagaaagcccaccctacgtatggtatcagaggagccatcgctgaattcgatgttgtcaaagcgtctggattagttcctggtcgtggatggggacattttaatgattatcaaaataaaggcaagttgttcatggcagattcatgttgggatgccaaagatcttgctggaatggttgtaactgccgcccactcaggaaaaaggttctatgtggacagtatttgctataatatgaatgcagaaaattctttccctaggaaagagggctatctgggtcccttggaatacagctcgtttgctgattactacaagcagaagtaagataagttttgagtgctggaagcaaaaggagttctctcttagctctacctccttttgatttccctttttttttggcaaagtagctttatggcagcataccatgatgattcttgtttttcctctcaggtatggtgtggagttagtttataagaaacaacctcttatacgggcacgcggtgtttcatactgcaaaaatctactttctcctagatttgagcattctgaagctagcaatggagagttctcagagaatcttgacaagacatactatgtatatttaccacccgaattgtgccttgtgcatcctctccccggatcacttgttcgtggagctcagaggttaccctcaataatgagaagggtggagagcatgcttcttgcaattcaactgaaggacataattgggtatccagttcctgcaaataagatattagaagccttgactgctgcgtcatgccaggagacattctgctatgaaagagcagagctgctgggtgatgcatacttgaaatgggttgtgagtagattccttttcctaaaatatcctcaaaagcatgagggacagctcacaaggatgcggcagcagatggttagcaacatgatcctgtatcaatacgccctgaataaaaacctccaatcttatatccaagcagatcgatttgctccatcaagatgggcagctccaggagtgttacctgtatttgatgaagaaacgagagattctgaaccatccatctttgatgaggaatttactcctagcagtgagttacaaaagaacttgtatgatgactatgatggcgatagcatgcaagaagacggtgaaattgagggagattctagctgctatcgtgttctatcaagcaaaacattagcagatgttgtggaagcacttattggtgtctattatgtagctggagggaaaattgctacaaaccatctgatgaaatggatcggtattaatgcagagttggatcctcaagagatcccatcttcgaagccatataacatacctgagagcataattaaaagcatcaattttgacacattagagggtgcattgggtatcaagtttcagaataaaggcttacttgttgaagctataacacatgcatcaagaccatcatcaggtgtttcctgttaccagcgcctggaatttgttggtgatgctgtattggaccatctcattacgaagcacttattttttacttatacggacctacctccaggccgcttgactgacttgagagctgcagctgttaataatgagaactttgcaagggttgcagttaaacataagctacatgtacatcttcgccatggatcatctgcattggagacacagattcgagagtttgtgaaggatgtccaggaggagctttcgaaaccaggtttcaattcttttggccttggggattgtaaggctccaaaggttctcggagacatttttgagtctattgctggcgcaatattccttgatagtgggtgtgctacctccgtagtctggaaggtttttcagcctctgcttgatccaatggtgacgccggacacccttccgatgcaccctgtaagggagctccaagagcgctgccagcagcaagccgaaggattagaatacaaagcatcccgtacaggcaatgtagctacagttgaagtcttggttgatggcatacagattggtgtagctcagaacccacagaagaagatggcacaaaagttggcggctagaaatgcacttgttgtcttgaaagagaaggaaaccgcagcaaagaaagacactgaaaaggatggcgagaagaaaaacggttctcagttcactaggcagactctgaacgacatctgcttgagaaggcaatggccgatgccacagtacaggtgtataaacgagggtggccctgcccatgccaaaagatttgtttatgcggtaagggtaaatacatctgacagtggatggactgacgagtgcattggagagccaatgccgagtgtgaaaaaggccaaggactctgcagctgttcttctgctcgagctgctgaatcgaaattaccgtggcaagcctgatggaaaataatctttggtgatgttctgtggtggtaggtagacgtggaagcatccatcattctgattatacccccatgcagtgcttttcagcaaagcaaattaatggcctttgttgatgttcttggtggcggtattggtgatatggaggcattcaatgcaagcataagcagagctatggggagtgggattagaggattattattagttttgtctgaggtgactactaggatgcgcctgcagctgggaactcggggttctctatcttggcctcgccgaccaaatatcacgtacgtcgacgtccgcgaacagtatatatatggtaggcttggcgggcgtgatccccttgcgcatggtacagagcaagacgctgagctggatattctgataatcccgtatactccaacagaaactacagaatggaatcaagttgtacctgcgtttctgctgctcaaaaattgcgagatggaccatggacgtgtgttgtttggcaacaacgacgcaaccagcacggacaagaaggggggacatgcagtctctcgaaacctgtcctatacaattagaaagaaaaaaaagagggaaaataaaaggaaaagaacgcgagggcagggccggccggtcggtcggtgcctgcgccgcacttttgtcatgtgcctagcaca

SEQ ID NO: 25389 - DNA, 4263 bp, Zea Mays
ctcggagcgcatggcagggtgtagatgataaagttatgagcatcagggccgatccatttatctatgaggggcatactttacatgagctacaggtgctcaggcaattcctagctagctattaccactaaggagagaatcagagactgaaaaagcaatggccgatcttgttgttggcttggccaagacagtggtggagggggccctgaccaaggctcagtcagcgattgaggaggagacaaaactgcagcaaagcgtgcagcacaaccttgtgttcatcgctggcgagtttgagatgatgcactccttcctcaatgttgccaatgaggagcgtgtcaagaacaacgttgtgaggacatgggtgaggcagcgccaaatgctgccaccttgcttggcagcatcagcattgcccataaaagaggcagtcactgagatagagcagctcaaggttagggttgaggacgtgagccgaaggaactcacgctacagcctcatcagcgactctggatccaagcccatcatgcagcaacagacggcacccaaaactatttttggcacaatggtgcttgacatgatggttgaggcgagggacaccgcaaaaaggcagcaaggtttaggagatctcacccagctactaacaaaggaacaagctgacctgggggtaatctcagtgtggggaacaggcagtgaactcggtacaacatccatcatcagaaaggcctaccaggacccagaactctgtcaaaaatttgaatgtcgtggctgggtgaagcttacacaacctttcaatcctcatgagtttctccgcagtatggtcgcccagttctacgcaaacagttgcctgcaaaatggaatggttataaatgtcgatgaactgaagaggattgaggaaatggcgacaacgggaggcggactcattggggcatttatggataaagtaaatgagaacagatacctaatcgtcctggaaaatctgtccacaattggagattgggacaccatcggaacttacctgccagacaggaagaatggcagtcgggtcattgtatccacacagcagtgtgaaattgcaagcttgtgcattgggcattcataccaagtagcagaggtgaagcagtactcagcagagcactctgtatgtgtcttcttcgaggagggattgcaaggtaatggtgataaaagcatggaatctgatagagtagtagacaacaacaatgaaatgtcaatgcaggatgaaataacccacggtactggctttctgtccgacagaattccaacatctaaacggaaggatgcctctgattgggtgaagaattttcaacttgttgaacgcaagtcagaaatgaaccaactcggtaactatattgctaaggcacgtgtctatggtttgcaaatactgtctgtgtgggggatagctggtgttgggaaatcagccctcgttaggaacatgtactttgacagaattcatcgaaatgaccaattatttgagaagtacggttgggttgatgtaacccacccattcaatttaagggacttctcccggagtttgcttttggatttccattcagaacctgttcaagccatgggaatcaaagaccctactcaagagtgtcataagattctagaagataaccggtgccttgttgttattgatgatttgcagtccattgaagaatgggacttaatacaagctgccttggtgtctagaccttctagaagtattatcattgtcattacaactgaagcaagtatcgccacatattgtgcagataatgaaggggtcgtatttaatgtcaaaggtctagaagacaaagcagccctcaagcttttcaaaaagcaggtacataggcaaaaaccatcatctcctataaaggactccatagatgaagagctacaagaacttattttgaagtgtggtggtcttccaaaagttatagttgccgtagctaactttttggcacctaaaacagtctcatggatggacagtgcaagttctatgaatctcaaatttatgcaagagctggagagcagcccagagtttgcttgcctgcagccactctttggttggctgcactcctactttcgaacatgcccggattttctcaagccatgtatcttctatctgtcaatttttcctcgagatcacagtatccggagaaggcgattggtgagacggtggattgcagagggctatgccagggacacggacaaaatttctgcagaggaaagaggggagcagttcttctgcaggctcctcgatctgagcataataatgcagaaaccatattcagtcaccaccggattcagagacagcagaatgactttgtgtcaagtcaacagttttgtccgagagtatatcatctctcgtcaaatggaagagaaccttgtatttgaactgggaggcagttgcaccctaacctctcagcgcatggggcgtcacctcatcatactgaaaagctgggacagagacagaattgtgtttgagagcattgacttctcaaggctacgatctttgacagtgtttggagaatggaagccattcttcatatctgataggatgaggttgcttcgggttctggatcttgaggatgcatctgatttaaaagatgaagacctcaaacaaatgatgaagctgctttgtcgcctcaagtatctttccctacgaggatgcactgggatctatagcctgccgaattcattaggttgcttgaggcagcttgagactctggatgtcagacatacagccatagcaaccatgccaaggactatcaccaagctaaagaagttgcagtacctccgcgctagtaccaccaaaccaactaaggaacaaccaacacccgatactgctgttacacccaaaccaacaaagaaacaaccaaatccacacacctcggtatcatggacgtcatccttgttccacagacatcgacaactagagggtgttgtggttcctactgggctagagaaattgactgcattgctcaccatcggtgttgttaatgtcaattctgctcgggggaggtccatcttgaaagaggtcaggaagctcacccaattgcgcaagcttggagtgtctggaataagtaggaacaacagcaaagatttctgtttggccatctcaagtcgtgcgcatttagactccttatcagttaagctcaagaaggacaatcaggactgcttgtgtgtcaccccagatggctaccttccccccaagaacctacagagctttaaattgtatggccttgcagacagttttccaaaatggatcaatcaacttgaaaatctcaggaagttagttttggagatgactatattaacgcaagatactatcaagggactcaaggatcttaaagtatgtattctgcgtctaattaccaagcagcttcctgatggtaagctcaatttttgtgtcatgttgcatgggcagcaattacgttgctatgaaacagtgaagatactcgagatctcttgcagctccagcttagatgtggcttttggatcacaatcactgcaaaatcttgagctgctgaaagtttcctgctgtagtggttcagggtcggtaatgaagctctctgggctagaaaaactgtctgaatctgaactcaaggaagtccagattaagggttccgatgatttcatagtaaaaacagatgtggaggaacaacttgccaggcacccaaagaaacctgttttgaaggttgaaaaggtactgtcgtccactggggattttgagctctagagtgtcagtttcctatcgttacgatatcaaggattagtgactggtgctgtttgcttcctcttatttcttcagtgctattcgatccaatctaaccgattagaaagatcagttatgcagccatcgtgccaataataaactgtgaaacctgaaagcttccttcttggccacatattgatcagtctatttttcttgtgcctgtggtttatttattcctactgcatagtcccagtctggatttgttctaaaagatatggatggtgtgcaaatgtgtttatgtatatagagaatgttggaccagtgaattgctattgtacttttctgttgctctcatgtattgtagtttcgtggtgtatcttgctacatccatgttctcttgtggttgtttgtgtgtacatttgttttgaatggtttttgcgatgttactgttggtgcctttttggggacgccaatcactgcgtgagaaccggcggcggtgccctctgcagaggctcggatggtccgtagccaggggccggacggtccgcgac

SEQ ID NO: 25390 - DNA, 901 bp, Zea Mays
caggcgtcctgttttttgtgcatggtcaaaagccataagcactcctgatgtgaatatttcaactgatgatggtgttcatgatgtaatctatgggataacggatgatcaagctgctgagatccaggctcagggattatctaaggattttgtgcagtgggttaatcaaggagagacattttggtactgatattccaagatgggcgtaccatgtaaattcaagccacataatggttgcacttgcaaaaaggggggaaaataagggagaagtctacatgatggcagtccagacctcatttcaaagcatattaactcttaaagaccattgcaaggagggaccatcaatgtgcatgagattgtttgtcaaccatcagcaattcagcattctcttttcggtatacgaatatgatgatgggcttagagtcacacgcactgttagaagacttgtctagggaagtgtaccattctgttcatttattgaagcttgctcaccaggctggtagatagtgcattgttattattttttcttaaaaggaatgaaagaatgtaggtagtttattctttttaagatgtaccattgtccaggcatgatccccatctctccatcgtgtaaatatatatgtcccaagtgttccacttttcccttttccttccatgagagttgaggtgggcatgaaagcaccatttttccctcagtctctttgtatgggttttctgaaatcatgtacatttatattttgtggcaagcggagagattgttgtgtaatttccattgtaccaaacgtccaaacccctcttaccaatagaagtctcttggactgtttgtcacattgcagattgctttaatacttgctttaaactatctgattatgtgtaaaattttcgtgtgattccttagggtccc

SEQ ID NO: 25391 - DNA, 1081 bp, Zea Mays
tcagattcagatacgtacagtacagtagccgccaatgctgtgtccatgcatgcatcatgttctcgtatataatcgttccagtacagctcggcgcactcggtgctggaggtgagcgaggcggaccacggcgcgtgctcggcgagcaacccgctgcggtcgcaccagggccagagcaccaccatcccgctcaccaaggccggcacccgctacttcatctgcggcgcccccggccactgcgcctcgggcatgaaggtcgccatcaccgtctccggcggcggcggcggcggcagcagcagcgccgacaacaccgcgactccgtcgggtccctccgtgcgggcgacgaacacgaagccggcgtccggtggcgcgacgacgacggacgagtcggactccagcgcggctggcagcggcgcccgcctcgcgatgggcctgctgttcggggccgcgggcctcgctgcaataatgggctgaattgaggacccgctagggaaaaggcagtgcggtttcacgaatttcctatttagtttcctgcgttctctgcttgcgtccccgagtcgcgaggctgagtgttcggccgtgcatatttttcgtatacttttgctgtgtttttttggggctattcgttgttcaatactgttgtttcagaataaaatttcatccttgaccattccatgcaactgtttgacagtggacctgcgagggaagagccttttctcactcgtatttaaacggccgtcgtggaccttgacgtcgtcccaagccactcgactcgacgacgacatcatgtggcaaacagaggactcgaacggcccacggcaaagtatcaatgaatcatctgtcttttttttttccttttccttgtctactgatgttgtgggtggaacaagtactcaaagacagtgcaattcaatggggtcatgcagcgcctagccgtggttattctattggactcgggaagttttgcatcttttgtcagtcaaacaatggttgcccgtttatctagggctggacattcggggtttttttgaaactttggttcggtttttcggttttaaaaaacttcggttttctagacattaga

SEQ ID NO: 25392 - DNA, 1225 bp, Zea Mays
aggagaagaggcggcggcggagggccgcccttgaggatggcggagagggcgagggcgaggccggtcccccgcgcgacgtcatcgacgtgctcataagcggcggcgacgagctcaccgacgagctcatatccgacaacatgatcgacctgatgatccccgccgaggactctgtgcccgtgctcatcacgctcgccgtcaagtatctcagcgagtgcccgcttgctctgcaacaacttgaggaggagaacatgcagctgaagaggcggaaaaccgacgtgggagagaccttgcagtggacggactacatgtcactgtcgttcacacaacatgtgataacggagacactgcggatggggaatatcatcaacgggatcatgcgcaaagcggtgcgggacgtggaggtgaaggggcacctcatccccaagggctggtgcgtgttcgtgtacttccggtcggtccacctcgacgacaagcgctacgacgagccctacaggttcaacccgtggaggtggaaggagaaggacacgagcaccatgggcttcaccccttttggcggtgggcagaggctgtgcccaggcctggatctggccaggctggaagcttccatctttctccatcacctggtgaccagcttcaggtgggtggcggaggaggaccacatcgtcaacttcccaaccgtgcggctcaagcgaggcatgcccgtcaggctcaccagcaaagactagctagctagtcactacgacctgcttgtgcatgccatgcatgcagatttcagtcacgtcatatgcaatatatattggaccctggaggttgcacgtgtacagaagagaggatgcaggagctagcagatgatcggaggtatttaggcagactgaaattgaatcgaccgcgaagagtagcacactactataccacgagtatgatctgtagtagtagtaataagaggaatataatatcattagtgtggtagtatttacttattatactactctctcttttcgtttttatttatcgtgttttagtttaaaaatgaactagcgaggttagtcaataggcgtgcatgcatggcccatcatggtcatggatatataggccttgatggttatactagtataagcagtagtgttatgtcacaagggattactgggatctgggatgatgatccacaatcccatctaaaacgaaaagagttaataaagattgttaagtttactgctgggagcct

SEQ ID NO: 25393 - DNA, 929 bp, Zea Mays
cgcaccggtagatccaagtccagagcatgcgtccaaaaggcagagctccttgccctattgcacgcacagtatgggtgacattgtgatctaaattttacgctataaaatttaaaaatcagattagattaggatcgaacttattttgtaaagaattatttggatcatgatccattagcatcagacacaggtgccagaactgctgtcgtccagcgcaatgcgcacgcaactaaaccttgttgcacctgttctctcttctccgtggcgttgctgcagcagtcgctccctttgtcgtgcgtggtcctggcctgggtgtttccgtttcatccatccatgatccatggacgcgagctgtcctactgatttgcttacatgcacacgatggcagaggaatgccgtccgcagctgtcggcccaaaccaaaacaacccttgctaaatctgctactcgccaatccaccatggcatcggctcgctctcgccctgctccgggacacggcgcggcgatcgccgtcagtcccacgtgaaggccacgcggccagggcggtcgacgacggcgcgctagcccgcggcggaaggggacaccgcgggcacacgccagggcgctcgattcgtgcggcggagccgcctccgatccgtcgccgcaggctgcagctgcacgccaacgggccgcgtgccggccacagggctgcgcgcggacaaaccgggccttaaatgcccgctttggcgccgcgcgcccacgtcgcgttcgcgttcttgccccgcggacccagtgaaatatatttctgtaacctcctaccttatcacagtttgatccttaaccttttctacctcatatgacagtttgacttttaattatgttatcagtaacttgcgaagtatagaaatattgtagtataatttctatactatacttcctctgttcaatgtcgct

SEQ ID NO: 25394 - DNA, 620 bp, Zea Mays
atgaccttgcctgcagaatcaattacagaacagaaatcttatcactttctcgaagccgacagcgtcatatccgaaagcactaagctatacaacgcgacgagcttcaacgagtacgtgctggaggggagcgcgccggtgctcccggagacgcagcggctgttcaagaagctcgtctcgctgggcatcaagccggtgttcctgacgggccgcaccgaggaccagagggccatcaccgtcaccaacctccgccgccaggggtactccggctggatgacgctgctgctcaagcccgtcggcctcaaggccaccgccatcgcctacaagtccggcgagcgccagaagctccaggacgccggcgatgccaacggcgcggcgcggctctccatcagcccatccatcaacccgtcacccggctccagtgcctgtgctcaactactctttgtttgttacccctcacttcttatcatcattaattcctaaggttaattccctgagctgagtggaaataaggccgactcggtggagagctgtcgacttctcaataaataattgctcatgaaaaccacgatggtttatgttattcaaagtcttatatatatataatggattagtaccgggaa

SEQ ID NO: 25395 - DNA, 2313 bp, Zea Mays
atcactcaaataaataatatgaatctgagctatactacgagaacttctggattcagcaagaactagcagcaatcagaacccaatagcatagcaacaaaccgaacaatcaaccatatattaggagacggtagatagaaccacgttaacattaagggggtgtttgaatgcactgaaactaattgttagttggctaaaaattgttagttgaattagctagctaacaaataactacctcactattaactaattttccaaaaatagctaatagttcaactattagctatggtgtttggatgttttaactaattttagccactaactattagttttagtgcattcaaacacctcctaagtaagaaacggtagatagccagtacctgcaggcaaatattaggagacaactgaaagacagaacataatgagcacaggctttaatttcaaacatcaaacttattcatgatttgtcatagttctgggtagtacgcacacacaacacaaccggtccattattaaaccaacactgacacgactcatgacacgaacagcagatactttgacaacctccatatggagagagggcaccagacgacgcaggcacatcggcagcttaaacgacccatgacttactgaccaccacggagacggagcacaaggtggagggtgctctccttttggatgttgtagtctgctagggtgcggccatcctccagctgtttgccggcgaagatcagacgctgctggtccggggggatgccctccttgtcctggatcttcgccttcacattgtcgatggtgtccgagctctcaacctccagggttatggtttttccagtcagggtctttacaaagatctgcataccacctctgaggcggagaacaaggtgaagggtgctctccttctggatgttgtagtccgcgagagtgcggccatcctccagctgcttgcccgcaaagatcagacgctgctggtctgggggaatgccctccttgtcctggatcttggccttcacattgtcaatggtgtcagagctctccacctccaaggtgatggtcttgccagtcaatgtcttcacaaaaatctgcatgccacccctgaggcggagcaccaggtggagagtgctctccttctggatgttgtaatccgccagggtgcggccatcctccagctgcttgccggcgaagatgaggcgctgctggtcgggtgggatgccctccttgtcctggatcttggccttgacattgtcaatggtatccgaagactccacctcaagggtgattgtcttgccagtgagtgtcttcacaaagatctgcataccacccctgagacggagcaccaggtggagggtgctctccttctggatgttgtaatccgcaagggtgcggccatcctccagctgcttgccagcgaagatcaaacgctgctggtccggtgggatgccctccttgtcctggatcttggccttgacattgtcgatggtgtctgaagactccacctcgagggtgatagtcttgccggtcagggtcttcacgaagatctgcatgcctcccctgaggcgcagcaccaagtggagggtgctctccttctggatgttgtagtcggcaagcgtgcgcccgtcctcaagctgctttccagcaaagatgagccgctgctggtctgggggaatgccctccttgtcctggatcttggccttgacgttgtcgatggtgtctgaagactccacctcgagggtgatagtcttgccggtcagggtcttcacgaagatctgcatgcctcccctgaggcgcagcaccaagtggagggtgctctccttctggatgttgtagtcggcaagcgtgcgcccgtcctcaagctgcttcccagcaaagatgagccgctgctggtctggagggatgccctccttgtcctggatcttggccttgacgttgtcaatggtgtcagaggactccacctcgagggtgatagtcttgccggtcagggttttcacaaagatctgcatgcctcccctgagacggagcacaaggtggagggtgctctccttctggatgttgtagtcagcaagcgtgcgcccgtcctcaagctgtttgccagcaaagatgagccgctgctggtctggggggatgccctccttgtcctggatcttggccttaacgttgtcaatggtgtcagacgactccacctcgagggtgatagtcttgccagtcagggttttcacaaagatctgcatcttgaagcggaggtgccgacgggtggatttgggggagatctggttgtgtgtgtgtgcgctccgaacaacacgaggttggggaaagagg

SEQ ID NO: 25396 - DNA, 2117 bp, Zea Mays
actgacagcctgccgccggctctggtctgctacggttgatcacagtcgcgagcggcgagagtgacagtgcgaacaggctcgtcagccaacaggaagcaagtgcacactcccaccccactcccgcgcgccgcgcccgcgaccggggcggcggggccggtggtggtggaggcggcggccatggcggagctgcggcactcgatggcggtgcgctcgtccaactcccccgccaagcgcgattccgacacctccgcggcgtcgtcccccttcctcctgtccccctccacccgcggcagccgcggcggcggcggcggggacgacgacggcaaggacgcccaccgctcgtcccctctcctctcgcatcaccaccacaagcgtgtccacctgctgacgtccccgttccgctccctcctcgcactcgaggaccccaggtcctccgccgcctcgacctcctacaggatcctgcttgttctcctcgcgctccttctcgccgctgtgattttctgcgcgcccttgttctggtcccgcctcaacactccgttcttgtgccacaaggaggggatcacgctccactgccctgagacgaaggaacccccatctctatgggaaaatccacgtgctgccacgatgtcctggaagccctgtgcagagcgatgcagcaatgagccctcagatatgtaatgctgttgcgattgctaaaataatgagagcaacacttattctacctgttctgaagcaggaccaaatttggaaagaccagtcaaaattcgaagacatctttgatgttgatcattttataaattatttgaaggatgatgtacggattgtccgagatatccctgactggttcacagagaaggatgagctgtttactagtataaagcgtactgtgaagaacatcccaaagtatgcttcagcacagttttatattgataatgtacttccaaggatcaaagagaaaaggataatgtctatcaagccatttgtggacagattggggtatgataatgtaccaacagagattaaccggctgagatgcagagttaactatcatgcattaaagttcctacctgatattgaggaaatggctgttaagcttgctgcaagaatgaggaacaaaactggcagcataaatccatacatggctcttcacctgagatttgaaaaagggatggtggggctttctttctgtgattttgccggcacacgggaggagaaggcaatgatggcggcttataggcagaaagaatggccaaggcgcttcaagaatggatcccatctatggccactggcgctgcagaagagaaaagaagggcggtgccctcttgagcccggtgagatcgctgtgatcctgcgggcactggggtacacgagcggcacacagatatacgtcgcgtccgggcaagtgtacggcggcaagaaccggatggctcccctcaggaacatgttccccaacctggtgacgaaggaggagctagcgagcgcggaggagctggcgccgttccggcggcacgtgacgagcctggcggcgctggacttcctggtgtgcctgcggtcggacgcgttcgtgatgacgcacggcggcaacttcgccaaactcatcatcggggcgcgccgctacgcggggcaccgcctcaagtcggtgaagcccgacaagggcctcatgtccaagtccctgggcgaccccgacatgggctgggcctccttcacggaggacgtcgtcgtcacgcaccgcacgaggacgggcctccccgagcccaccttccccggctacgatctctgggagaacccgctgacaccctgcatgtgcagggcatgagacgggccatccctcagatcagagtggccgtctggccgagtcctcgtcttcgctaggctacgactacgagtagtctcgtgctcacttccatcagcgcgcatttcagcgagcatatgcttctactagttaaacacctagatttgtatgtatttggctggcctaatctgtagtttcacatagatcacttcatgctgaaaatgtcttggacaaggcagtgaatgaagataacatcagtaacgacctgcttttccaaagctcctcttggatttaccaagctgagccaagaaatggctaacctgag

SEQ ID NO: 25397 - DNA, 130 bp, Zea Mays
ctgaacttctcggatatgaagactggatcttcgaccctcatcgtagataacaagtgaaactaaagttgctaaaatgaaactagtgtaggacaagtgaatgctctagatcaggcaaatctagattcagaaa

SEQ ID NO: 25398 - DNA, 164 bp, Zea Mays
ccagccagcccaagcccgacacggagcggtggggcccgccccgcttccgttctcgccggaagccgggatccttcccgttctccgcccgctcgtccgtccgtccgtccgtctgcccgctgctataaatacacggctcgtcaccctccccgctcccgttcgttgcc

SEQ ID NO: 25399 - DNA, 3720 bp, Zea Mays
atctactcccaccttttttttcctagctacacatatgctctaatctttagagttggctatctctagcagtcttcttatgccactccttatcttacttttattttaaattttactctataaatattatctatttttttggatcagttattcgaattcgtagagacaaaacacttctaaggtaggtaagggttaaagccaaaacagactcaggaggccgtggagatagcctattgtctgccgaatcttctttctgtcttcatggcagtgccggacatagttgcagttggaacttctacggaggaacacacacagtgccggtgcgaatcaatggtggtttcatgacctcttgattcgcttcgtctacctccgtgccccggtgtagtagcctcgtcggatccttcgccaggtcttcctcgggccctgcgccggcgaggagcgcctactaggattcaagatgggggttcaccgtaggaattattcagatgatgaattttcagttgctggcgagaggccagaagtagaattcatggacttccagaacgacgacacctttcaggattattcatgtgaagatacccctgtgcttgtctcagctcctttccctttcgaggatggaaaaccaaaatctgcacttgtcggagaaacatcagctgataccatacagattgagaatacctctcctgaatctgtaaatctgtggagtgtaagaattttctcttcgaacccagaagacagctatgttctatcaatgatgagaccaccgtcagatgatgctaatgaggaggaaaagcatgcttttcttgctttgacgtccgtggaagaccgtacacttctgcctggacaaacccttacagtttggctgtcttgtacgccaaaagatattggcctgcatacatcaatcgtgcatgttgatatcggtgatgagaagattgagcgtgtggcttttcttttggcagatgacaatgtctcccaggccttattttctgataagccttattccaggagacgtgaccaagttaagaaatttgggccttctccaactgtgccaggtcgtcgtccaactaagcagcacgttcaaggattcaaacataggcttcctcagtatgcaatacctgcgcacatccgtgagctcattgaaagtaaacagaaacctgatgtcttatatgatgagttgagcatggtaaactatgcagaatatttcagcactcttctagtcatggaagagctcaatttggaggaggagatgagaacatatgacatggagggtgtcttaatgagaaggaggggtatgcattttttgtctcttgaggtccctggtttggcagaaaaaaggccatcactagtccaaggagacttcgtagttgctagatatgctgggaatcatgctcaggcttaccaaggtttcattcacagggttgaagctgatgagatatttttacaatttgaccatcagtttcacatgaatcatcatgatagaaaccggtaccatgttagcttcacatataacagagtgaacatgagaaggctttacaagtcaattgacgatgcaaaatatttgggacctggcattttgtttcctcgccaatcaccttgtagagttttgaaaaggtggccgtttaatcctctgaatccacatataaatactgagcaagctgatgctgttgcaatggtacttgcctgcagaggaggttcaccatatgtgatatatggacctccaggaactggcaagaccatgaccattgtagaagccgttttgcagctttacacgggaaagaagagggcaaatattctcatttgtgctgcttccaatactgcagctgatcatgtactggaaaagctccttcaagctagctatctgatccggccaagtgatatctttaggctaaatgctcagagtcgccaatacgaggatgtcagtactgattttatcaagttttgcttctttcaagatcgggtgttcatgtgccctcccttacaagcattggtgcggtacaggatagtcatatcgacctattcgagttcctatcagctgcaggctgagggcattcgccaagggcatttcacacacattttcctggatgaggctggccaagcctctgaaccagaggcgatggttcctttgtcggggctgtgtggaagagacactgtggttgtgttagcaggagatccaaagcaattaggtccggtggtttactgtaagcaagcagagaaggatggtctggggacatcatatctggaaaggctgctgactgacttcgagccgtacggaacaaggaatcctaactacgtgacaaaactggtgaggaattaccgctgccatcctgcaatcctggagctaccatcagagcttttctatgagggtgaactgattccctgtaaagaaggagagtcatctgcttatgattgcataggccttcctgacaagtccttccctgttcttttcatcggaattcaaggatgcgatgagagggaaggcgccaacccatcatggttcaacaggatcgaggttagcaaagtggtctctatcatcaggaacctgacaaggggcggggacgttgatgcatctgatataggagtaatcactccgtaccgccagcaagtcgccaagataaagaaagccctagaggcattcgaaatgcccggcctgaaggtcgggagcgtcgaacagttccagggccaagagagggaggtgataatcatctccacagtccggtcgaccgtaaagcacaacgagttcgacaggtttttcaacctggggttcttgagcaaccataaaaggttcaacgtttctatcacccgcgcgaaatcgttgctcgtcatcgtcggaaacccttacattatcaccaaggaccgtcactgggataggctcctgcgatactgcgctgacaatggctcttatcaaggatgcccccttccaccaccggaatctcatgcttattcagacggtaccagattcttctccgagcatgacgacgggcatcaagctggaccttctgggcaggacgactactacaaccaagaagccacctactgcagctacaacaaccaagagccttctgacttcggtttcaggcttggcagtggtgctgaacctgcttcggagaaccaagagttaccgtccgaggagctgcctgaggacgagaagcagccattattcagcaacccccaagcggatctcgaggagacgccgaagcaggacgtcgtcgaggaaggggctgcacagggaggcgtgctggccgacccgacatcgtcgacaaccgccgacgatcagctccagggtgcatatgcggagaagtacagcttccctcctggctggtgcgacgtttcgagcatcccggcgcaaggctggggcgactgatcgtcagacctgcgatcgccattggtagggggggtcattggcagaataattgaggccgatgaccttgtgaacccagcaccctcatcggtgtgtccctttcgttccgtcaagccttcgttcatttctcactgctggacagtttgttgcagcgagtgaactgtggcgtccatgtgtttaggacaggccatcgtgtgtgactgatgctggcaacacgaaacgtacgtgcaatgtggcgtggttattttgcgggtgccatatattgagcgtgtgctcatggtttaaaaagatatactccctccgttacgtttttagttcaaaaatacacacaacagcaaaaccgaatactcccgtcggccataata

SEQ ID NO: 25400 - DNA, 643 bp, Zea Mays
ggctccacgccactaggaggacttatcctgttcttgtcatccacgccgatgccacgaggcatcaagactcatccacgcgaccaaccgaccacgccggagctggacgcatccatgccgccacccgccatcgcctccagcctctaggcgatcaggcagccatccacgccgccgccacccaccatttaccaatttggttgtattgtctccttgatggcctgattaacatctctgtcttcaggagaatagacgttcattatctgtatctattatttggtctgttgtgatcaatcaaaattgatgactcacaaagaagttcagcatcgataaatctcatcgtcattgtcgtcattatcatttaataactgatgaatttgctcgcctggcttcttatgagtaggcctgaaggatgaggaagggggctgcatcctcagaggcaatggatttcatatgtgacgcagagtggcaggttgatcaatgtcatgatggccaaggcgcaccctgctggcaaagtgtaccacatgagggccaagcgacaaatggctcaaagccttggtcagatactcagattgctaagttcaaacgtcgatatgagcaagaagaagaggaaagcaaagacagggacggttacttgttcacttgctgt

SEQ ID NO: 25401 - DNA, 1876 bp, Zea Mays
tgaacatgatgccttgtcagctgtccttatcaaaaaatgctggaaaaggcatgatgatgcagtcaggcacaggcatcgatgaagaatgtggttacatcgaaccgcagaaaggaactgctccagtggcatcatgtggatctctggaccaactatcagcttccaaattgagtaaagagaaaggtggcatttcatccgaacgcaacacactttcatggcacctcggacaatgcagcaaagaatatgtatcctgtgccaccactggcctttacagagaatgcttatagacagctaaatctgttccccgaagctaattctaggttgcagcagaatgggatcaccaatgataatgctacagaagatggttctgagcaagatttgcagatgcatcctttactgtttcattatcctcgagatgtggtttcgtcatatagtcatccggttcaaaatcttattaatcagtcaagaaaatatgatcttttcccctttgagaaagttcaagttgagagaagtaacaaccagactacaggttccaccaaaaatggtactgtaaatgctaacactatcgacttccatcctctcttgcaaagaacagaagttgatgtgcataatgatgtaccagaatatgatagtaaccttgattaccatcagtctgataataacatgagcaaagttccagtagatgaccagtcaacggctgggcaagcatccacaggcccttctgagagggagacaagtattgacttgaacattcatttatgttctccaacggtcataaaagattcaaatgacttcagaagtagttttagcagatcaaatgttcaagatgaagtttctaggaaggacaaatctagtgttccagggctcgagattgtaaattcctattttcatcattgcattcaagaacctaatgaagaatcaatgcaaggaattgtaatggagcaagaagaattaagtgattctgaggaagatagccagcatgttgagtttgaatgtgaggaaatggatgattctgaagaggagcaagttcagggtccagaagcctctccaattcaaaataagggtatctcagcatcagttgtttgtggggaatttcatgttagcaatgaccagagtcaaatccagcaaggatctgttcaaaaggataaacagggtgcaagctcgatgcagaaaacgcaagttccttctcggtcagtgagggctaagctgaagccagaaactgcaaagcgcacaggatctaggacgtccacttctcgcacagttgaaactagccggagcaaaaccagaagttctaaagtgccacagggacagtcgagtgctgaatggaagtccaatgattcgagaagaactagaaaaattccggccccaagatgaaggccaatttagcattttattcctgtgctgcatgtgccataggcagagtggctaagttcagtctgttgtcactgcgttgttgggttgattatcatcaacgtctattcagcgcatgctggagaaagcaaccaagcgaacgtctgtggtcatttagctcgaattgtcatgtgaaaatagcagtgggagcaatgtaccaaatatatgaatttctccagttagatagatgagacgaattcataatgttgttggtgactgagtaaagcattcccatgaatagatgagacgaattcctcgggagttttgtacgacgtcctcaaaggttatttgtaatgtgccttgtaatttcaaccaccaaccaggttagttgctgtatgcgcattcgttttgtgtactgggtagagaaatgaatccgggatacatcaactaacctggattcttaactgatcgttaatacatgtggcactagcaactcctgcaatagctgaatgaatgttgttcatgcctt

SEQ ID NO: 25402 - DNA, 828 bp, Zea Mays
tactggaatgccaaagaaaaaaaaaagcaggaatgatgcctaagagccaagcaagcccggagcagatcgaaacgtacctgaaccaagagagatcgaagaggcgagacatgctgcagaaattcttggaccagtgccgcgagattcaggttaccgttgacgtctacctcatcgaaagtgatcagattgctaacgcgatcatcgagcttgttcctgttcttcgcataagtcaactggtactaggcgtctcaaagtcaaatgtgcgaaaggaaccacgatagcaggacaggtacacaagggcgcacctctctactgcgaagtcaagatcatctgcgacggcaaagaggtgacgactgctgacccaacgccaccgctgtcaccttcccctgttaacaacaacagcagcagcagcagatccaacaacccgacaccaccgtcgtctacgccgaatcatgatacaacagctgcaaacggtgacaggaaagacagagaaagaaggaaaatcacaaagttcctgagatgtttctcgctatgaatttgtgcccacattcctgcttcattaatttaccttctcagagctagcacatttgtatgcatcgtgattgggcatcgtaattttgtgatcaacatttttactaatgtttttgttacacgaagttcttggtttcttgtgtagacaaatgagattttcatgtatgtgcggaaacactttagcatttttttcagttttgttgttgttgttgttagaagtcaaacttgagatgttttggcactccaataaagttggattgagtcttcttcatatcttctatttcttcaatctctgacttc

SEQ ID NO: 25403 - DNA, 2564 bp, Zea Mays
tgccgccatccatcctttttcccttcctcccctcaccccctcgtcggaatcggaacggctgtcgtctgccccttcgcccccctcttcgatccctcaccccacccagtgctagctagctagctagcttctagtggctagtagctcccctcccctgtgggctgcaacctggtttgggttcgcggatcgatcgcgagatcaatcaatccatggcgcggaccaactgggtggccgataagatgctcgacgtctacatctatgactacctggtgaagcgcaacctgcaggccaccgccaaggccttcatcgccgagggcaaggtcgccaccgaccccgtcgccatcgacgcccccggcggcttcctcttcgagtggtggtccatcttctgggacatcttccattcgtccaccgccaaagcctcatccacatccactgccgccgccttcatcgaccacaccgccaagcaacagcagccaatcggcgccgggaccggggcgcctcctcctcatccccttcacgattccagagagcaccagatgaggctccagcagctgctgcaccaacacaacccccacctccacactacaagagatgcttctcctcccgcctctatcaatgccctcaactccgatgtctccgctgtcctcgcgtccaaaatgatgcaagaccgagtcaggaaccccaaccctattgactccgacgcctcacagcatctcctagacgcaaacaggatcgcgcttctaaagtcaccaccacctagccacactgggcctatgcctatgcagcagcagcttcatccaaggaaccagcaacttgacatcaagcccgatgttggtatgccacagagaacgatgcctgcagacccttcttccatgtatgcatcagggatgatgcacccaaaacctgcattacttgccactggactaaatcaaggtggtgttgggagtgtgccacttaaaggttggcctttaacggtcccaggtattgaccaactccggtccaatttaggtgtgcagaagcaattggtgccatcttcaaaccagttccaacttttatcgccacaacaacagttgcttgctcaggcacaaacacagaatgaccttaccagaatgggttctccagcaccatctgcttcgccgaatgttcgaccagatgacccggattatttgatgaagtactgtattagtgctgccattgactctacaaagtatttgcaatgctttagttgaagatggcccagatgcagcagtcctcaggccacaggcctatggaattgcaacagccgcatcagcagaacactagaaagcggaagccaacttcttccggagcagctaatagttctggcacaggaaatactgtcgggccttctcctccgtcaactccatccactcatacccctggtggtggagtaccagtggctagcaatgttaatattttacagaagagttcaatgatttgtggtgtggatgcaactggtggacttgcctcatcctcaaaccagatggatgctttggatagttttgttgattttgatgaaaacgtcgactcttttttgtcgaatgatgatgtagacggaagaggcatgtttgcagcacttgaaaaagggtcttcagagcacaatacagagtccttaaagggtctctctttgagtgaagttggtaacaaccgtacaagtaacaacaaagttgtttgctgtcacttctcttcagatgggaagttactcgctagtgccggccatgagaagaaggtcttcctctggaatatggacaattttaagatggataccaaaatagaagaccatacaaactttatcacagacataagattcagaactaattcaactcagttggctacatcatcttctgacggaactgttcgactttggaatgctgctgatgaaagtggcgctttacaaacttttcatgggcataggtctcatgtaacatcagtagattttcacccaagattgacagaggttctttgctcttgcgacgacaatggagaaattctcttctggacagttggtcagactacatctactcatgttttgcgggtgaagcagggtggaactggaagagtcaggtttgaacctcgaagtgggcagctcctcgctgtggcagctggaagcatggtgaacatttttgatgttgaaaagcaatccagcttaccctgccctccaaagggtcacaatagtgaggtaaactttgtgtcctgggatgaaaatggtgaatatctggcatctgtaagtcaggacactgtgaaagtgtggtcggtatcgtctggtgtgtgcattcatgagttacgatccaatggaaaccaatatcagtcatgcacattccatcctagatacccgaaagtgttgattgttggtggttatcagactctggagctgtggagcttatcagataaccagagaatcccaatccaggcgcacgaagggttgatagctgcactggcgcactccccgttcactggaatgattgcctctgccagtcatgacagatgtgtaaagctctggaagtagctatatatagagggacaatagtgtaagctccatcgagtagaca

SEQ ID NO: 25404 - DNA, 4141 bp, Zea Mays
gaggcaagcacgcgcgtgacgaccacccctgaacccgtcagcgacaccgtcaaagatctgaaagcaagttgcagtttggcactccggcgacgccatgaaggggggtttaaagaaatgcgggcccctctgttctgaggtcaggcgacgggtgcggtcgccatcgccggggggcgatgccgcgtccgcgtgcgcgccggcggcagaatccgcccttgcgcctggacaggagctattgggcctacggctgctgcaaagattggcgagacacaggcagccagggatgtatctggacggactgacgacggagatctcggttgattgtcctggtcaaacactctttgtttctgtaaatggaagttggataggaaacacaaaggccctttttggtggttgatccctgatcggaggggattggattcattggggaaaaaacaaggtttgtttggtgatcagagaattgaagtgggaaaattctcttgctattcaattatctggtaagaagatttcttcacatggatcccctccaattttctggtcattcagttggtttagagaaaaggtagagaaggtacagtttttgccgtgttaactagccagtaaattcgtgtttgactgctgcagctagaggagcatgacgaaacacaacctttttttccagatgttttgttttttgattggatgggaaaaaaattcgtttgtgagatttgcagtttcgcaagaaattcgaaaaggaaccgttgtcaggatcagcagaagcttccaaagcaacactttttttcctgtaaaaactatgtcaacaattaaacatgacgagaggagccagtttaccttaccagtaatacagagacatgatttggcgagaggtccatgttagggaagggaggctccaaaccggcgcttttcagccttgcgtcagtgttttatatatatgattcaaatatgtcgctgtaatgccgagtaaatctatgggcacttattagactggccatccacttcctccaattgctgcatcatgttagatgctgtcagtgtcaaaacacctaggaccaagctgctgcaaattaatccttggactaggaattctgagacgtgttgttgaattcaagcagtgtactgcttttctgttcatacatacacctaatataggccgcttgtgcgtgttcattggcgcgaaagtggccaaattcttcactggccgatttttccactgatgagacaaaatgaggagaacggaatctttgcctccgatgaagggaaagatacctgccatcactttgtttagtcccagctagctagtgccacactcaactagtacatgtcttctgtgcttgaactcttctgccaggcactatttttgtaaggttatttggtgctttaggtgggattctattttatattatctcatatgtttcattgcttctgttgcttgaatttcaagcgattgtccttagtagccctgctactgcaacactactaaagacagcttcttgtgactcccgttatcaatctggtcaatcgttgcaccaggagaggggagggtgagctgagaggggtttcatggagatggagggcagaggcctgtctgatttgttcaggaacaccagcgaggagatcttcctcaaggcagtgatggagaactcgatgggagtagcagcagcgccaagcatggagatgctggggttcaagaacacgtcgcgaagtctcagagaagacagcgaggagctgttcaacaactggcttatgaatggagagatccctggatttgggtcagtgaacaatcaccctcgacaaccatctaggttgtcatcagaagccgcaggccttccgaatcaacagcatgacattgctcaacaaagttttctcactgacaacttggttccacagaatttaacaattccttctgtcgaatatccaaataaccacaaccagcaatcactcaaaaatgcagcagagaagggaatgcaagccagtgacctacttctagcaaaagcctggttccacagcactcaaccaatgactagaagtcgttcgtcagagttaaggaggaggtatgctgcgatgcaaactaatatggcaccaataacaataggaagcattgaaacacctaaccaattaaaacaagattttacaaacacaacaaacatcacaccaatgagcaacacacttgttcatacaccaaagtttgtatctccttcaagttcatcaacatcccctctggataatccacatgtggcagcacaagatactgttacctcagtggtgagcatgctcaaggacacacttgagcgcaagaagcttggtagccatgctaacaaagacacctcagcaggcaattcttttggattctatgacactcagcagtttcaacaaaacattcttggaggaacagatttctttcccatagtgacaactgcccaagttcaggattccctgatgcttcccaaggttgacaggcccatggaaccaaacaatggtaacttcgttgctcctgcaaaccaggtttggttcagtgcagcttctcgagagccttcacacagtggatcgtctactgctatgactactcattcagctggatttgaaatgtgtgatgagctacctcctgcagcgcaagcgatgagtgtttgtgagagcaccagaaaaaatgctgcaaatggaacaaccgactgcaaatcaaaaggcaaagagtatagagagagggtacaaaaggataatttgaaagatgggaggaagaaagcagccctaactcgaataggatccatttcatctgaacaagcagctgataatggagatcctacaaagaagcgcagggttgagcgctcacgcaaaatggcagaagcaaaggaaagaagttccacaccagtaataccatctgatatgcaagccgtacttaaacgctgtgaaaccctagagaaggaggtccgatcactaaaacttaacctgtctttcatgaacaggaaagattcagaacagaccaagcagatcgaggagcttcagaagcaaaacgaggatttggccgaagagaaggagcggctggtggaagagatcgaaaggattgtctctgaccccaacacatgaccgcccaatcatttctgacatttttttatatactaatagaattagacttgaaatggtcctagatacaaatacacatacacaatccagcagggggcagcaagaattaagtgctggcctaaatgtaccattctttccttgttttcacaagtgtaacgtatacgaatatcaacaagcaaagggatcagggattacagtttatttcctgcagcatgttggcctcatgggtatcaatcagaacatgcgtgtgatatgaatgtggagtatgtgtgttatgtgtatctagttgcaaccaataaaaacagaacatgacatgcgggtaatcgttatttcagtagtagatttgaacaaaactcagcagtcttaattagattgaaaatcgcaaagcgaagacacctacggtttttccctaaagaccatcttaaaaaaaggaaaagaagagactggaaaaaaaaacaatctccttggtccttgctgactccatcggtcactccaatgcgatgcgagcccatcaaccttttcgctcaccagcagccgctgctgcggccgcaatggccactcgttccagttctttggcgtcggccagccacggccgccgcctcaacgccgccgtatcttcaacgtcaccggcggcatccgacgaggtgccatcgaaggtgccgtcgaacggcgcctcgcagaaggccatcgtggccacgagcctatccaccggccgcttcttcgtcttcgcggctgcggccagcctcgccggggcctcggggacgttcgttgcgcaggcgcggcctccgacagcggcacctggcgacagagcccaggcgccgtcgaacggcgcctcgcagaaggccatcatggccgcgaccctctccatcggccacttggcggccagcaacgccaacctcgacggcgcagccttgggaacgttggatgaggatgggctgttcccggcggcaagcgacgacgcagccgaggtgcggtcgaacggtgcctcgctgaaggccaccatggcaatgaggctctccatctccatcgccgctacctcgagtctgttcgattggttttggtcggggat

SEQ ID NO: 25405 - DNA, 3436 bp, Zea Mays
ctggctggctggcctgggaggctgggacggacgacggaggagtgactccgctgcccggcatcggcaggcagcgaagcatgcttgcacagatgcggcatcatggcatcgcccctcctcctcgaaagtggcatgcaggcgcggtagggtagagttcctcacttctcgcccatcaacgatgacgaagtgcgcgtaagctgctgctgggaaacggagattggatagattcgccgggggtcttgttggcttcaagagagcccgagttctcctttttccagcttgggtctggtacgccatctctgggtctggggactgtagatgatgacgtcctcgtacgagaaggccacgtcgggtgtcctgaggaacgcggcggcgctgctcgacgaaatgcagctcatgggagaaacgcagggtgccaagaaggtgatcaactccgagctgtggcacgcgtgcgcggggccgctggtctgcttgccgcagcgggggagcctcgtctactacttcccccaggggcacagcgagcaggttgctgctaccactaaaaagatacccaactctcgcatcccaaactacccgagtctcccgtcgcagctgctatgtcaagtccacaacatcactttgcatgctgacaaagaaactgatgagatttatgcccagatgaccctgcaaccagtacactcggaaactgatgtgttcccaatcccaacgctcggtgcttataccaaaagcaagcaccccagtgaatatttctgcaagaatttgactgcaagtgatacaagtacgcatggtggtttctcggtgccacggagagctgcagagaagctgtttccgcagttggattattcaatgcagcctcctaatcaggagcttatcgttcgagatctgcatgataacatgtggacattccgtcacatttatcgccagccaaagcgacatcttctaacaactggatggagtctttttgttggtgcgaaacggcttaaagctggtgactctgtcttatttatcagggatgagaagtcacagctccttgtgggtgttaggcgggccaccagacaacaaccggctttgtcatcatccgtcctgtctactgacagtatgcacattggtgttcttgctgctgcagctcatgcagcatcaagtggtggctcgtttactgtttactacaatcctcggacaagcccgtcgccatttgtgattcctctcgcaaggtacaatatggccacatatctgcaaccatcagttggaatgagattcgcgatgatgtttgagacggaggagtcaagcaagcgcagatgcacaggtacaattgtgggaattagcgactatgaaccgatgcgatggccaaactcaaaatggcgcaacttgcaggtagaatgggatgaacatgggtatggagaaagacctgaaagagttagtctatgggatatcgaaactccagagaacatggttttctcttccccattgaattcgaaaaggcaatgtcttcctagttatggagtttctggcctacatgtgtcatcaatttcaaagccacaaggaagtccttttggtaacttgcagcacatgccagggatcagttcagacattgctttgctgcttctcaatcaatctgcccagaacctcgggagttcaattgcttgtcaacaatcatcattttccagcattattcaaaatgctaagcaaagctatttccctccaacgacattaggtgcttccactggttggaatgaatctcagcagcagttaaacgcccttggtattcaaaaaggtgatcaagtaagctgtgatgttcagccaggtattgattcaatcactgcaccggagatgaatgttaaaccaagagtcccaagaagcacggattcatactcaagtcagagcatttcggatccaaacagcaagagtgaccctaaaacaaaaacgcgaaggagcaagaagagctcgtctcacaaaaccatttcggataaatctgagatttcttcagtaccttctcagatctgtgacaagcaaaggcatggttcagaaccaacatcggcagactttgaagcagaacaagctacctgtgggaacaatgaggattcatctggtgcactcacacgtggtgattttgctggagagctacaagttcagcaggttgaacaagatggtctacttccaccaccgaagttagagtcatcaaagtcacctgatggagggaagtccgtcagctcgttcccaaaccaagggtgtttctcacagttctttgagggtctggattggatgatcccgccttcctgctaccaagactccaatggcatccattcagttaccacatcggatagcatctttaatccgtctgaaggtataccaccttccacaatgaacgcggacggcatggacgcgttccaaacctcttgcctttccgagtgctttcctaattccatccaagaattcatcagcagtccagatataaacacactgacatttatgtcgcctgagatgcaacatctggatgcccaacacgacggcagcaacttgcagagcacgtccaactcctatgtgcagatgagcttctcggaggagagccagagtgcatccttaagtggcctacacatggaagctgtccatatcaacagctcctgccttcaaccactggcgacagggagctttgatgcagggacgttctcaaaactatcaaacataaaagaatgccaggccttgcctctgcaggagattcacaacagctccatgggaacaccttcgtgcagtatggatgcggcggcggtcgagtactgtatggatcgaagtgtgaagccactgaaaccaccggtccggacatatacaaaggttcaaaagttaggatcagttggaagatctatcgacgttacacggtttagagactaccatgagttgaggtcagccattgcctgcatgtttggactacaggggaaactggaacaccctggcagttcagactggaagcttgtttatgtcgactacgagaacgatgttctcctcgttggagacgacccgtgggaggagttcatcaactgtgtgagatgcattcggatcctggcgccttcggaagtacagcagatgagcgagaatggcgtgcatgtcttgaacgactgcatgcaaatggcttagaaagtcagggctatatgtcctgcgcagcctgcacagtgtaacgtcgcaaatacgagaaatgagtgttcttcgtagccacgcagcggctcttcttgtaaataaaagatacatcacgtgcatccaattctctgaatgctttgattcttttctagcacgagaagagaccattattatatggcggtgcattacaggtctattttctattttttcatgcaatgacttaaattatgagcttacgaggaagggggtgataatgtatcaaattatcccatctatttatttattatattaatacaagaaatttaaaaaaaaa

SEQ ID NO: 25406 - DNA, 2344 bp, Zea Mays
ttttttttacaacttctccctctcagtttactgttgaaaaggcaaacaaaatcacttagccgcgctgcctctgtgtctgtcttttcgtttaattagggtttccggatctgctctgcgtcgccgccgaccaacctccaccgcgcgacgccatggacttcgacgagtacgagtatctggagaagacggtggaagcgttcgcagcgccggccaacggttcgtcgccgcccgggtcggggtacaaggacaaggagcgcagctcacgccgccgctcaacgggcggtgacgaagagcgcgacaacgtagaacgcagatcgaagcgttctcgccccgaggaaggccgcgaccgcgatagagagcggcacaggtaccgcgacggcgaccggcaccgcagcagtcgggagcggcgggaccgtgaccgtgacgtcaaggagaaagagcagggcagggagaacgacaaggacaggaggagccgcgaccgcgaacgggagaaggaggagagggagaaggataggcagcggaggagtcggagccggtccgagcggcgccgtgatgacgaagagcgtgatcgctaccgtgaacgcgatgtcagacgtaggaaagaggaagttgctgaacctgaagttgatccagaaagagatcagaggactgtgtttgcttaccagttatctttgaaggcagatgaaagagatgtatatgagttcttttctagggctggaaaggtccgggatgttcgcctgattatggatcgaaattcacgacgttctaaaggtgtcgggtatattgaattctatgatgctatgtctgttccaatggcgatagctctttctggtcagttgcttcttggtcaacaagtgatggttaagccttcagaggctgaaaagaatttagttcagtcaaatgcttcaagtggagctgcttcaggtggagcaaggaagttgtatgttggaaatcttcactcaaacattaatgaagaccagttgcgacaggtctttgaaccatttggacaagtggagcttgttcagttgccattagatccgctcagtgggctatgcaaaggttttggttttgtgcagtttgcacgtcttgaagatgcaaaagcggcccagagtttgaatgggcaacttgagattgctggaagagtaatcaaggtttcagctgtgacagaccaagcaggcatgcaagttagtggagctacgggagatttggatgatgaagaagctggaggcttggcactgaatgccagttccagagctcttctaatgcagaaattggaccgcagcggcattacgaccaggattcaaccaccactacagcaacactgtttccatatatatctagcttatcaaggatggcgaattgatgatgtttgaaagtggacataagagaggaatcttgttacaatgcccttaccattttgatgcagatttcaatgattggctccataagaaacttgagttaaattttgttatagtagatgtacccttttatgtgtagcttactcactggacacgccaaccttttgtgttcctgcagtttgactggtgggacgggcattgctggtttgactactccagtggcaataccaactgtatctgtccttggtgctgccccagctgcagcccctcttctgcaccctacagtgcctggtcttgcaattcccggggcaactcttccaattactaccccatctattgatttggctccacctagtcaatgcctattgctcaagaatatgtttgatccagctttggagacagatcctgatttcgatttggacatcagagatgatgttcaggaggaatgttccaagtttggtcaattaaaacatatttttgtagacaaaagtactgccggttttgtgtacctgcggtttgatagtataacagccgctatgagcgcacagaaagcactccatggaagatggttcgcagggaagatgatcacagcaacttttatgaccccacaacagtatgaaatgaagttcccgagctagtgaacagatgcatgattaatatggacgtagttgcttgggctcggtgggtgctggcatttctatattttagcgttttgagcttgtgtcaacttattactggaggtaattataaaaaaaactagtggaggaaaatttagtggaagctagtgtatcgggaaatggctaacgaaaaatggtgaaagaaagagtttccttgccctgtgggttagtgctcgaattgaaactgtactgtgtaatggagtttctccctgaagtgctagtactaatacctaaaatgatggaagaaagagttgacttgcgttgcgcttgttgatttgattatactcgtccgtaccctttgcattattgttt

SEQ ID NO: 25407 - DNA, 3228 bp, Zea Mays
cttgatttcgtttatgatcatactatcaaaggcaagtgttatggtttaaaaactttcactcaccccagagctgctgagcaagcaattgcaggcatggacggcaagaaattaggcaatcgtattattcgagtaaatgaagtgcgtacaagaggtccccgagattttggtcgagatggttttagacgagatccaagaaggtatggtagagatccatactgggacagaagggatagggaacagagctatgatcgtgaaagagatccctaccatgacagggatagtgatagatcccgcgagcatgatagagaaagagattatgagcatggtggctttaatagagaagttgactatcccatggatcgagatcatgaagtagacgacatacatcctagagaacatgatcgtgcagcagaaacacataatatggattcagataatgacaaatataaggaacatggatcaagaaaaaggttcaggtgccatgttaattttgtttttcatagtggagttatgttggtattggagaccacggtggctatttttaatatttaaacgaaaacaacattgtgtttgatatattgatgtgcatattttaggagaaatatttactgagtgcttaattgatgttcttggtccgtttgaaattaatttgctagagcatctcttagttcttaacttaggtgtcacatttcaagatcttggaaagtacaattcattgattgtagcttgtagctatgttgtatactctctattcctaattgcaagatgtttttccttttctagatacatcacttttgttatgcacttaactgtacactgtctctagatacatagtacaagcaatgtagctagaaaagaacgaaatgtcttacaatttggaaggggggagagtagttcaataagaatagggtcatattcaccaacggcatttttagtgatatttatatgtttccctgcattactctctctatccactcaattattttacgctaatatagtgaatactggctgcacaattagaatgatgggcatgtttgatgatttgtttgccctaacggtaaaaaatcttgtatgctgactagtggccttgcagattgcgtaaacttataaagtactacacagcatcattattatgctgaaactgggttcattattattttttgggttaaatgcatcggtagcccctgaacttgtcaatgaatggcactttggtccatgaactttaaaaatgcatttttaggtccttgaacttgttaaatgatgtatcacagatccctaaacttgaaaaaatggtgcatcacaggtctttttttagaccatgccaatcactgttatgtgccacttaacaaattcaagggcctaaaaatgtattttcaaagtccgtggatctaattgacatccctcgataagttcagggactgctcatgcatttagctctttttttacaaggaactgggtacattattagagaccttgttttgttacccttattgtgaaatctacatcattgttaagtccaaattttaatgtactgactactgtctatttataaagaaaggttgtaccactatgggaaatatttcatgggtcaactatagcccttagaaaaaatgggcatttattttcctaatgttctctatgcagccacccaaaaggtcgtgatagcaaagatttatcgagttccagtgatcttcaaaatgatgtaagtgcatattcgttctgtgctattgtgaatggctgttcctgactcattatatcgactcctttttgtttccatttctcttttttgtatatcaggggaaacaccagttggataaaactattcagatgcgtgaggaccttgaaaatgaggcacgccatttccttaaaggccttgttctgtgttagtttgatgtggaaaccatagaatcagtggacactatcttggcgtcggtgtaaaatcatgatggatttatttccttgccagagtccccacttaagttaacttgcctacattggtttgaagatgaaaacatgctaaatgtaaatgtgaaagtaatcaaagttctccaggcttaatggatgtagatttatggatagtgatgacctgcagaattagaacatgaactcaattgcatttgcgaggtccaaaaaggataaatggctgttaaatctgtagtcacatttaggatttatcttttgcttgacttatacagaatttttcacatttagcccagttttttttgtacactggcatgcttgggtacctcagatgacagccatgcattggtcactgaatgtgcatgccttatttactcagaaaagcttcacaatcagttgcctattgcattacaatatatggtattatcttttcagctgaagttatatagtacatgggatgcatgatccatgaaccatgatacatagactgatagtacactcagttactttttagataggcatgagtacttgtgtccatgatttaactgtttcttgcattttatattatgagctttgcaggttagccagattaaggataaaatctctgcgaaaggacaacacattgcagatttgcagaagaaagctcagaaattagaggacgaactggctgctgcacggaaagtctcttcagaacgacaattagctgttacagacgtacgcgctcatcacctgttggctgcttgttcatgcaaatatgcaattggtggcttctctgatgaaagaattataaatgcagctgtacaaacattttcttcaactccaagactacaacgatagggtcaaaacagctgaacataggctgcagtctcttgttgacgctgccatggccgagcttgacatggccgaagatgctactaccagagatggctcgatgtatgagaacggcgtggtttgaacacccaaagggggctgccagctgtcatgtcacggcttgtgaggtttactaatttgttagatttgtagtttggatttgccatgtataatagaactgtactgtaactagaaacgggaaaatgttgtgtaaggatcagggaatgaatggctgcacagtgcacatttgctatggcttgtttttttttttcaaagttgaatttattagccggcctgactattgctgatacggtatgatctgccctaatatcagagctgttcagttaggcaggtttgacttgagaaacgttcgtgttctgtttgtcaatcacatatatcatgctggcttgttgatgcctgagcttgacgccgtcaatg

SEQ ID NO: 25408 - DNA, 2816 bp, Zea Mays
gtcaacacccaacacatgctttaccacgcacacgtttgaccacggactctcggctggccgtctccagtcccccactccgcagctccgttcacacctcgccgcgggaacgggagtcctggtggtgttttttattctgctaagtggcccggcccggtcgtctttgctgcctcttgcgaagcgagtgcgccgtaacttccaagaaccggggggtgcgcggggggccggagcccggaggtagcaagcaacgagaggaaggagacgacgacgcggcctcggctcggaggagacgacggcgaggaagcgtccaggggaccccctgcgggtgtcttctgctatcacgatctgaagtgctgaacttggttggaagatactcttcttaagcctggaactgtcgtttccgatggtctggcactttctttcctgatggcaagcacagaaggtttccgcctcgtgagatgcccaaagtgtctgaacattctcccagaaccacctaacgtcacagtctacaagtgcggtggatgcggcaccacccttcgagctaaaacccgtgccagcggtggccaacaagtggccgcgaccgcgaaacaaggtcgccaggactccgacagttattcggtcgctaccgccgtgagcagtggggtgcctcgtcagaacagagaccagggctccattggtgccgtcacggagagttccttcgacgctgatgtcgcgagcgccgagcatggcagcaacggagcaaggagcggtgaaaatggtggtggtatgctggctggccagaatgtccatttcgaaggccaggataataataccagttcaaggatggaaggtcctgctggccagacacgcctgaacgcaaatgccacgtatttagactctggtggaacagaaaaccacaccgtgcaacaaactgcagagaaatgccgagtgagtggacatgtcgatgatacagaatgccacttgaacacctctgaggacgaaatgtttccttccgagacaagcaaagcagccgtcggtatgcaggatcctgggcagaagaaggaagcgggcggaaccgagcatgcagcgaacaagaagagccatcttgtgagggcactgtctcggtcgtgtgatcttggatcatcgatgaacttgaccgatttccactctgctcgggcttcgctccagtccaaaagcttcagggccagcgcgcccctccagtcgaagatcatgagcacggtggatgagctgaagggcgacctctctgagatgttcagcaaacctgcggactgcaagccaaggccacacccacaccctccacgcccttccaaacgagatggcggccgcacggctcgtgcggccgtcacgtccagcgcaccactcgcggcgtatcgtcctcccgccgagcattccggctatgtgtctcgctctcgcctcagcaggtctgcccaggttcttcctcctcctcgtcgtgggctgccgtcactgaggtatcgccggcacagggtttatccgtgccatcacagtgtgcagatggaagtgagatcttcttgccgtcacgagtgctgctacaacagctgccagccaccctgctgcaggtcctgcgagcaagaaccttcagcgatgcacagggcaccggtcgagcaggttaagcgtcgtcctccgcccagaaaccactgcctgcccgtcctaagcggcgctccgttcgtcatctgctccagctgcgtcagcctggtccagctgcccgccgacttcgccgtgccgagcagaggagcacgccggctgcggtgcggcgcctgctccgagctcctttcctactcgtacagggaccccgccgggaggaagaagccgcggtcgccattcgagggcgatgagtgcagcactgacgggtacgacgagatccgccaccaggctgccggcgccggcttcgagcgggcaggtccggccgtgtcctactccgaagagtacgggctctcgttcggcatcggccactcgaccagcagcagcaccgaggacgggcagccgctgtacgtgtcgaggaactcttccttcaacaccgccgacgacggaaggatgggcagagacggcaagcttcaccggctgatgggatactcgtcggcgagcgagctgctgcggcactcgcccgacctattcgagagcttcgacaggcgcgcgcccagcgcgagagcgcacgtcgacggcaagggcaaaggcgtctgcgtggcaggaaacgacgcggcgggcgcgcgagacggtgcggcgaagaggtccaaggcgaggagcggtggcttgccgctccatgggatcctgaagaaagggatccatggcctggaatcgctcaagctcaggtcgtagctgatgatcctcgtttggcggggctctggcgatcgggtttaggagaaggtagcagtagcatacacgacatgtctttagaggcagtgtgtagtgatttgattattggcggcctgatgtgtgcttactgcttagtagctagcttgtgtgtgtgagttgtttgcaattcatctgtgtgtgtggagttggttggttggttcgcaaacttgtgctcttcggttcgatgtgtgtaagtgtaagatttgaacgccgggcatgctcgatgctgtggatgtttatagaatagaaatatgatgatgatgatgtggatctaaaccaagcaacctgagtaacttggtctaaccacaaccaaatctgaaccgattccgccacagggagcaagcggtgagtttttgttacccgcccgccaattactcaagtttgctctacaatcatcaggtaaccgaaatctgaaatttagttttcctcatggcctaatctctgcagtg

SEQ ID NO: 25409 - DNA, 2213 bp, Zea Mays
ctaagccatcataaaagcctacttttcccatgcctctttcgtaaactcgaacgcagctgtgccattgcgagcacgattgcgtccaaactcggaatggcaaccccctagccgtccgatcgaccgccagccccgagtccgatcgaccgcggtctgcgccatcttgtcctcttcctcccttcctggacggctggagctggacctgctttattgattattgggtgcccacgcatcgggccgtgggaggcgggctctgtttcagcctcgtcagccgtgggcgatggcggcggcggctgggaaggcgcgggcggtgagcctggccgcggcggtgcgtgtggtggcggcgacggcgcggccggcgtctagcgcagccgcggcggcgggagtgggtgcgatggcattgatcgtgcagggggaggacacggccttcgggtctctggagtggtgggcgtacgcgggcatctcctgctttctcgtgctcttcgcagggatcatgtccgggctcacacttggactcatgtcgctcggcctcgtcgagctggagatcctccaacgcagcggcaccgacgtcgaaaaggctcaggctgctgccatccttccggttgttcaaaggcaacaccagcttcttgtcaccctgttgttgtgtaatgctgttgccatggaggcacttcctatatttcttgacagaatgtttcatcctattgttgctgtaatattgtcagtgacatttgttcttgcctttggagaggttataccacaagcaatctgtactagatatggtctagcagtgggtgctaactttgtatggctcgtacgcattctcatggtcatctgctatccaatttcttaccctattgggaagatcctggactgtgctcttgggcacaatgagtctgcactttttaggcgagctcagttgaaagctctagtttcaatccatagcaaagaggctggcaagggtggagagcttacccatgatgagactacaatcataagtggagccttggacctgaccgaaaagactgctgcagaagctatgacaccaattgagtcaactttctcactggatgtggattccaagttggattgggaagcaattggaaaaattcttgcccgtggtcatagtcgtgttcctgtatactctggaaaccctagaaacatcattggtctcctattggtgaagagtctattgactgttcgtgctgaaacggagacgccagttagtgctgtttcaattagaaggattccaagggttccttcagacatgcctctgtatgatatactgaatgagtttcagaaaggaagtagtcatatggctgctgttgtgaaggctaaacccaaaactgaaccaccccttgacaaaactgaaccaaacagggaagcagttggaccaacacaattgactgttcccttgttatctaatgctgaagaaagtgcagacaatgtggttgtggatatcgaaagaccacataacaggcagattaatgggaacacagcatcaaacgcagtgcctaggtcatcagaggatattgaggatggtgaggtcgttggaatcatcacacttgaggatgtattcgaagaactcctacaggaggaaatcgtggacgagactgatgaatatgttgatgttcataaaaggatccgagtagctgctgctgctgccgcatcatcggttgcaagggctccatccgttaggagattaacgggccaaaaggctgcaggagcacagaatcgccaaggacagcaacctcctggaattctcaagaaacctactgagggtgattcaaacccatcaaaacaagtgaaccttatggaacctcttctggaaaaggggaggtaactctaatggaacctcttctggaaaagaggaactctaaaatgcattgcgcaacgtagggaaccatgctggaagagcctatggttcttgctatattgtagcaagaggtaaatagagatgaactcattgttgcaaattccaacatgagcgaccgagcgatgtggttttggtgtcattatggacattacattagtgttgaattctttggatccccctccctttttttttgtgttttgggcttcgaaagtagagtcgccatttttgaatgtcaccgctaaccgcagtagcaagttagcaactgctttatatatgtgcttcaaattcgtcgattcctaggcttcatagttatgcataagatttttaaaaaaaatatcggaac

SEQ ID NO: 25410 - DNA, 2811 bp, Zea Mays
ccgcatgcgaagaacaatgcccttttggaaatgtatctgggaagatctcagagttgaagacaacaattgacatgggtttagctcatcgtgacagtatactaaaaaatattgcttctgattttgaacagtggaaccatctggtcaaaaaggaaaaggcaatttatcacaccttgaacatgctaagtgttgatgttacgaagaaatgtttagttgctgagggctggagtccaatttttgcaagcattcagattcaagacgctcttcagcgtgctactcttgatagcaaatcccaagttggctcaatatttcaagttctcaacacaaaagaatctcctccaacatatttccagacaaataaatttacttcagcgttccaggaaattgttgatgcgtatggtgtagccaagtatcaagaagcaaatcctggagtattcaccattgtgactttccctttcttatttgctgtcatgtttggtgattggggccatggaatttgcttgttacttgcaacactctatcttataatccgggagaagaaactagcttcacagaaacttggagacataatggagatgatgtttggtgggcgttatgtaattatgatgatggcagttttttcaatctacacaggattaatatacaatgaatttttctctgttccatttgggcttttcggtaaatctgcctatgcatgccgtgattcttcttgcagtgatgctactaccgaaggacttcttaaagtaagagatgcatacccttttggtgtggaccctgtctggcatggtagccgcagtgagctaccgtttctcaactcactgaagatgaagatgtcgattcttcttggagttgcacaaatgaaccttgggattgtgattagttacttcaatgcaaaatttttcaggaacagtattaatgtgtggtaccagttcattccccagctgatcttcttgaacagcttatttggctacctgtccttgctcattattattaagtggtgcacggggtcgaaagcagatctataccacgttatgatctacatgttccttagcccaacagatgatcttagtgagaaccagttgtttagtggccagaagacagtgcaggtctatattctttgttgataagttctcttctgtgaagcagattgatctaccatgcctaaccactcgccttctccaacacagcttgttctacttctgcttgctttagtgtctgtaccttggatgttgattccaaaacctcttcttttgaagaaacaacatcagcaaaggcatcaaggtcaccagtacgctatgcttcagggcattgatgaatcagtgggagcagaattgggggaacatcatgaggacgcacatgaccacgaggagtttgagttcggtgaagtttttgttcaccaactgattcacacgatagaatttgttctgggtgcagtctcaaacaccgcttcataccttcgtctttgggctctgagtcttgcacactctgagttgtccactgtattctacgagaaagtactaatgacggcatatgggtttaacaatgttttcatccttattattggtgtcgtcatcttcatctttgccacgattggtgtcttgcttgttatggagaccctgagtgcattccttcacgcgctgaggcttcactgggtggagttccagaacaagttctatgaaggtgatggctacaagtttgccccattctccttcgcgctgattcgtgaggaggaagattgagcttgtctcaacatttgtatttattgtagccgataaaaaatctttggtggtctttgttcccagaccaaatcattttttcatctgttgtgtcggatgtggatcataaaccaccgtccctttgtttaaactgggacgaacagcatcatttttccttagctatgcagaggattcttgggttggttggcaacagatatggggtgatgtcacccttgtatgatgctaataagtagttgccgattgggcggtgtgttggatataaataagcactgtattgaaggttagacaatctccatcacgttcattgtcaataaaataaagagtgctatttacgctgctggtgttaatcatctcctggtctgttgttaaccattgtcagtgcttcatcttatcccattgatactctgaatcagctgtctcttataaccaaagcaaaagctaaaccagaatcacgttataaaagtagttaaacatgtcgagtctgtctgcttgtgggcaatctagtaacataggtagctgcagcctagtttcgtcagtcgtcaacgacgttgggaacgctgctggtgctgcgcctagagctgctgaaaggtcccgtgacagtccggccaacgaacttgccggccttgctgagtccgctaccgaacgcgccaatgccggagccgacggcgccgatgcccgtgccaaccatcccaacgccggagccggccgcgctgacacccgtgccggcaacggtgccggccgccgcgatgcccgtgccggccacgttggtgaccgtggacgccatgccgcttgccgcgtccgcggcgccgctgacggcccccgtctcgctcttcaccttccgccgctcatccacggtctgcttctccagctccagggcctcccgcgcctctgcgttggtgaactggtggtacgccaccttaatgctgagcacgcccctgtccttcttgtccttgaccttggtcgtgtccagcgacgacagcagctgcagtttcacctcctgcacggtttccatctccaggtcgctcaggggcagcttggcgatgccaagcctcttgtcttgcttcatcttgtcctcatc

SEQ ID NO: 25411 - DNA, 1610 bp, Zea Mays
acgagcgagaactgttgtcatttcatgagacgttactcgggatgcacttgtaacgggatagtgtagtagcaagcataggagtaaggagttttgctagtcttcttcagcttcagtagttcagtccaatcacagatcgcagtacaactgaacccgcctcccgcacaaggcatccaggatttgttcggccttcggacttcggagggtagagaatcgaagcgacgagaacaaagcaatgaacgaggcggtgcaggaggcgaagctgctgcggcaggtgaacgcgctcatcgtggcacacctccgtagccagaacctcgggcaggccgcagccgccgtcgccgccgccaccatgacccccatctccgctgccgaatccgtccccgccaatcacctcctgcgtctcgtggccaagggcctcgccgcggagcacggaggaggtgacgccgcttccgcattcgactccgccgggttcggtgtggcggtgcagccgcccggctccagtgccgtggatttcagtattcaggatgtcaagggctcatccaaaagcttccccaagcacgaggtgaagcatgtctctgaccataagaacgctgcccggtgtgtgaaatttagtcctgatggaaagtattttgcaactgggagtgctgatacatccattaagttttttgaggttgctaagattaagcagactatggtaggagactctaaagatggccctgccaggcctgtggtacggacattttatgatcacacacaggccatcaatgatctggattttcatcctgagagtccaatactgatatcagctgcaaaagacagtacaataagattctttgacttttcaaaaaccaatgcgaggaaagcgttcagagttattcaggatactcataatgttagatctgtatgttttcatccttgtggggattaccttttagcagggactgatcacccagttgctcatttatatgatataaatacttttacatgctacttatcagcaaatgcacaggattctagttctcccattaaccaggtacgctactcttgtactgggagcttgtatgtgactgcttctaaagatggttctctgcgcatttgggatggagtatctgctgaatgtgttcgacctattattggagcacatggatcatcagaagctattagcgcgattttcaccaaagatgagaggtacgtcctatcttgtgggaaagattctcgtgtcaagttatgggaagttggcactggacgacttgtgaagcaatatgcaggagcaattcgcagacaatttcgttgtcaggctgtcttcaatgaaaccgaggaatttgtgctatcagttgatgaacaaaacaatgaggttgtcgtctgggatgcacttactgctgaaaaggttacaagattgccttctggcagcactggtgctcctagatggctcgaccattccccagttgagccagtttttgttagttgtggaaacgatagatcgatcaaattctggaaacaaaccgtataagcttgtagattcaaccacgcaaatcaaaagaatgccagttatatgaaccattgacctgatttttattggtcagcctcctttcgatgttctgttatttttatcc

SEQ ID NO: 25412 - DNA, 3979 bp, Zea Mays
cccatgtgtaagcttttctcgcactcgtactccctcctccgctccggctaggaggctgctccctccgccgctccgccttcgtcgcgcggccatcgtttccggctctgtccccggatatctcttcgccaccgcttcctgcgccgcggcgccgccacaaccgaaggcgacccagtcgccttcaacactatggtgactcctcccactgtcgaggaggacgaggagatgctcgtgccccgccaggaggcggtcgacaccgacgcagcgcagcccatggaagtggtggcacagactgaggtggtgagcacggcggagagccagcctgtggaagatccgcagacatcacggttcacttggacaattgagaacttcaccaggttcagtgagaagaagcactatttagaggtttttgttgttggcggattcaaatggagtgtgctgattttccccaaggggaacaatgtggaccacttctcaatgtacttggatgttgctgactcaaccagccttccgtatggttggagccgctatgctcagtttagtcttgctgttgtaaaccaaatccagccagagtttacgatacgcaaagagacccaacatcaatttaatgctcgtgagagtgattggggtttcacatcttttatgcctttgagtgagctctatgatgcaagtagaggttacctcgtgaatgatactgttgttgtggaggccgaggttgctgtccgcagaattgttgactattggacatatgactcaaaaaaggaaactggttatgtgggcctgaaaaaccaaggagctacctgttatatgaactcccttctacagacactataccatataccctacttcaggaaggctgtatatcatatgccaaccactgaaaatgacataccatcaggaagcattcccttggcgctgcagagccttttctacaagctccagtacagtgacagtagtgtagctacaaaagagctgacaaaatcttttggttgggacacatatgattctttcatgcagcatgatgtacaagagctcaacagagttctgtctgagaaacttgaggacaaaatgaagggaactgtcgtagaaggaacaattgagcaattatttgaaggtcaccacatcaattacattgagtgtataaacgttgagcataaatctaaccgcaaggaatccttttatgatcttcagcttgacgtcaaaggctgtcgtgacatttattcgtcgtttgataaatatgttgaagttgaacgtctagagggtgataacaagtatcacgcagagaatcatggtctacaggatgcaaaaaagggcgttcttttccttgatttcccccctgttttgcaactccagctgaagcgctttgagtatgattatatgagagatagcatggttaagattaatgatcgctatgagttccctctgcaacttgatctggatagagatggtggcaaatacattgctccaaatgcagatcgaagtacacgaaacctttacactcttcacagtgttcttgttcatagtggtggggtacatggtggtcactactatgcattcatacggccaactttatctgagcaatggtataaatttgatgatgaacgtgtaacaaaagaagatgctaagaaggctcttgaagaacaatatgggggtgatgaagagttaccccaaataaaccctggtttcaacaacgctccatttaaattcacgaagtattcaaacgcgtatatgcttgtttatattcgtgaaagtgccaaggagaaaattatgtgtactgttgatgaaaaagacattgctgagcatttaagggtaaggttgaaaaaagaacaagaagagaaagaacacaaaaagaaagaaaaagctgaagctcatctttataccataattaaggtagctcgagatgaggatttgaaggaacaaattggaaagggtatatattttgatttggtggaccatgaaaaggtccataatttccgtatacagaaacaaatgccttttagttgtttcaaggaggaagtagccaaggaatatggcatccctgttcagtttcagcgcttctggttgtgggcaaagaggcaaaaccatacataccgccctaatcgtccattgaccgttcatgaggaaacacaatctgtggggcaactgagagaaatatcaaataaggcacacaatgttgagttgaagctgtttttggaagtagaacttgggctggatttgcggcctctccctcctcctgagaagggcaaggaagatattcttcttttcttcaaattctacaacccagaaaaggaagaactctgtttcatggggaggctctttgtgaaggccttgggaaaaccttcagaaatcctggcaaaactaaacgaaatggctggatttccccctgatcaagaaattgagctttttgaggaaattaagtttgagccaaacgtgatgtgtgaaactatagacaagaaactcacttttcattatagtcagcttgaagatggggacattatttgtttccaaaaatcaccaggagcagaatatgatgcacccgtgcgatatccggatgttccttcatttttggagtatgtccataataggcaggttgtacatttccggtctttggagaaaccaaaggatgatgatttttctttggaattgtcaaagcttcatacctatgatgatgttgttgagagagttgctcgccaacttgaattggacgatccagcgaaaattcggcttacaccccacaattgctactctcagcaacctaaaccacagcccgtcaaatatcgaggagtggtgcatctgtcggacatgctcatccactacaatcagacgtctgacatcttgtattatgaagtgttggatataccactgccagaattgcagttcctaaaaaccctgaaagttgcatttcaccatcctacgaaggatgaggttgttattcatagcatcaggcttccaaaaaatagcaccattgctgatgtaatatatgacttgaaaactaaggttgaactgtccagtcctaatgctgaactacgtgtactagaagtcttctaccacaagatctataagatctttccactacatgagaagatagagaatataaacgaccaatattggacactacgtgctgaggagattccagaagaggaaaaaaatataggcccaaatgatcggctaattcatgtttatcacttcaagaaagatattaatcagactcagcagattcagaactttggagaccctttcgttttggtcgttcatgaaggtgagactttagcagaagtcaagaagcgcatacagagtaaactgcaagtctctgctgatgaattttccaagtggaaatttgcatttatatcaatgaatcggccagactacctccaggattcagatgttgtacctactggctttcagaggagagaggtctacggagcttgggagcaatatcttgggatagagcacgctgatactgcaccaaaaagggtctatacagtgaatcagaaccgtcacgcatacgaaaagccggtcaaaatttacaattgagatttctaactaacatggccgcacggtgaaggcctccatacgagaggagcggccagaaaagggaggacagggaatttatactgtcagggggaaaacctcatagttagcgagccattcggtgtggcacggccatgtattccagcgctagaggccagccactgttatttcatctgtagcagccagcagctcctatagcaatgattttctttttgtacaagattttccttctttgccttagggtgatggcgcgagcgcattggtgtccgtttcggttgggcaattgcttcattcttagagcaaagctgggtacataagattttggtaggaagcgtgtatacaggcaggctgtatagttgtggctctctcggcttgatccctcgtatcttgtcttgtgctattgttaatgcagtgacaggggctgactgtaaatcgtggttccaattttcag

SEQ ID NO: 25413 - DNA, 1979 bp, Zea Mays
gggccggcgtcgagtggagatccaatcgaaaatcgaactgacttcatcttctgttggtcaacaggagagcccgttgaaatcctggacctctcaattgtccttttctctctccccgcccaccttcccctgttctgccgcctccccagtccggcgtgcatcagcagcgacatcagagtcggcgatgggaggcgtcatcgacgttctcgtccccttatgttgatgaagtggtgtgccgtggagattccttgaccgatttcttgccggtaagacggagtctgccatctgcgtggctggtcatcgcggtgagcaaggaacgacgaagtgcgcccctccgcccttcggctcgtcgttgtgccttgcgtcgtcgggtggagttccttcccctgcttcaagctaattcgacaaaaagagtagagcagcaaaatggagaaccatggaaaattggatgggtgggatgaagttctggaagaagaagatgagttagcgagtgtatgcaaatatcctattagcacatcgtacctttcttatggaacaagcagaaggggcaaaagtgtaaagaagcctagattctcattacgaggatatgattttgttccattagatgttaagactgataacttgtgcattggggagcaagatggttcttctgcagtgccatcaactaaagcttcacaaaccatggtggctgaacggttggaaaacgttgaggaacaaactgaagatttggcaccagagtttgcccttccacccaaagcaaatactttagtttctgagctgctagataatttacagcgtaggggtggttcttttgtcaggacaccatctttgttgcaccaacatgctccaagcatatcaatcagggagcaggaagtttcatccggagtgccaccaactaaagcttcacaagctttgatggatgaaccgtttgaaaatgacaatggacaaactgaagagttgccatcagagctcccctgctcgatcaagagaccaaaattttcagttgcagaacttctagaagacctacagggtagaagtggttcttatgttgagacagcatctttgtcacaccaacacaccagagctaaacattggaagccaaagttcctttcttccgagaagaaaacaatagctattctaggagacaggagtattgacagtgaggaccccttggagcatgtaattgacggaacatctagcgaggaggaagatgctactcaaaaccacttgagtttggtgaacaaagatgagaaccagcaaactatggctgacctatttcaagaagtttttaatccaacaaacatggatggtgccatgaaatcaatgagatcaacaggagctggtaactatggaagaatgcaacagattatgcacatggagaaagattggcatgtggaattctcgaggcagtatagcagagagcacagttattcaggtgatttaaagggaactactgttcagattatgtcaaggtcattggaaggaaagctaacagtctgcagctgcatgttccaggaaaagggcaatgatgccactataagtaatgcctcagcagacggcaccatggatgaaagcagaactaggaggactattatcttcagtccaaagatatgtaacaatgtagatcttctggttggaaacataattcatatcttcccaccatggaaggaagttaaaatacaagaagagcatgtgattatttgcacctacttctcgcaccaccaccggacttgatactcggagatatttctgtgctagctgcaaagctagaggcagaccgccagcataaccgttgctgacagtttaatgttgatgtactcgcagggtctattctgtttgttttgtaatcacaagtgtactggctgcaaagctataggcagaccgcaagcataaccgttcctgatagcctaatgctgatgtacttgcagtctctcttctgttttacaatcacaagttactgaggcctagttcggattctctaa

SEQ ID NO: 25414 - DNA, 1366 bp, Zea Mays
aggaaaaaaaaggttttccggcctcgcgggagtgcagcgagatccgtgccgccggcaccgtccctcgccctcctcgtctggctcgcccgccgtgtcctgttctgagtcctgcacgccctgcagatcgccgaccaccgctcgaggggacgcgggacgccctccatgattctgcgctccgcgccgcgtcgcctccacctactccgcccgcaccacctccggctcctctccgccgccgcgctcgcttccgcggtcccgatcccggccccggcccagtccccaattgagtgggccgaggctccgcttgcctccgtgcgccctgccaccgccgacgcatcgctcttccacgtctccctcgacctctccgcgcaccgggggctcctcgcctcccacaccgccgccggccagttcctccgcttccgcctccccgcctcttcctaccacatcttcctcgccatcgcatcccctcctcccccacctgcgctcgagaccctagccctagccgggccaccttcctgcttcgaattcctcgtcaagcgcctcccgggaaccccctccgcgcgcctctgcgacctccgccccggcgaccttgtccatgttggcgccagcgtcgtcggccgcggatttgatgtcgccaggatatctgatgcccgcgacgttctcgtcttcgccaccggatccgggatcaggaaaggtttgaggattgggaatccagaggagttaaaattgtacctgtcctctccagaccagatagtcaatggacaggggagagaggttatatccagaatgtgttctcaaggatgaagaatactgtaaaccctccatcagtgggagtaattttgtgtgggcataaacagatgagtgaggagatcacaagagttcttgttgccgatggtttgtcaaaagatagaatcttaactaacttctgatcgccagaaggacattgttccatcctttgtagaggttgtaccttttttttttgtaccacagtcaagcagctactctttacaaccgcacaatggcacaagtgcaaatcgcaacaggaagacagttgcgtgattacaaataagttcattttcttctccatgtgaccacattggcttattgctgaatgactggtgtagttctccttttttagaaaaagaatgcctgatgtgaatctcacatgcactggctctagctgagatgtgttctatagcatctgagacattgatcccctgtaaggctctgatgtacttcagagaaggccctttttggagaagtaagaaggggatatagatgtagcattattcaaaattttgaattaattgagtggaatgtaatggatgcatgctgtttaagtgagacgtgttgaacttctgaattcgtt

SEQ ID NO: 25415 - DNA, 2992 bp, Zea Mays
gtccaacgcagccaggatgcgacaatgcgaggcaggctgcttcatgcgtgaaaccaatcgtttcttcggcccggcacatgcaagcagccatgggcgagaaagaataggaccgccgccgccgctttgtccctccgttcacaaccttgtcgcacgagtctcttattcggtgagttcttcgcttctcctctcctctcttctctcgctcccccctcccctctctctatcacacacacagttccctctctatggtcagtcccatccggtcctctttctgggcttcaaatctctctttgttgttgcaatcggtattcgatttgctgctggattgcaaccgttgtttggaaaaaaaaacaaatattccccccaaatccatttccttcactgtgtattattttgcaccaaactgtaaatttgtcatctttctctttgtcaaatatgcattataggcttggatttgatctgttgcagcaactggacctgttttgtttaacaaatttaaatatcctgcatggagatagtggaaagggtattatgcagactttggaaagggaaggcgttatcagtgatctattattcagttgttagcttggctctttgggcatgtaagctgaatgtacgggatttttggtacccttgaacaagttgactcctgctgttttttgtcgaacagtggtgcttcttgatctgtaaaccatgttaacttcatctttatgcaatattgtggactaggactagcccctttaactcttcaaataaaaggtctacttgtgatctaatgttgctatactcaagtgatttgttattgccgtgtactcctgtgatttgctgaaagttttagttgtgttcaaactcatgttgtcacttcattcataaaaagatcaaagcagtggtaacttcaccaaaatgagaaatagtgatcaaaccaaagtgagtgcagccttccaaacacagagttcagcactgacatatgcagtccaagccagtggcggacccagaaagtttcaaaagcctgggcaaagattacaaaagctgaggcttgcccaattgttatgtatcctgaaacgtattttactcctaaattatgtatacatgtctataacttacaacacgggagcctgggcagccgcccggggtcgccgggcggtgagtcggccactggtccaagccacaacctagacaaccaatcaccagcacaatgcagcctggctcagcaatactagcaaaccaaacatgattgcctgcattcacacaagctggccacgcttggcctggttctactccccagccacactcaaccaatcaggcccattctgaatgagccagtgctgcttctcttccccacgacacatgaataataaactcgtgaaacatgttttagtcgtccgatccatcttctggtgcatcttgactgttcatattaacaccttaccccatacttcggacttcggagtccccttaggttttggccataactacatcacacatcacaccacatgagccggaaagtcattgaaaccctcttattaaaaaaaactgaagcaatgttgccaccaccgccatgccattgccgccacagccagtccgtcgctcttgccctatcctgttagccgtcaacgacacctgtggtgtgacgaggatgacatcaacatgtgcggcaagggtaccgtctctgcggtgggcgccacaacgtggctgggtgggttcgtgggtttcagtacgcccagcgaaatgcaggacatcgggaggacatgccgttgtgtgcgctgctgttagcttcagaccatgcattgacattcacaagggaaaagttaaacagattgttggctctactcttcgggatttagcaaatgatagcatggaacttgtgacaaactttgaatcagacaaatctcctgcagaatttgctaaattttataaagcagatgaacttctaggaggacatgttataatgcttggcgcaaatccttcaagccaggctgctgcactggaggcactacgtgcatatcctggtggtttgcaagttggaggtgggataaatttggagaatgcaatgtcttaccttaatgaaggggccagtcatgtgatagtgacctcttatgtgtttagtgatggcaagatgaacactgaaaggttaagaaaacttgtcgagctggttgggaaacagaggctcgtgctggacctcagttgtcgaaaaaaggatggccgatataccattgtaactgacaggtggcaaaagttcagtgatgtgtttgtggatgaaccaacattagaatatctcgctgcctttgcagatgagtttttggttcatggtgttgatgtggagggcaaaaggttaggaattgatgaggaacttgtggaactattggggcactattcaccaatcccagtcacttatgctgggggtgtgtcaacaatggacgacctagagaggataaagaaagcaggcaaaagtcgggtagatgtaacaattgggagtgctctagatatatttggaggagatttgccttacaaagatgttgtcctttggcacaggaagcaaagtatggttggtcaagtgtgaagaaacacaaggtattgatcagtattaccagttcatttgattcaagcttctgcacaaagtatattttctgaacatttttgttcaaataattcagttaggctatctccaacagatcctctatctcatctcctatttcaaactattttgcgtcccctattttacactacactggagacagtcttcagtgatgtaattcaaatctgaggagcatgacttgtttgggtttggacaccagggttggcgctaactcaaaaggtggtcaatttgtgagtaatgtactgttcttgacagtttctgacctcgatttgtctattgtaactgaataggctgaattgatgctgatagatacattttgcctgctacaacactgacattctgatttttaagttcctcgtttgagaaaataataatattgatgcaaattttggctct

SEQ ID NO: 25416 - DNA, 1663 bp, Zea Mays
agagataggaaagggcccaacagctcaacagaaaagccaagcaaaggctgctgcatactggaaggccctctgtctgtgtgcgagcgcaagagaaagggagtcagagagagagagagagggaggagaccttgcagaggagcgaagcaagcaaggtgggaaagaggcagcagcaagggcggcgggctgccggaaggggaacatgctccctcctcatctcacaggtcttccttcctgctcgctgacttgcctctctccaccctctctgatctgagctctacggctcttcctttccctgcggtgataccggagctctctgctcccacctcccagtaccagccgacctgtttttttttcgtttgtttgggggtgggtggatgtgggggagggatcgtttctcggttcttctggacgatttgtggtggatctggctggttccttggttgctcggctggtcttttgagttgatacggtgctgggatttgtaggcgcatttctgggtggaggtggccggtggggtaatggctccagcatgtgatccttgctaaggccttacagttacagcacactgcatgccggatttgtgttgctttatttatgttcctgcccgtgtaatcgttttgaactcaaggggagaactagtgacctactgatgagattaagatgcagcactgtttttgctagcgggaggcctatctgcagaactaactagtcatgtctgaggccctcagcacatatactctggttgcatgaaggattcttagaattcagagggcgctaccgagttgatgcatggtactgatacagcgctagcgctagcgctagctagcttactactagtacctttagagcatgtgcatgcccaagttacacatctcacctcgcgtgatcaattgagggcctactagcttactactgctgccttagtttcctttttcatgaatacagttacggtgggaaggtcaaattctgttgtgtattcatgcatcagctgtgctccttaaggcttgcagaccttaatacccagtacgtgtttcgaatctcgtatgtttatttctgggaactgacctgtgtttatatatgtttggacagtacgaactgaaaaacaagagtaaagaatttccgtgagatgagacgtacgtaaggataatccccaagacattgctcaatctgtttctctctctctctctctcttttcggcgagcagtttgtcctttttctttcaatttcttttactactacacccgttatcgaatatttgtcatccgctggctcatttataaactaaaacacgataaataaagaaggaaagaacggagagagtagtagtggtttagtttcatgcagctagaattctaacgccctcctggatccttgtgcagagaatggcgcggtgatgattcagtttggccatcagatgcctgattacgactccccggctacccagtcaaccagtgagacgagccatcaagaagcgtctggaatgagcgaagggagcctcaacgagcataataatgaccattcaggcaaccttgatgggtactcgaagagtgacgaaaacaagatgatgtcagcgttatccctgggcaatccggaaacagcttacgcacataatccgaagcctgaccgtactcagtccttctcgtgtgaattacgcagtacgcac

SEQ ID NO: 25417 - DNA, 1332 bp, Zea Mays
ctctgagaaaatgtggtcttacaggatcaataggaggactcttgctttcatataagacctcaaattacatggatgtttcgtataactattatgttgacggatccctttctaacaatccttctggtcagaagcagttcataaattatcttggaacatcaattgatgcaagtggaagaatcaacagtggaaatcttacaatcctgaactgccttcgcatgaacgaatgcaacataaataatttaactaatcgtgcaacttccttcgctataaactgtggtggcaagcaagtggagtattcagatctaatgccaattatgttctctgaagactccactgatcttggaggatcaggctttcatgttaatgctactagtcattgggtagttagtcatgtgggttctgatccatttaacgaatccaccggtattgtaaatacaagtgatatttttgaaaccaacatgcaagagctctaccaaacagcaagaacttcaacaagttcgttgtggtactatgtggtaggtttagctaacgggaactacacagtccaactcttctttgcagagatagtcataactcatggacctggaaagcgcttatttgacattgatattcaggaccagaatatcaggaaggactttgacattactaaggaagcagggggttccagaaaagccactaacataacctacgaagtgactgttgataactccatactggcaatacatctgtattggagtggacgcggcacctgttgtattccatatgaaggagcttacgggccactagtttcagcaataaaagttacccattcccaagacccgaaaaccagtcccccacaagcaccacattctgattctgcccgagatgatgtaaagcgaagaggagtggttgcaggcattgcagcactttccatagctgctgcggtgatatcttcatctgttgtctacctttggtggaaatgggtttcacttgtgaagcgcccaatggcatgagttcgtcagatgtttgcatatagttgattctcccacaaatttccatgtcatgcgaaggactctatgtatttgtcttttagcgttggctgctagcaactagccaactagcatagccaagatgactgatgtacagttgacgttgcgatcacggttttaggtctcaagttttgtttcacgattattgtaacctaggaaattatctaagacattctgctgctaatatgttgtttgtttgttgatcaaagtgattcaaatcgcattgtgatatattgtttgtttgtcgatcaaactcattgtaaaactattctcggacgaatgtcacatttcacgtgttgccaac

SEQ ID NO: 25418 - DNA, 1217 bp, Zea Mays
ttagatgtccaacggggacgtgtacgagcggacgcacgacgagcttgacttcgagttcctcgggaacgtgcgcggcaaggagtggcgcgtgcagaccaacgtgtacggcaacggcagcacggcggccggccgggaggagcgctacggcctctggttcgaccccacggaggacttccaccgctacgccatccactggacccgcgacaggatcatttggtgcaagggagcttctattggatggcacagtgatgacaacaagccttatcttaggcaaagggcattcacagcagtttgctacttgaacaatcatggagaggactataagggtggaattttgcagtttcaggatggtgatccttcctgtattgttccagttgctggtgatgttgtcatatacacggctgatactcgtaatgttcattgtgtaaatgaggtaactgaaggggaaaggttgaccctgactctttggttcactagagaccgtgcttatgatgaggatccaaaacttcttaactttctgtctcagacatcattgagctgtgaaccaactgagcaaaattcttatattcctgtaccagcttctgataacatgtatcgcttttcttgtgatcagtctggttttgacatacgatgtgctagagtgcatattctggggtttagttttcactcaagtagtggtgaatgcaatatatctgcgtcaccagctgaagatgacccaatagagttgcttggaaagcaactgcggctcgggaggggagatgatgtctttgagaaaatattttctaacagcttacatgctcttcaggtggtgcaattctactactggaaaaaacatgagctggcagcaaggagggaacaaagtgttgttagttcaggaacagtctgctgtccagttacacatcattcaaaaggaacagaattaccattaccatgcaatcacgcacttgcacaaactatatttggatcatataatactgaggagattgtccagtggaatgattttgcattagctgttgctatgtgggaaaaatattcagaagagttaaagaaacagttgttgacatttttgccatattggttgtccaatgaaaccatttatgttgttgatacctctgagctgcagagagccgaaccaatctaactctccaatggtgatttggactgcctcattcttatgcgacatagctgtggcgtagatatgtttctctcaagctcca

SEQ ID NO: 25419 - DNA, 4057 bp, Zea Mays
caaacctccccgtcgcggcgccctccccgccttcccattcccggccccgcccgcccacatctagtctcccacctcgccctcgcggcgccggtgtagcagccatgctagtctccgtcgccgccgacgactccggctggcaggagtccccgtcgcaggccgtcctcttcgccgacgagatcgctgccgtccgcgctgtcctgggcgggaccctctccgaggccagcatcattgccgcgctctcccagtgcggtggcaacgctgagcgcgccatcaacgcgatcctcgacgacgccgaggtcgtttccgcccccaagcgggccaaggtcgagctcgacgtcggtggtgttccggtgcaggtgccggtagctgtcaaggtgaaggccgaatccatcgacgtcggggccgtggcgccggcagctgtcaaggtgaaggccgagcccattgacggcgatgtcgtggggagccaacaatccgatggctcctccgcgaaggccaccgccaagatgaagagcgagccggccgaatggtccgccaagacacccgaccgattcgtccccgacgcgcgcagtgtaggtgcgcctgtggcggtggcgagcgccggcgccggcataagcatcgtcccgcggcagaataagaggccgaggcaggaggtggggaccatcgaactcactaccacgcacccggtgccgtacctcaactcgcggcccatccgggcgctgccacccatgccacccatgggcggggacggggaggtgtacgacccgaagcctatccagatggtgccgcccctggaaatccagatgcacgatccgaggaccaccctacctgcgccgtcacccatcgacatcgagatgtaccaacaaccgccgcggccgccgcccgtggacgtcgagatgtgcgagcagaggtcgcggccccggccccggcccctcagggcggttgtgcctgcctcggtgacggacatgaggatggtggtggcgccaccggacggcgagtttggcgacttccctgtggagcgcgactggatgctcgtcggcaagtcctatgtgcccgggctgtccaccaaccgtgggaggaggaggttggacgctggggagattgtccatttcgccttcccttcgtacgagaagatctatggcgggttaaagatgactgccaagaaggcggcggctctggcacagattgttcgcttttccaccaaacgagccggagagattgggaagctgtccccagagtggacgcaatgccttgtcccgcttgtcaactcgtccaaggtgaagattcaggggaagctcgtgttcccaacaatggagctgaggctgatgcaggagatattgctctatgttagcttctacatccacaaatctgtgctagccgaaatggacaactcaccctgtgacatgctcgatcatgcaaatgttgatttcactcccagtcctctccataaattgcttagtttgctcaacctaaagccatccaacaaggatgctttctcccttgacgatctcaccactagaaagctgaagcaaattctaaggggtaacaataataatggtgatgattctactccggtgcttggccatacatttctcgagcaaggcgctgatgagcaggcgatttcagaggctgccttgaacaaacttgttggcactgctgaaacatttgacttagaggaagcagagcctcccactacccttgtctctgttctaaagccataccagaaacaagctctcttctggatgtctaaattggagaagggaattgatgctaatgaagagacaaaaactcttaatccgtgttggagtgcctacaatattgcagacaggagagctcctccagtctatgttaatctttttactggtcaagcaacaacacaatttccaagtatgactgagactgtaagaggaggggggggagttctctaactgtataaaaggagacacaaggtatctaggagatcgtgcgaccagaggatacacctcaacatcctctgtgagaggaggtacccttgttgtttgccctatgtcattattgggccaatggaaggatgagttggaggcacattcggcacaaggagctctttctgtgtttgtgcattatgctggtgataaaactagtagcctcatgctgatggctcaacatgatgtcgttttaacaacctatggtgtcctctcagctgcatgcaaaacggaatgcaacagcatttttcacaggatggattggtataggattgtgcttgatgaagctcacacaatcaaatctcctaaaactaaaagtgcccaagcagcttatagattaaagtcggaatgcagatggtgccttacaggcacaccattgcaaaataatttggaggacctctacagtcttctctgcttcctacatgttgaaccatggtgcaatgcaaaatggtggcagaggcttattcagaaaccttatgagaatggtgatgatagagggttgaaacttgttagagctattcttaggccactaatgctaaggaggaccaaggaaacaaaagacaagattggcaatcccatactggttctacctccagctcgtattgaagttgtagagtgcgaacaatctgaacatgaacgtgatttctatgaagcacttttcaggagatcaaaggttcagtttgacaaatttgtagcacaaggcagtgttctgaacaattacgctaatattctcgagttacttctccggctaaggcagtgctgcgatcacccttttctggttatcagccgagctgaccctaaaaagtatgctgacctcaaccagcttgcacagcaattccttgaaggggtgcagcagagttcgtctggaagacagaacgtagtgccttcactggcttatgtagaaggggtcgtcgaggaaattcgccagggtgctacgatggagtgccctatctgtctcgagtcagcttcggacgatccagtgctcacgccttgcgcacaccggatgtgtggcgaatgccttgtttctagctggaggactccagacggagggccatgcccactctgtagacgtcacatcagcaagtctgacctgatcatactgcctgctcagagtcgtttccaggtggatgccaagaacaactggaaggactcgtgcaaagtgaaaacgctcgtaacgatgctggagagccttcagaggaagcaggagaagagcatcgtgttcagccagtttacttccttcttcgatcttctggagatccgcttcacccagaagggtatcaagttcttgaggtttgatggcaagctgagccagaagcacaaagagaaagttctgaaggagttcagtgagagccaggacaagctggtgctaatgatgtcgctcaaggctggaggtgtagggctaaatctaactgctgcctccaacgtttttatgatggatccgtggtggaatccggctgtggaagagcaggctatcatgagaattcaccgcattgggcagaaaagagaggtccgagtcaaacgcttcatcgtcaagggtactgtcgaggagcggatgcagcaggtccagatgcgcaagcagaggatggtttctggggcgctcaccgacgaggagattcgtggcgctcgcattgagcatctcaagatgttgtttaaataaatgatcattgccgatgtgtatagctgacgctacgccgttgatactttggtagtgtcaagtaggttgtcgagggcatgtttggtaggagtaagatctgggtttagaccattgtagatggggatggccggatgggagtgggtggaaccttgcccttccgatatgacggtcttcctttctaacgtgaatcagactggcatagagaatgggcattttggaaaacatgactacgataaatcacttttctcttgagtcttggattgcaggtgttaatctgtcatgttgttcttgttttactccctaccctttctgtatgctgtgccttttgttctctccttcagacttcccaggaatactgattctagtatgtccactaaggtatcttttgatcttgaaacatcatccttcgtggctgttgatggcatataatagaaaagcttttggg

SEQ ID NO: 25420 - DNA, 2841 bp, Zea Mays
gagacttattttataaacttgatctcacaaactttctcttatttggtctctgtatgatggaattatgtcattttataatctctgttcattcagtcaatcgttgtgaactctcttctaatcgctcacttcattggctgtgttgtaccaagacatatttgcatggagtaaacaataacatcagttagccaaatcaaaaaatatattatacagagaggggagacaatcaataaaaaaatcttgaaatttttttgatggatagtttacgtgggtattgttgtaagccgtcacaacgcacgggcaaccgactagtattcacatcaaggacagctaatattttgaccaaaatctcaaggtacctgaacactgaagtagcatactattagcagtccggtgagtgaagctactgatactgaagacgcgggagaagaaaagacgcgtccagtcgtaggcgtcgtccgaacaagcgtgttcatgggccagagtgtgccaaatgagttctagctttaggcgagtcggccaaatgagtgtgggctccgtcccagggtagtataagtactatgagtctgtaataatcaggacaagaagaatttgggtaaaggaatacatctatcgccatcttcctgtcattctctcccacacgctactctcttctctgatcttctctccctcgaatcccagtagcatccagtagctaacatctgatatcagactagcgcaatccgggatcgtcatccgcgttcgattgctgtggtcggaatggaatccgcgatgcatcatattctggaagctttgggtcagatggaggagcgattgacggcaacgctggaaggcagatgcggcgcactcgagcaacgcaacacaacggccatggcgcatctgaggcgcggctgcgtcgggctgggcgatggcgcgtgcgcgtcagtggccacggccatggacaacttctccttcgactcgttcaagggccccaccactaccaccacctccgccgccgccgcgctacagtacgacaacgacgagctggtcctcgatgcagggcctattttcggtgaggaacctatcttcgatggagagtcgtctccgtccacgaggttcgactcgccctcgccgttcaacccgtactacttcacgctgccgcagacgccagctgagctggtggacgagccaaaccacaacgaggcaagtcctctgtctctcgtccacgacgactgggtcgacctcttcctccagaccggctcctgccccgagtgctcgcgatactgcctcctcctggaccacatggccctcggctacttcccctactctgagctcgccgccgtgcccaccaagtgttcaatgctggtcctcaaccgtggcaccgacgaagggggcaaccttcaattgcaacattccaccacctcacagctgcttaacagcgggtacctgttcgacatccggccggacctggtgaagggcgactctgtcgtgctgccactggaattcgcttccgccgtagagggtcgcgtgttgctgacgacgtggtggccacaggatgcggcgctccagcatgaggcggttggggtgtttctcactcactccaactggaactcctcccaagagagcctctgcgcgggggtgcccatgccgagcgttcgtgctccagcaggtgttgttcagtgctcgtcaacagggccacccgtgttcacgctcatcaacagggccaccggcctcgccatcaagcactcgctcggccagttccatcccatgctggtcccttacaacccggagtacctggataggaccctgacatcaagtttatcacacatgcttccatatgcaaagacattttcagctgctgatggacgtttgccccaatggcgcgcttctgagtatgatgttgaatcaagtttctctagtgatgccatcctaaaggtcagtgcggctgctgaaacagtcgagaaagtttaccaggggcaattggttggtccaaccacatttgcagcaaagttgcagccttatctttggagttttaatcaggtgaaagagaacatcctcttccagcacatcaacgttgcctgtggctactaccctgttggaaaggggtttgtgctggtagctgacaacttgggtgatggcctctttgctgtcagcaatgagtttcactcagtcatcgtcgtatcccagaatattgtggaccatatccggccaaggtttttcactgctaatctcaccaatgcaacctcaattgatgatgcgattgtttggttctgttctgcaaccaatgccacacatgctgtttcgaaactttaccaccgtgaggcgacgaaccagaggttgaaggtggcagaggcggccatgaggagccaggacaagaacgccatcatggcagacagctggtacctcccgcagaacgtcggggagctgtgggatccatggagctggaggaggaggtcgatcaccgcggcgctcgagcaggcggcggcgaacgagactatcgacagggcctgcgagatttcagatttgcacttgaactctttttttttaaaaattttgaattggcacgccgggacgcagaagaagactgtagagagatacgtacgcagtctcctaccacgacgatgaccatgacgcccggcacgcgcagagggcatcccacgaacacggagtacacgtcgatcatggccagcgtgcagctccaggggatgaccagccccatgatcgtcaccaggaagctgtttagcagccagcgtcacacacacaggattaggacgaccgcccgaccacacgttcgatcagcctgacggccttcagcgctggcgctgtggctgaaataccaaaacagatggcgcggatgcaacagag

SEQ ID NO: 25421 - DNA, 1558 bp, Zea Mays
aggcaggtgcttgtctcctagctggaaccctcccgtgtcgacctcaccccaccgcgcagccctgcacggccgcggtcgcctataaggctagcccagccagtggtagcacgcacagcacagcagccgccctgctcggcgtaggagcagcccagagcgagcgagacagagggaaagagacacggccagccagggcgggggaggacgccgcgcagcagcacgcgatgagcggcaggtgggccgcgaggccggcgctcttcaccgcggcgcagtacgaggagctggagcaccaggcgctcatatacaagtacctcgtcgccggcgtgcccgtcccgccggacctcctcctccccctgcgccgaggcttcgtcttccaccagccacccgcccttgggtacgggccctacttcggcaagaaggtggacccggagcccgggcggtgccggcgtacggacggcaagaagtggcggtgctccaaggaggccgccccggactccaagtactgcgagcgccacatgcaccgcggccgcaaccgttcaagaaagcctgtggaagcgcagctcgcgcccccgccgcacgcccagccgcagcagcagcagcaggcccccgcgcccgctgctggcttccagaaccactcgctgtacccgtcgatcctcaccggcaacggcggcggcggggtaggtgctggtgctggtggtggcacgttcggcctggggcccacctctcagctgcacatggacagtgccgctgcctacgcgactgctgccggtggagggagcaaatatctcaggtactctgcatacggggtgaaatctctgtcggacgagcacagcacgctcttgtcgggcggcatggatccgtcgatgatggacaactcgtggcgcctgctgccatcccaaaccaacacattccaagccacaagctaccctgtgttcggcacgctgagtgggctagacgagagcaccatcgcgtcgctgccgaagacccagagggagcccctctctttcttcggcagcgacttcgtaaccgccgccaagcaggagaaccagacgctgcgccctttcttcgacgagtggcccaagtcgagggactcgtggccggagctgggcgaggacagcagcctcggcttctcggccacccagctctccatctccattcccatggcgacctccgacttctccaacaccagctccagatcgccgggtggaataccgtcgagatgaacgagtaccgtgcatgtggatcccagcgtcttagggttgacgactcttcggtgctggcctcgtcgtatcatgctcctaaattttcgaacgatatatgccttatgtaacgctatttctctcattgttacaacaccctttacccgtttggaattgtgttgaagtggatggtctgcgttgctcggttgttcattcgaccttttttcaatttggaaactccgtttctttgtactcagtgatctgtgcaagtgcaatgattcggtccatgcatgtctctggcttgcactgcatgtgaaagattaatcgctgcatgcatcagtaactcgatcgaaaatgttcac

SEQ ID NO: 25422 - DNA, 3420 bp, Zea Mays
ccgatctggtttatacgaacgtaacaccgaggaactacgatccccaacggcccaattcaacccgccccacgcgacgccgaccgcagatccttcatctctttcctccctcgtaggcgaacccgactcaaaccctagccccctctccttgccatccccgcccatggatcgcgatcgctcctcacggcgcactcgcaacgacgacgggcaccaccgatcccgcggccgggacgacgaccggcaccgccgccgtagtcgccacgacaccgaggatcaccagcacgacggtggagacgaggaccgtcgccaccgccgccaccgcgacaaggacggtggcagaggcggcgaggatgaccgccggcaccgtgaccatcacgataaggacgacagccgttgccaccgctaccgtgacggcggtgacgacgatcgccgccgcgggaaccgacgttccgtttccccgtccgagtccccgccaccctcggcgaagcgggaccgctcgtctagccgcccccgggagcttgtcgagcgccgcgactccaccgaccgcgagccgcggtcgccgtcgcggaagagaaaggggcacgagggcggtggcgacggggacgagcccggccgcgaagggggcaagcgggccagggcctccgtagacccgcctccacccaaggaggagaggcctaggcgggagcgccggaggtttgaggatgtcggtgcgaatgggaagaatggtgatgtgagtaagtcgagtaaggaaatctcatctcatgggcagaagggggagttatcaattaacggagattcacagaacggcaatgggcctaatgctggttctcagcaactgctcagtgccgttcctatgccatcttctgttcccattccttcaaagatggaagtgcaacatctgctgctggcaaaagtagtaacctatctcttgatgctttagccaaagcaaaaaaagctttgcaactgaagaaggaactgtcagaaaaactcaagaaattacctatgcttaataataagcttggtacatctgttactgctacacaagtttctaaagaagaagcaaaaacttctgtatcagctgtagatgcacaactcttttctaaaggagaagcaaaacctactgatgtttctgttctgccaactagtaccatctctggaacgccggccgtaggtggtgctatcggtattccaggtcttacgaacattcccaatcttgaatctgtgaagcgagcccaagaacttgctgctaagatggggtttcgccaagatccacaatttggtcctcttatcaacttattccctggtacatccactgaagttactgtgccacaaaggcctgcaaaggctcctgttcttcgccttgatgcccaaggtagggaaattgatgagcagggaaacgttatcagcatgacaaagccaacaaatctgagtactctgaaggtcaatataaacaagcagaagaaagaggcttttcaaataatcaagccggacttggactctcttgcaaaatcaagtgttcattttgatgaacggatgggcataaaccaaaagaagctccttcgtcttaaaaggccaggatttcagttcgttgaagagggtaaactcactaggcaggctgaattgcagaaaattaagagtcaatttggtgaagcgcaagctaaagagctcaaagtaaagcaagcccagcttgctaaggcaaagacagaagtagacatgaatccaaaccttattgaggttgctcttggtgtgagagctccaaaacaaaagcagaaggaagagatccctgaaattgagccatgggatgcaaaaattttactttctgccacatatgaggatgtctctgtggagaaacttaatttggacaagatcaccatatatgttgaacatccagaaccatatgatccacctgctgagcctgcaccaccgccgccccagccactgaagttgactaagaaggagcagaagaagttgagaacacaaaggcgtcttgctaaggaaaaagataggcaagaaatgattaggcaaggcctcttggagccacctaagcccaaggtcaaaatgagcaatcttatgaaagtgctaggctctgaagctgtccaagatcccacacggatggagatggaaataagaactgcggctgcagagcgtgagcaggctcacgttgaccgtaacattgcccgcaagctcacaccatctgagcgccgtgagaagaaagaacggaagctttttgatgatccaactaacacagtggagactatagtttgtgtttacaagataagagacctgtcccatccacagacacgcttcaaagttgatgtgaatgcacaagagaataaactgacaggtgctgcggtcattactgatagtatcagtgttgtggttgttgaaggggggaaaaagtcaatcaaaaggtataataagctcatgctaaaccgtatagattgggctgctgctgttggtggtgatgaagacgcagaagcagaagcggaagctgacaagccagtgaatagctgtgaattggtctggcagggtagtgtggcaaagcccaccttccacaggttcactgtacataactgccggagtgaatctgcagctaagaagatattcgttgatgcttctgttcctcactactgggatcttgctgtcaattcctcggagggttctccctgagcaaagcacctgttcagaaccttggtagctactgctgatctttgctggctacatgctagttatgtgtggccagtgttatagcgcttgttatggtaagacccttaccacgagtatctacatcaatggcctcatcagttgaagtactgaactcagtaatgcctggtgttagggggtgtttatccctccattttatttcatttgtccctagattgccaaatacagccatatttgtcaatttaggaactaaaatggaataaaatgtagggactaaaaattagtccctataaaccgaacacccccttaatctgttgtgaacatgctatttcagagatgttattgttggattttcctgtggcctagaaactgttatgtgagcaactgttgaattttgcacgctcagcgtgcatttggaataaaccaattgcatcaaatgactgcgtgtatttagtattgttgcggtgtgaattgcgggcagtgcctgcacatcaattacaaattcatcaacttgtgtggatgtttataatggttcatcaattttaaaagtataattctggatcaataaacttttcaagctcccttggctcgaatttttttttcaagttgtttaacgtactcactcggtcctaaaagaccatctcaagttgtttaggcacacaattacaagttcatcaacttgtgtggatgtttataatggttcatcaactttaaaagtataattctggatcaataaacttttcaagctcccttggctcg

SEQ ID NO: 25423 - DNA, 1700 bp, Zea Mays
tattttggcgacgtagaccgtcccagaggttgctttcatggcatcttgatccattaattcttaggcatgatctctcagcaatgctccaggaggtaattagaaggcccttgctttgcctgagaaaggaattgtataatcggatggaatggcgtatcatcataatttgcctggtttgctgcccaacaatatttatggagatgagatcactattacacttctggcttctagcaacgggtttgggttctgtgctagaacttaacaatgcattggtatcatcagcattagacattcttctcaagcctatgtcatggggaatatccatagaattagggcagagatttcccttttctcatgcttacttcccaagccaacaaagtgacttgcttgcgatactaactggacccttatcttataaaggttttttggacctagtttcttatattagtgccttggttcatttggacaacacaagaactagatgctcttcgcagaaaaacttacaattacaaccatcgaagggattggtaaaatacaattctgcttggtacatgattattagtttccctatttggttcagttatgcaactgctttacttttccacagagaaggctcacaagattatttatcagaaacattatccaaagagataactgctgaatcaataagtgatgtcagtcttgttcagagggcagccttttacctttcttggctgctatgcccttataatcatgatcaacgcgagatgctatcaaacaatattttggaaatatcacattcttgggctaggaacaacaaaaagtgcgtaagctaccaaagtactgtgaataataggaggaaactgcgaatacccacagctgcggactctgagaaattccatgtgccagtcaacactataagctcccttgttaaagaatttgatgatcgctgtgtaaaatgttgtagcccaactgcctttcctcaagcacaagttggaaatctatcggacctccatcccttatactttaacctgttgcatcagtggattcctttgggagtattgcttgtatcacctagttgtgttaacgagcagaactgtgacatcctcctgcgctacacaagcactgggcaggttctggagtcaaatggagcacgagtaaaaacaaaagatgatgccactaatgatggtttcttaggcagctgcattggtactgctgagagatgggcattgactggagcatatctcatctttggctggcttgacgtagttgaggatatggccccattgatatttgattgcgaagataaatgtcatagttttgtcagccaactcagaaacaagacaggcccatacctgctcaagtgcgtgaagtcattatttaagacgttggaacagccaaatcaagataaagattttgtgattgatcttcataataggttgttaaactgggataagaacgtgcaaggctgtgagatatttggggatgttatccttgaaatgaacaagaagtttaatcttcctttgtagtagtgaccagggattctatgcagctcttaaatatttgaacgtacttaaaagattgtcttaatatgagcgtatgagaaacggctgtatgaaccttagtttttggcttttgttgagtttcaactctagcctattctaaaagatttttgttgttgtcgttttaaatatctaaaatgaatgtcggattctttgcctctg

SEQ ID NO: 25424 - DNA, 180 bp, Zea Mays
actcaatgcaggtacttgatacatgttgggaatgaggggagtagcagcacgtccacttacactctcacaataacgctgcccaggcgcagccatgatttaattagaaacttattgtcaaaggaagtttgtttttttatagtcgtgcgcactggttaattcagttcaggtcgtacgtttatc

SEQ ID NO: 25425 - DNA, 1723 bp, Zea Mays
gatgacatttggaatctgattacttctttacaccattgtgacattagttgactgtcatttgttgctttttatttgagttgcctggattgaattagtctcaggacagacataggataggacctaagatcgcattagcaaaagctaaaatggtctaggattagaagtgttataccaaatcttccatgaactccagatagcccagagtcttttataatgccacacacaaagctttcatgtgttggaaaaaaatcataggtcaaccgaactaagttatcacaacatttactcaaaccatatcagaaggcacatatgcttacataaatttcattttagttgataccaccggtcctgggtttcatgcttacaactagaaaagggttctattttttcagattatgaacataccatggaaacatgaagcagggttttacttttatatatgctagcaattgttatctgttgtgttgctttacatttctgttacttactcttttgcaggtaaaatatacagactgtggagttagtcctcaggatctacatcatgtattcacaaagtttgctcatcctcaaagtggaggaaaccgagggtttaatggtagtggtcttggccttgccatatgcaagaggtaaacgagagccctggaaataacaggaattaattcaggaaagtacacgagcaagcacccgaggtcaatgagcttacctccattgacaatggagataggaaggaatatcatgaagagaaatgaaaggaccatataattccaagaccctgatgatggccacaactgcttatattgatgattcctactcggagattattgatcctctaaagactgagctgattgcaggagagattaaaatcaaagggattgagctacaggagagttgcagtctgtcgttcttttccatgggtgtgattgagactgaaacgatgggtaccagagtgaaggagtcgaagacagttttagtagagaaagagctcgaactgatcgacgagcctcagattcaagagagccctccagttcgtgcattgttgcatgatgaggtggattttgctgaatcgtcacttgctattagagaatctgacattcccgtgaagaaggtgctgataatcgtgacaatcacttttgtttggccacaacagccatattacttgaagcccatgttttgaaagctgtattggcacttcttctatggagtcactacttatagaaaaagcttgttcctagaggtggtttctcccggcaatgcagaatcttgaagcacgtctaaagtggcttgatgatagttctaaatttcaactccctgtcattaccaggtgccagataggctgctggtcgattccatcctgaacaagttgcgccaaagattacatgaatattgcgtgccgagatctgtcttcagtaatgcgatgccatcctgaacaagttgcagcgacaattaggataggattttcccacgctttttagtcttgtgtattccttttatgctcttcatctttttttctcattatatccaccaattagatagtcatgtagactttcttttaggcgcttttgttttttatactttgtgttaccttgcttttgttttcatactttgtgttaccttacagatgtaaaaacgctcccctcccgtacattgcactatttatgaggaaaggtaaaatagcgtcatttagctttttcagtcgaggaaatgcactaatattttgtcgaat

SEQ ID NO: 25426 - DNA, 854 bp, Zea Mays
acacgtatattacaacagctgtgctgctaggcacccactccccagtcaaggcatatccattccatggatctcgcgtccctgctcctctcccagctgctgctgcttccggtggtaacggttgtctccggcgagaccgccgcgcacccgggctacgcgcacgctgaggaggcatgcagcggtatgctagaggcagaggcggagaaagcaacggtgctggtgcctgcgccggagcggcgcgaagagttcgacggcgggcggatcgtggacatcagccactactaccgcgaggacatgccggagtgggagtcatcagagggctccggcgagttcctgcagctggcgcggtccatgcgcaacggctccgacatcgctaacttctcggagctccggctcactgcgcactccggcacccacgtcgacgcgccgggacacgtcttcgagcactactacgacaccggcttcgacgtcgacaccctcgacctcgctgtcctcaacggaccagcgctgttggttgacgttcccagagataagaacatcacagctgatgttatggcatccctaaacattcctaaaggtgttcgacgtgtactctttcggaccctaaatacagacaggagcacgtcgatcttgcatgaggatttatacaggttcgggccgcttgaatgtgtaacatcctacttcctgttgaggctgtatactgaaattgttctaggttatatgaattacaaatgagttgcgatggtgctcagaggtcgtggatgatggctagtgtgtgatgggatgagctgtttttgtagagatacccctcggccttatatagatgaccagagggttatccatttacaagtcgtgat

SEQ ID NO: 25427 - DNA, 2195 bp, Zea Mays
tgcaggagcatgatataacaacacttggtttgttacttggtttggcagcatctcataggggaacaatggatcctgcaatatcaaagatgctctactttcatgttccttctcgacatccatcttctactccagagctggagttaccaactcttctacagtcagcagcagtaatgggaattggacttctatatgaaggctcagctcatgcactcaccatgaagatacttcttggtgagattggccgaagaagtggtggtgacaacgtgctagaaagggaagggtatgctgttgctgcaggttctgcattaggatttgttgccttgggtcatggcaatcgtgcatttggattcatggatactttcctagatcgactttttgaatatattggcaccaaagaagtctaccatgaaaagtacctaaatgcaacatctgccgatgatcaaagttgcaaccctggacagatgatggatggagcacaaataaatgttgatgttactgcacctggagcaatacttgctctagccttgatatttttgaaggccgagtctgaggagattgcagctagactcaatatccccaacacttacttcgatttgcagtatgtgaggcctgattttgttatgcttcgcattatagccaggaatttaatattgtggagcagaatacaacctaccaaaggatgggttgattctcaaattcctgaaacagtcaggtgtggtatttccaacatgagtgaagggactattgacagtgatgaattggatgctgaagctctttttcaagcttatgttaacatagtgactggcgcatgtattgcacttggactcaagtatgctggcagcagaaatggtgatgcccaagagctactctacgcttacaccgtctattttctaaatgagattaagcacatacctgttcgaacatcaaatatactaccaaagggattactacaatatgttgaccgtggaactcttgaactctgcttgcatcttattgttctctccctctctctgacaagccatggtggagatctggagacaagacaaatccattcaatgggggagtactctacataaagcgaaaagttggatcttgctcctactctgacgatccaattggatgtcaatcgttaatttcacgggcaatgcatgaggtctgtgatgcaccatctgctagttgcagtaatcaaccaaacagcactaatggtagctacttcagagttgatcagctagtaagcactttctcggccaatccaagcttgattgcttttgcaaaactctgctccgtgtcatggaagagcagatgcaatagcaattttcaggagttctgttctcaagtgctatatgaatgtatgagcaaagatagaccatcactgttacaggcctatatcagtttttacacaacaatagagttaatgtgggagcatttgaagactgggaattttcctttttataattcccttttccttcccaacttgaaggtcgctttggcctacaacgaagcattagttgattctagaatcacaaatggaggaattattcattcgacattcttggagtcacttatgaagcgagtgggagacatctttgcggagctgccaaacctcaaggacaacctccaccgatacttgagcacgggcacatggcctgacacacaaaacgacgtggtggttctctcgtggtacctccaatggtacaatataccacctgcccatgttgtggcttctgcagttgagaaggtcagaccgagagtccctgccggtgtatctatgctcccactgcttcgcctcctgctgccaaccacacaccttgtgggactgatggagatcgagaaggtacagattgtcatggaatgctaaaggatgagcgtggaaaattcaatcaaccttctctgcatgcgggttacttgtgatgaacggtagcaagtattgcttagtgcacttgtgatgaaatctgccagggactaagctgttctgaattaagtttgagacaaaagaatcccataatttttattgtgctttgctttagattcatattttctgcatgaattgtttcgattctacccatgagaagtactccctctgtccttatcagaggtcaaaccctctaagtttgacaagtttatagaaaagagcaaccatataaaaatgtaagtcttatatatatatttcataatatacctaataaattttatgc

SEQ ID NO: 25428 - DNA, 324 bp, Zea Mays
tttgccttctgccttgatagctgacaggaggtttggtaggaccaacttgctgatatatgggccaacttggtcagagaaaaagaagaaaagatgatttctgaagggggggttcaggcaaggtgtcatgataatcacggttgggaatggttaaggtttcaagatttgcacaggggatatttggcctagtgtaaggcataagaaggtggttgatcttggttcactgggcctatacctgaataacttgcacagcacagagagctcgcatttcgctttcctttgtggtcagagatccacatccgacaagagggggggggggggggggaa

SEQ ID NO: 25429 - DNA, 4465 bp, Zea Mays
ctcgtatattaaccccgcctctgcctctcttcccctctttccccccgtctccgcctccctcccaccgccccacggccccaccagattcctccgcaccgccatggacgacctcgagcaggcaatactgctggcctccgactctcccgccgccgccgcggcgtccccgtccgtccgcgcggaggctctcgccttctgcgcccgcgcccgcgacgagtcgccgccgtcgtcgctcctccgcctgtgcctctccggcatcgcctcctccccgcacgcgcaggtccacttctggtgcctccagtccctccacgacttgctcctccgccgccgcctcgtgctccccgacgacctcgcgctgctccgatcctctctcctatcgctggcggtttcctctcacgccgcgtcgccgcctttcctccgcaacaagctcgcgcagcttgtcgcgctcctcgtccgcctcgactacccccatgtctacccttcctacttcctggacctcctcccgcccgcgccgccgcagcccggccccacggacatgttcgcgcgggttctaatctccctcgacgacgacctgctctcccaggagtacccccgcagttctgaagaggccgccgacgctatgcgggtgaaggattccatgcgcgtgcagtgcgtgtcccagatcgccagccactggcacaccgccgccgtgaccctccgtacagccgaccctgcggttgcggcagtggcccttgacgcggcgcgcaggtgcatttcgtggatcgatgtcggactggtcgccaatgatgtgttcgttcctcttctctttgacattgccatgtcccctgcaagcatgcctccgcttgctgctgcagcggtggggtgcctttctgctgtggcaacaaagaggatggatttcagggcgaaggtgggattgttgaggtcactcctggctgcacatcaggggcttggtagcccagacagtggggtgaagatggcacccttggtgacaacatatgcagccgaggctctggaatgtcatcgcaggcttggccctactgatgctgatggagctgcagcgttggagatgctggaagaggtgctaccagctgtatttgcagctgcagagagcggtaacgatgaagatgtggattctggttccgtgcttgagttcttatctggctatgtgagcataatgaaggcaccgtctgagaagcagttggcgcacttgggacggatcttggatctggtgcgggtgcagatgtcatttgatccagtatatagggggcaccttgacgtgcttgacaagatagggaaggaggaggaggacctcatggcggagcaacgaaaagatttgattgtattgttccggagcatttgtcgtgtcgcaccagctgccgctcagctgttcataagagggctgattatgacagctctctcgtctgcagaagctagtgtggaggatgttgaggttgctcttaccctgttcttccggcttggagaagctgtgggtgaagaggagattcggagtggggcagggctcctaggagagcttgtgcccatgctcctttcagcgaggttcttgtgtcacacacatcgcttagttgcattggtgtatctggagacagttacccgctacatgaagtttgtacaggagcatgtgcagtatgtaccacacctgcttggtgtgttcttggataaccgtggaatacaccatcagaatgcccacgtgagccgtcgtgcaggatacttattcatgagggcagtcaagtcattgaaggcaaatctagtgccttacctggataccatattgcagagtctgcaagatgtactaagtcaattcacttctatggattgggcaaacaaagatactaagttccccagctccgaggatggcagccaaatttttgaggctgttggattattgattggcattgaagaggtatcaccagagaagcaggctcaatgcttgactgctcttctaaatcctctctgtcaccagattgagtcacttgttatggatgccaaagcacgagggcttgaggaatcattaccaagagctattagtcttcaacaaatcattgttgcattgaatatggtcagcaagggctttaatgagcgccttgtgatggtaaataggccagctattggggtcatgttcaagaaaacccttgatgtagttttgcaagtccttgtttcatttcctagtgtaagacctctgcgatctaaggtgatatcgtttctgcatcgtatgatcgagatattaggtatctcagtgcttccatgtattccaatcgcactgagacaattgcttcttgataacgaggctaaggatatggtggaatttctcgtattggtaaatcaaataatctgcaaatttaaatcgtcagctagcgccatattggaggaagtcttccctactattgcaagtcatttgtctgtgatattatcacaagatgcattttcagctggtcttgcaagcaatactgaggaaatgcgagaactacaagagttgcagaggacattatacatattcttgcatgccatggcaacacatgatctttctacagttctccttacttctagctctaggcagtatctggagaccataatgcaattgcttttatttacctcatgcaaacataaggatatactgctacgcaaggcatgtgttcagattttcgtgaatcttgtaaaagactggtgctctaactctgaagataaggttcctggcttccgagtatttatgattgagaagtttgctactaattgctgtttatacagtgtacttgataaatcatttgatttacgcgatgcaaactcgcttgtcctttttggtgaaattgtgctggcccagaagattatgtatgaaagatttggggaggaattcattatgaactttgtagctaaaggtcttcctgaagttcactgcccaccggacctagctgaacagtactaccagaagttaaagggaaatgatatcaaggcattcaggtcattttatcaatcacttgttgagaagataagaccacaaggaaatgggagtcttgttttcagatagcatcattctttgattttcaatatgtcttccaccaaaagactcctcaactgtgttattcaattataggctagttgtgccatcaatgtacatagagctataatttctgagattggaagacgtattactgcggcattatctttaccaagtttggcaaccatggtggcgtccttattcattatattctatctgagatgcaggggaattcatcccacaatagtttctactttctactaagaaggaaatacatggttctactttctcatcttggcctttctccccaaatcggactgttctgctgtctgggcctgaaattttgcatggtatttcctgtgaactagttgtgtataggggcaaaaagagtgtcgtgtaggctgtgttttttcctgatgaaaaatgtcgcaccgcctgttgtgttatgagtcgggttgtaccaaattttgcgaaacggcagcggttttttgcaccccccctgttgccatctggggtgatgtacatatttttttttggcattccccattttatttcataaattcttttatcgcctactccaatctgatgatgcagtgataagagagcatgacatgtcatgctctgcaaatgcgatggtacttggaacctctaaggccctttggaacttctaaaactaattgttagctactaaaaattagttgttaggctccaaataccatcagataatatcacagctaattgttagctatctcataactaacaattagtcattagctggtttaacctagctaataatttattagctggctaactattagctctaggctagctattagctctaggttccaaacaggtgagggtgggctgcttctacattagtttgttttggtctccaaagaatttgaacttctagagtgtttatttatttcaggtacggcgggaaataagcataggtgatagaactagcacactacaggactgcggaactgtgacatacgactagggcagcatgcatgtggctgtggactcggcatgaggttgctctccctcgctccatattttcttttgacctaatataaacacttaggccacgggtacacacctgcgtgccggagctggatctaccacacatcacttgtctaaggccatcttcagaagagcgtgtttatggatccgtaaaatattgttctgtactgtagattatactgtttatagagtgaaatttaaaataaaaagtgaaatattgaaataaagagtgagatagggtaggataggatagaaggccgccggagatagcctaatcatcgtttgtttgacacagatctagatgatcaatgttaatagaaataagcttatcgttccaactagttccggagcaaacggatgatgcctaattcatataacatttgataagttgtaacagttctgagatgattatttctagctagccgaacaagc

SEQ ID NO: 25430 - DNA, 3496 bp, Zea Mays
tcgccggcggcaaccgcgctggacgaggtagcgctgctatcaaagtatcaaacaccttgtgctgtcaacatttatgagtgcaaggcagtattgctaagagtatcttgccatggcatctcctgcttccgtcaccaacctcggaagcaatgggaggtctggcccgctcccggctgcagctgcaaggagggcgcagttggtcacaaggatcagattcacggggttcgatggcataaggcgatggcagtatgagcctgggaggctttgcaggtgtatggtcgtcactaatctgattgaggagaaggttgttcagttctcgtcaagagggagtgtcagtgtgaaagctgatgatgacaatgatctgcttctgaagccgccacagaagccagtccggtcaaatggacccccggagagcatgaaaacagcatcactgccggatcagaagccagcaggggcaactttagacgacagagagaaggtcagagagtcactggacgctgtattggagaaagcagagaagcttgaggcctccagctttggtaatgcagatggtggcaaccttggttcaaggcagagtaatgtttccatgagtaatggtccaggaccgacagcagtggaggaaggtggtaattcaaggaagacaaaaacactaaagagtgtatggcggaaggggaaccctgtgccaactgtacgtaaggtcattagagagcaaccaagaactgaaacaaggagtcagtctatacctgtggctaaaccttcagtgtcatctgcatctaagccttcccctctgctactatctaaaccttctgtagcacagcctcctcgtcggcctatcaagtctgatacatcaaatgagaaaaaaggacccatccttattgataaatttgcttccaagagggcagcagttgatccgattgtacctgaggaattgttagaccctctaaaaccagtacgaggcccaccagcaaaagtcagagttgatcgtcgtaaaaaaccagacacacaagctggttccagacgacgtatgtccaatgatgatggattagttgatgaggatactactgacgtgccaatttctggtgttccagtgcgcaagggtaggaggtggagcaaggcaaaacgccgcgctgcaaggctagaggctatgcaagctgaagagccagtcagagttgagatccttgaagttggtgaagaaggtatgctgattgaggacttggcatatgagttggcaattggtgaatcagaaattttacgattcttatcggtgagaggagttatgcttgacaatgttcagactctagataaagatttggttaagatggtttgcatggaatatgatgttgaagtactagaaagtggtcctgtgaaagtggaggaaatggctaagaagaaggagttccttgatgatgaagatttggataaattggaagtgaggcctcccattgtgactatcatgggccatgttgatcatgggaagacaactctgttggattatatacgcaagagcaagttggtggcatctgaagctggtggtataacacaagggattggagcatatcaggttcttttaccagtagatggaaaccatcaagcctgtgtttttctggatactccaggacatgaggcgtttggtgcaatgagagctcgaggagctagagtaaccgatatctgtattgttgttgttgctgcggatgatggtgttcggccacaaacaagtgaggcaattgcacatgcaagggcagcaggggtgccaattataatagcaataaacaagatagacaaggagggagctaatgcagaacgagttatgcaagaactttcccaaattgggataatgccagaaatgtggggtggtgataccccaatggtcgagataagtgctcttactggggataatgttgatgaacttctggaaactgtcatgcttgttgcagagttgcaagaattaaaggcaaatccacataggaatgcgaagggcactgttattgaagcatgccttgacaaggccaaagggcctcttgctaccttagttgttcagaatggaaccctaaacaaagctgatattattgtgtgtggtgaagcttatggaaagatccgtgcattgtatgatgactgtgggaagctcgttgacaaagcaggaccatccaatgcagtgcaggttattggcctcaataacgttccccttgccggtgatgaatttgaggttgttgacaaccttgatgttgcacgtgaaagggcgaatgggcgtgctgaagcactgcgcatagaaaggatatctgcaaaagctggggaaggaaaagtcacactctcagctattgcagcatcggtttcatctgcgaagcaagttggaattgatacacatgagctaaatgttatccttaaagttgattttcagggttcaatcgaggctattaggcaagccatccaaactcttccacaagaaaatgtctctctgagattcctccttcaaggtccaggagatgtgagtgttagtgatgttgatctggctgttgcttcggaaggaattatatttggctttaatgtcagagcaccaggatcagttaaaaactatgctaagaagaaaggtgttgaaattcggatgtacaaagtgatctatgatttgattgatgatttacggaaggccatggaaggtcttctcgaacccgctgaggaggaagtaccaattggttcggcaaaagttcgagctgtctttagtagtggcagtggaaaggtggccggatgcatgattacaacaggaaaagttgttcaagattgtaatgtgcgggttcttcgtaaagggaaagaagtatatgtgggttcgcttgattccttgagaagggtgaaagaaactgtgaaggaggttggtgctgggctagagtgtggtattggggtagatgacttcgatgaatgggaggaaggtgacatcatagaggcattcaataccgtgaataaggcaagaaccctcgaggaggcctctgctaccgtgactgccgcactcaaggatgcaggggtccagctgtagaattggcaacacgctgatactcttttttattaatgctgttgtgagctggaccggtggaccgtttccctgattccttcggtggtggctgaagctgaatggtgagctgctggagagtggagacgtggagtggtggccggtgggcgcctgggcggtggctgccggctggtgcagactgtgcacttgtgcagtgcagtggcgctaatatattgtgtgtggctgtggaagatgcatgtgtggatcggctgtctgtagtgagatggaagatactgtatatagcatatcaaaccatatattcatcgtatatacattaattattgatattgaattttgtcggtcaagcgtatgggccggccaagccaaactgtatttgccgaaagccgcttttgaatcgccgggagtggcaaggcagctagttggggtttcacacgcagcaggtttagattagaagtttgcacggttgcaaaggtttggtttgca

SEQ ID NO: 25431 - DNA, 2982 bp, Zea Mays
atgcaagatgcaactaatggttttttgtgtggccgaggggatgatcaccgaataatgatatattatcctagttctgctggtggtggaatgaaggaattattcagaaaggtgggtaaccgatctagtgaatttcatcctgatgttaggagagtgagacgtgaaggatcctacatatacgaggaattcatgcctactggtggcactgatgttaaagtttacactgttggcccaggatatgcacatgctgaggcacgtaaatcgcctgttgttgatggtgttgttatgaggaaccctgacggcaaggaagtacgataccctgtacttttgacccctactgagaaacaaatggcaagagatgtctgcaatgcttttagacagatggtttgtggttttgatctcttaagatgtgatgggagatcatatgtctgtgacgttaatggatggagctttgtgaagaactcatataagtattatgatgatgctgcttgcatcttgagaaaaatatttcttgatgcaaaagctcctcatctttcatcaaccatccctccaactcttccttggaagtctgaaccagttcagcccactgaaggtcttacacgacagggaagtggaattattggtacatttgggcagtcagaagaactgcgctgtgtaattgttgtaatacgccatggcgatcggacaccaaagcagaaggtgaaattgaaagtgacagaagaaaagcttctgaatttgatgttgaagtacaatggtggaaaaccaagagttgagacgaaactaaaaagtgctgtacagttacaagacttgctggatgctacaagacaacttgtaccaccaactaggtctggtcgggagagtgatagtgatgctgatgatattgagcatatcgagaaacttcgtcaagtcaaagcagtcctagaggaggaaagtgcagctaaagccattgaaatggataaaagttccaaagcgtaatggtgatggtgaagaggaacgaccgattgaagccctgatgattctgaaatatggtggtgtgctcacccatgctgggagaaaacaggcagaggagctgggaagatttttcagaaataacatatatccaggtgaaggaactggtttgcttcgtctgcatagcacttatagacatgatttaaaaatatacagctcggacgaaggtcgtgtacagatgtctgcagcagcatttgcaaaaggccttcttgatttggaagggcagttgactccgatactggtatctttagtaagtaaagactcatctatgctagatggactagaagatgcaagcaccgagatggatgaagctaaggctagattgcatgagattattatttcaagtgagaaagcaaagaacacagaagggccagtggaatttccatggatggttgatggtgcaggattgcctgcaaatgcttcccagctcctgcctaagatggccaagttgacgaaagaagtgacttcacaagtaaagctgcttgctgaaggtgaagatgaaagacttgcgttgacgagcacattttcaaaatatgaccaggcaaaagctcttggaaagacaactattgatgtggctcgtattgctgccgggttgccatgtggtagtgaaagcttcctcttgatgtttgccagatggagaaaacttgagagggatttatacaatgaaagaaaggaccgttttgacattacacagatcccagatgtatatgattcctgcaagtatgaccttttgcataatgctcatctcaatcttaagggtttggaagagctattcaaagttgctcaaatactcgctgatggtgttattccaaatgagtatgggatcaacccaaagcaaaaactgaaaatcggctcaaagatagcgcgccgtttattgggaaaaatcctaatcgatctacgcaacactcgtgaagaagctatcagtgttgccgaaccaaaatttattgaagacgaagctctattcctaccaacaaaagaagcagagcaccagcagaaggttcatgttagaaatgaggatggaagaagatctagctctacgagtgagaagtcattggaccaagaagatgaagatgatagagaaactaaataccgattagatcccaagtatgccaatgtaaggacacctgagcgccatgtccgcactaggctttacttcacatcggaatctcatatacactcattgatgaatgtccttcgttactgcaatttggacgaaagtctacaaggagaggaaagccttgtctgccagagtgctttggaccgtctacatagaactagggagcttgattacatgagtaatattgtgcttagaatgtttgaaaacatagaggttcctttggaagatgagaagaggttcaggattgaaatgacgttcagtcgtggcgccgatctcagtcccctagaggacaaaaccagtgaaagttcttccttgctccaggagcacaccttgcccataatggggcccgagagactgcaggaagttgggtcctgcctgaccatggacaagttcgagaaaatggtgcggccattcgccatgccgccggaggacttccctcctgccgctccgccacaagccttgggctacttctccaaaggggcaggggtgcttgaaaggttggctagcctctggcctttccacaagagcgctaacgggaagtagctggaagctaacaaatccctgaaaccagttcatgtggttattcttgttctgtaacactttctgcacgccagcccaattttgacgatctgaatcatagtgaaaattttgctggttctttttcatgagcgcgagacataattgtgctatcatgttgcttgcatggatctgagatttaagggtgcgtttggttgctggatagccaaaacaggaatgtcccctggtatcctctcttgtccctccaattttaaggaacaactggggacaatactagaataattctgtctcaatccttgatcctgaactaaacaaacttattt

SEQ ID NO: 25432 - DNA, 5531 bp, Zea Mays
aagaaaacacaaacaccttagaatcggcgattcagtcccccttgagtccccgactccccactcctgtctcgactctttacctaagcttctgctcggccccatccccgtgcgtctcctcccggctttcgtctcgctctgagctcgcctctaccatggcgactagggtttagtagcgccgcagcctccatcactgccatcctcaactccgtaccggatccggaagaggcgtcggttcgtcctcaacgtcgccaacctccgctccccgtcgtcctcaccccctctatctcgtcaaggcttgatatttaacgggctctgggcagagtttaacaagtttcagcaatggggtttgataatgaatgtatcttgaatattcaatcccttcctggtgaatatttctgccctgtttgccggacacttgtgtatcccaatgaggccctacaaactcaatgcacacatctctactgcaaatcctgcttggcatatgtagtggcaaccacacaagcttgtccttatgatggataccttgtaacagaagctgattcgaagcctcttatggaatcaaataaaactcttgctgagactattggcaaagttgcggtctattgcctgtataataagagtggctgccaatggcatggagagctatccgcctgtaccacacatggtactacttgtgcatatgggaactctcctgttgtttgcaatcgttgtgggacacaaattgtgcatcgtcaagtacaagaacatgctcaactctgccatggcttacaatctcaaacccaacaagctgatggtagtcaggtgcagctagcggcggcaacaactcagccagtcacccaagacccatcacttgcttcagctggatctgctgcacctgcagttacaaccctaccaaagccatctttaactacagccacagctgtaacaagttctgcaacagcaacaggaggggcagctggtgcaaccacagcagcagtgccttcttcagccgcatctatttctgcttcccaaactccaacagctgagcaatggtaccagcagcagcagcagctccaatactcacaatattatcagcagcagcatcctggatccaacccttacatgcagcaatatcaacagtataaccaataccagcaggcgtatcagcattacatgcaaccttcaatgcaagtaccatcccaaaatgtggtgcaaggatctgcacaacctgcttcttatgttcagcctcaagtgcaatcctcccaactgatgatgcaagctcaaagtcaaccccaggtccatccattgacaagtcaaccgcagcttcagcagcatccagttcaacctcatccccaaagtcaccctcatctttcccatgttcaactacctgcagatcagtcacagcttcatcaatcaattcagtcagcccaagttccacagttccaaccaagtcatgttcctctccaaccatctggtctccaagtacaacctgcagcacatccatctgctcttactcaagttggtaaccagcaagttgctactcaagcaacggctcatcaggtgcagccacatgtacgagttcaacctccgcagcagcaacatattgttgcacagcaacaacatccacatctgcaagctttacctccacatcaaaatattcaacctcagatgcagttaaactctcaagttcagctgcagcctccacatgcccagcagcaagcttacccacaaccacaggcctatcctcaacaaacacatcatatgcacccccagaatgcttcatatacacagcagcaaacacaaggtgctcttttgcaacctgtacctgtgtcccatcaacaagcacatgtttctcatcatcctgcaccaatgcgtcctccgttgccaagtcaacagccagctttgcagccttttcagggaattcaacgtacaacacaacatggaaaacatattggatttcatgctcagtggccaccaatgggttccaacatttcttcccaggcaccaccacagggattccctgcaaactcatctgtttcttcacaatcagttcaaccataccagcaaggaatgtcttcatcacaacaggtgcattcccaacctggtcagccttatacacagcatcatgttactggcaatactggacatgttcaaacttcagctggcagatctatgactcatcttgcaccaacacagcagtttcagcaccaacaatcagcagtgcttagaactgagtcacctgctgctgcgcaccctattgggcagggttctttagatcttgaaaaacatacttcaaaatcagggaagtcagaaaatgcaattaatgctgctgtcagtgaaaataaaattagcggtgctgactcagctgccatgagacctacaaagcctcaatcaggtgaggaaaacatgaacagtgaacaaaatggttttgttggtgttagaaaagatgcagtgcaaactggcattgtatcacacggtttagatggttcaattaggagggatgggaatactgaccaggcaggtaattcacatggtctagttgtgcagggaggcaaagaccataaggcttcagatgttactaatcgtgagaaagaacaatcatttcagcaggcatcactgcaaaatgcaggggcactgggctcttatgtgcccccaggtgtggtaccacaacatccatctggaccagataaaatgcttcctcagcatattatgaatcctggtcataagcatggttcctctgaaaatatccgtcctccgttgcaacaaccatatggtttgtttcattctggaaagatatcaaggccatttggagagaaccagattcagatgcctatgtcacagcctgggggtatcagacctggtgatggtatgatccgacctcctgtggttggcccattacctggacatcatggtgcagtgttgtctccttttgatcttgaacatttgggccagccacattctctcggaatgttgaacagcaatgactttggtggtgaggggttcaatacttcaaggggtgctgcatatcccggaagacatgataatatcgaagacgatcggaaacattttccagcaccagcccttctggatggtcaaggcttgcaaagggaccctagacattttgagagagctttagttagacctgatggtttccttgattcagtacctggaaggcctccttttccaaaccatagaagtgtaggtttgcatgagggttttccaagaaaacaaaacacaactgccagtcaccctgacgtcctgtcacatggagcagaatttgatcatcacagggctattggaatgcctaatttcagaaatccaggcccatttgctcaagggacaagtggtggtcctggtgcgccccctaaaaaccagcttggctctggtaaccttcctggaaacatacaacatgcttttgcaggcccagacatccctccagctccttttaaccttggtgacatgcatccaggtgaccctcatcttgttgctgactattctcagcatggatttcctaaaactgcagcacactttggtttgggtggattctcgagaaatgggaattctggttggtgccgaatatgcatgtttaactgtgggaccgcagagaatctggatctgcatgtacaaacaagggaacatcagcaatgtgcaatggacattatcctgaaaatgaagcaagatgttgcaaagaggaaaaaactgaattatggaggccccaagtcggtcaacaacaaaaaggtttctgggaagggccattttcgtgggaataggcgctagtgttacctgattcagcttgatgtgaatttgaaggttgctactggtgcttttggacgtttcataggcaattgagagttgagatctcttcagacatcatgttcacgcggttcagagtatttgaagtggaacttgtaatgttcccaaacttttgttgccatgttgatctgcagagttcacatggctatgtttactttacgtatttttgctgaagttctgggattgcttaacatgctagtacccttcttctgtatgcgatgatttatgactactgtttgtttcaactaggctcatgctttgtctaatgcgacctaataatagaccacactgaaacttttacaaagagacatgtaattgtgtcatcagacatccagaacatggtaattttttgttggaatcttttggtaaggggctgatgggaacatgtaaaaggtactttcagtgcctgaaaattatgctagtttttcatagtttaattcaaaaaaaaaaatctaagggtgtggtgtctaaatagagttcctttacaccactaagcccaatttgcttaatgatatattttaaaattattgaatgctgattccatgatatgttcccattcaaaacaagggaggacaaaagtgctgcattctggaataaacacatgggctagagttgttgacatatcattgcatgacaacaacaaagccatccaaatcaacaaaaataatctcattaaagtggtgcctattttgtgcctgagggatccattagtgttaaagggaggtttggaagcctggaaggaaacacaaaagtatgaagaggtttgaattgggacatgtactttgaatgttagcatgagatgggagggaattgatggtaaaccttgtttggaaccaaagtatgtaggttgtgctcaaatatagaagaaaaagaaagatatcttgattttcatatgaatactagtacgtgcatcatgtatgcagagctttttgatactgatactggagttttattattcacttctagttagttagttagttattcgaggtagtgatggttttattatcatgggtttgatgttcagaataggacatcattgaaccctacaagcactaaatgttgtgggtaaaatacctaagtttctaattcactgctgctgggcagatggcttgttcagttatgtttgatatgatttttcgcatgtgatatattttgctgatggtggtgtttctctagatgtctgttttaaatcatctgtatttgctgtttgtttgctaagcagaaactggaaagtgtaggataatttccagcagagggctcctgtcatacttgcttgtttccctaacgatgatggtggatgtgcctgggtgccgactactgtttgaacgaactgatcgtgccttgctcattttctaccggcatcggatgtttttgaccgactccagggcacctcatatctaccgttgctgaggtttaaattgtaaaattcccgtcctgtagttctttaattacaactaatgcaccaggcgaacgaaaattcttgtaatgtattcacaaatatttctagagaagtttgcagtgtaaatataacaatgttcgtttcaatggagtgcacctactaattaatgtaccttttaaagtctatttaatataggagtgttagtgtaagaaaccgattttccattcagtggtgtatgactaattaacctacctcccggtgtatgtaaattattgtaatatatttttaagggcactgatgaagttccttgtgtttaaacatttctatatgaaaaattcta

SEQ ID NO: 25433 - DNA, 1797 bp, Zea Mays
gctgcttataaaagcaaaaaaaatctactcctaggtcggtcaagactcaagaccagggcggcggccgcgttccattctgcgcaaggcgacgactgcggttgggaagggaagacgcctacaaacccctctctacctctcctctgcgaaccacctgccgccggaagccctagagggctcgacccatggatccgccgcagcagccggagcctgtcacctacgtctgcggagattgcggagctgagaacaccgtgaagctagtagacgtcgtccagtgccgtgaatgtggccaccgcatcctctacaagaagcggacccgccggaatgtatgcggtctgcttgtagtgtccagcttgggcagcgtaattacgcatatacggtctacttccgtactcccaatttcgtatacgccgttcactacgaatacaccgtacgccgccgcttccacagttccacgtaaaaacgcgcaggccaggccccgcggctccatcgtgctcccatttcgcttcctttcccctaccgcatcgatggaccacgcgccagcgccccctttcgccgtgcacctcgtcaccggcggcggatcctcgtcggggatcgccctcctactgcgctccctcgccgccgcccgtgtcgtcgctcttgacgcagagtggaagccgcgccgccgcggtagccctgccgctgccgaccctgcggccctgggcgacgacacgacgccggcgtccgagacatctccagcgccgccgaagttcccgacggtgacgctgctccaggtggcctgccgcttcagcgatggtggtggaggtgagggcgagcgcagcgaggtgtttgtcgtcgacctgctttccgtgccgctcgccgacctgtgggcaccgctgcgagagctgttcgagcggcctgagacgctcaagctggggttcaggtttaagcaggacctggtgtacctctcctccaccttctccgccgccctcgggtgcgattccggattcgatagggtaagggcgtgttgaccaaatgtcgtggcaagctgcacattcatttcctggtggcaacgtcgatgtaaagtttcaagtcgggattaggatcaaccccctctggctttagcagctcttctgtgggaaatgaattaagctctgtactagcagcttagcctgcacaattgtgtagctagtgattgtaatcgcttgcactttttaggatggcattattttcgaaacaactagtttcaacccttgctcactaaccgttttagagaacatgggccaaatagtaaccatacatgtacatccactgtatattgaaaaaaataagggtcgttttgtgctgctccaacaaagtgagcaacaatcaaataccaatcaaactgcgatagactgcaaattacgtgggtcaaccatgtgttaatttcttgcatcttatgatccacattgcagtccctttttctgataaagtctaggactgagtccatacctgcaattcatccttgattacagggtaaagtctagggtttattgcagacttgcatttcatccttgatcaggggcggatctacacccttggccactcggtccgtggcctggggcttgatccatataactctacaagagtctctatttgatctaatataaaatggctaagatgaaaagaagagaatgaaattcagtaggtttggtggtcatggaaaaattctagatccgcccctgtcgtcgacaatagagttatctcccatatcactgagctattatcatactatatcatagtatatcatgtactcatcatagtttgattcatttgctcctg

SEQ ID NO: 25434 - DNA, 824 bp, Zea Mays
cctcagaacaatttgggctgacgagccgccaccctcggcccaacacatagccgtacggtttattggcgtctcgctccgtctccgcactgtcctgttgcgccggccaccacagtgcagaagaacacacagcatccgcctgcctcgccgccgcaatggccgccgtggcgagatcctttctccggtccagcggctcatcgtccctccgcagcgcggcggccagagccgcctcgcgggccggaccggttccgctgccgaggcggatacccagttctgggccccgggtactcctaagcgtgtgcctggagtccctgatgcccatgcacagcgccacggcttcggcgctcatgacgtcgctactcgctgccccggcttgcaagggattgggttggctatcagaagctggtaatgatgacttgtgacactctctagatggaatgtagcagattattatcctgtcacctcagatctacagatggatgatttgtcattattggagacctgcagtgatggtatctggtctggattatgcaatacctcgtgaatttatagtacttggttggcgtctcagttaacatgttttgtgctctgggattccagtttgtatgaaatttacataattcttcctgagatttattttggcccactagctgtcaaaaagactttggtcttgacgaccaggctgatcatgtacatctggaatgaataagcttgattaaaggcttttcacatttcacatattttgcattttagtctaagcgtagtatgttcaaatgctgatttagcttcaaaattatctcaatccacatggtttctcaaaattatct

SEQ ID NO: 25435 - DNA, 887 bp, Zea Mays
cctaaacctagcgcgcgccactctccctggcagccgccgtcaggaagcctccactccttctccctcttctctctcttctctcctccccttgctcttctctggccgccgccacttgcccggacttcctgcagccgagcgcccctgcagctccctgcaccttcatcctgcgcgctccagtcgaccgcgcactgggaccagcgcagtgcccagccgagcagcgcgacgcccggtggcgttcatgtgcttctcggactttggccgttggatggtgtactctgcgggatccgcaacctcctactgagctcccgcacagaggggcaggcatggcagccggccgtcgacaccaagcaggccttgcgcttatggcagccgtggtgctcggtcttatcaccagtggtgtcgttagatgccaaatgcagtttgctctgcatggggattttgctttctggtgtctgtcccgttggaaatgggtagttcctgagtgacgaacagacttcccatggcagctattctgttgaggatgtgcgaaaggtgcactgcagagtctgagaagtgagagaaaaaaatgacaagtgctgtttaccgctcacccatttttaaccaatgccacggtgatacaattatctgtgctaaagggacaattgtttcaactaaaccaagcaccacagttggaggccagatccttggaaggcaatattgtgaaattattgtaacttgtgtgctaaaacgagatacaattttgcctcgccctggagtgatgtcgctggtggtgcttttgtgactgatcatctctggagcttttgtgaatgatctagatctagctatctatctgtaaatgatctagttgtgaatgatattataattgtgatgcttttgtgaatatataa

SEQ ID NO: 25436 - DNA, 1934 bp, Zea Mays
gggctgccacaacccacaaggaggccagggaccaatcacagacagtcatcttctcccgttcacgtaacgtgcactagggtttatggtttagggcgaccgccgccgtcctacgtccagcggccaggttttcttctggccctctgcgctgactacaacccaccacctccgggttaggttttggatttggagacatggcggaagtggtggacaagctcaaggactacgatatcaagaaggagggagaagcagagatcctcctgcacaagaagaactccgtcttctttaatcccgtgcaggctttggctgctactgggttgcggtctctccggtatgcccgtgaagttgagggcttaggaaaggtagttgctctggacaatgataaagcttctattgaagattgcaaacgaaacataaagttcaatggtgcttccgctactagtaaggtggaagcttacttggttgatgctcgaattcacatgctgacgcatccaaaagaatttgatgtggttgatcttgacccttatggatcaccatctatatttctcgactcagctgtacaggctgttgctgatggtggtctattgatgtgcactgccactgatttggcagttctttgtggtaccaatggagaagtttgttacgcgaagtatggttcattcccaaccaagggcaagtattgccatgaaatggctttgagaattctccttgccagtattgagagccatgctaatcggtacaagcgatatattgtgcctgttctctctgttttcatggatttttatatccgtgtttttgttcgagtattcacttctgcaagtgaaataaagaatacacctcttaaactttcttacatatatcagtgtgttggctgtgattctttccatcttcaatgtcttgcaaggactgttcagaagaagaataatggtgtgaagcatgcacctgctattggacctgttgttcctcaggagtgcagtgactgtggaaagaaatttaatgtaggtggaccaatatggtcagctcctattcatgaccaagactgggtactttctactttgacaggtgttaagtcaatgaaggatagataccctgcatatgataaaataacttcagttctaaatactatgtcagaggagttacatgacgttccattgtttttcagtctccataacatagcaggcactgttaagtgcacatctccatctttggttatgtttcggtctgcagttctaaatgcagggtatcggatctcaagcacccatgttaacccacttgggattaaatctgatgccccttgggatgttatttgggacatcatgcggtgctgggtgaagaatcatcctattaaggaacagccacgtgactcacctggcacggtgatcctttcaaaatcgccaaagctagaagcaaatttttcaagagcagttgctgccctcagcaaggctcagacaaataagattaaacgattccttccaaaccccgaacggcactggggtccgaaggtcagagcagggcggaagatcacgagcaaacatgtctctctgttgggccctgacgctatcaagggtgctgtgaacggtggtgactgccagaaagaaggaaacggtgctgagccagatagtacagcctcagaacccgaggggatcaaagacgttgaggatgagccctcaaacaaacgccaaaaaaccagcgacggcgaaccagcaagcgaaccttgatttgtttgtcaatctttcgcgtctccattgtgttgtgcctgtgcttttcttgtttgtaggtggtcgatggttatttataccacctgttggattttgaacgaacaaattgtggcaggtttttattaaacttttgttgcatgtgtgatgctcctcctagtcacagagggaaaagacctattaaagcataatatatagtatagctttctgcaatgtcgagac

SEQ ID NO: 25437 - DNA, 1948 bp, Zea Mays
gcccccggcccttcctttttgggcgcatataaacgagcaacgtctcgcctttggggtcggcggggccgccgctttttagttgcgctctcccctcctctcccccgcaccctgcctgccttttccattggagcgcacaaagccggacggcaccaccatttaaagaaggccaaccaagcacacggcacggcgaagaagagaccaccacctcacactccattcacggcaggatcgatcgctatagctgctgcgcccccctgcacccttgcgtcttctgccgctgctgcgctgcggctccggcacagtctctcagaactgagtacttttgtttgaagaaagatttgttcagtcaagctttgcaaattaccatcatagtttggatgacatccatggttactttgatgagtttatggagccctggttgccgagcttatctgggttctctgacaatggaactgtaatatttgcaacaaaactttcctcatcttggaagaaagtttcaagagggcttgacaacttataagtgtcctgtgaagcctgatgacgtgttcgtgagggcgaagtgggagagcaaaattacttctggcatgcagatgtcaacagatcctaatcactacggggtatttccacattcattctgcaaccaacatgtggtttcatttcagacgagttcagttactagtgtatcaggagccataccagtttgtctagacacttccagtggaatgaatggcaatatggcgatgttgaacactacaacttcaacgattgtatccactggttcaccaaacatgagtgctgagttttcttgccagaacctcaagtatactgcaccgttggctgtggagtggtcctatccggagctgcaattgttgaatgatggcctcaacaagtatgcaaatgaaccaggaatcatgaagtacataaagatagcagccacgttaccagacaagacagtaagagatgttgccatgagatgccaatggatggcagcgagaaaagaagctacaagacgacggaaacctgaagaacattatcttggaaaaaagataaaagatagaaaggataaaatggctgagccgtcatcatggggtaccaatcctcctgttcagactgagatgagatgttcctcttctatgcctgctaacgccaaacacaatgggtttctctctgcagactctcaaattgatcatggaatgctaaatatattggaagaaaatgctaagctactcaatcaaatagaagtaaatattttaacatcacaggcccataacaatattgaacttttccatcacgcaagaaggaacatcaatggtcttttacaaagcatgagccaaattcccggaataatgagcaagatgcccccattgcctatttcggtggatgaaaggctagctagctgcatactccctcgtgctcctatggctcaagttcttggcagcagtcatttgaaagaagaacgaagagtatggtaggccactgctagacagggaagcagctcaattttcagcagcagtttgaccaaaaatatctgaagagccatgtgcttgggagtctgcatggagaagcataggtgaaagaacgatctggcttttctgatggtctcaaagctacagaagcaacatgatccacttcacctcatggcttaaagaacactgtctagcttgccttgtcaggatgctctgtattagtgatcaacaaatttgagatagggagagttttccgtaatctgcagttttcctcaccttggttgcacatatcgattcttttttgggttttgtcctggtgatcgatgttaacagaagtgtagcgtagaaattgaactttgatatgaataattagcaggaaaagcctagcctttttgtcagttactacaatggtaaccaacctcctgtgtatctagtattctagttctagtatgatgcatatgcaagcctggttctctaaacgt

SEQ ID NO: 25438 - DNA, 1198 bp, Zea Mays
ctcggctcctctgggcccacagcggccagcaaactgcctccgtcctccctgcgggctgtgccgcctcttcttcgcgtcggcgccgccctcctcccttctcttctgctgctgatggaactggatcctcgcctctacgagaacgtctctgtcagcgacaatgatgtccgaaacatagttctatcttatcttatgcacaactgttttaaagagacggcagaggcattcctatctagcaccgggttgaatttacctgtcgactatagtgtggatgtggataagcgtaaagcaatttttaattttgtgctagaagggaatgcccttaaagccatagagctgacagaagaaatggcacctaacttgctagagaatgatatggatctacattttgatcttcttagtctccacttcattgagctagttcgctccaaaaaattcacagaagctcttgactttggccagaaaaaattgacatcatttcagaaggttaccaagtatattgagaaactagaggactttatggccctcctggcttatgaagagccggagaagtcacctatgtttcatctactaagcccagagcacaggcagaatgttgcagagggcttgaatcgggctgtccttgcatattcatcgttggagagggtggtccagcaagcgactgtggttagacaatacctacagcaggaagttggcaaggcctttctgagcaagtaaatgtgcaaatggtcacttcttcagaacagggtaaccacctctccaggccatcatgtacatgtacccttgtggagtgcatacacgatgaagtagtttatacagttgaggtgttgttgacaccacttatacagttgcaatggtgttgtactttgaaaaggagggtgctgtatgctgtctgcttccttgatttacattctgttttacttgtctctctgccttagacatggcgaaagcatgtatgtatgacctgttgagctattctgtgcgttcgttcggtgaactcagttcgagtcggtttgtaattggtcttttttattactaccgccatgtgcagaggctaaaggtccgaactctggatgcgtaagcgtaacgggttattctgtccatggtactcctatttgcgatttccatatataagggactgtgaattcttcatcacttgtagatgttgatataattttttcagaaaaaaaaatgttcagag

SEQ ID NO: 25439 - DNA, 1850 bp, Zea Mays
agaagatgatagaaagacgctgatcctagccttagccaaacaaagctccgacgaggcagcggccacggccagctggcatgctcctgctgcggcgccttgtccgggccggccggtcgtggggcaccgaggcgagaggcctcgcctcgggggccccgcgggaggcggcggacgccgtggtggtgggagcgggcgtcgtcgggctcgcggcggcgcgcgcgctggcgatggccgggcgcgaggtagtcgtggtcgaggcggcccccagtttcggcaccggcaccagttcccgcaacagcgaggtcatccacgccggtatctactaccctccgcgaagtcttaagaggttccaaagttggacatgcttctcagaaatgccaaagaaaacggggtggatgatcttcagttgatggagggttctgaagctatggagatggaacctgagcttcgatgtcttaaagctttactatcacctagtactgggataattgactctcattcactcatgctctcccttttggctgatgctgaaaacttgggaacaactatatcatataacacatcagttatcagtgggcatgttggatccaatggccttgaactccatgtttgtgaaagcaaagagctgcagaattatcatgtagggtctcatgtgaacgcacaacttgttttgcttccgaagcttgtgataaactctgcaggtctgagtgcagttctacttgccaaacaatttcatggccttgaccaggaatttgtgcccactcctcactatgcgcgtgggtgttacttcaccctctctcaaaccaagagtcctttcagtcggttaatatatcctctaccagaggatggtggcataggagtccatgtcactttagatttgaatggccttgttagatttggtccagatgttgaatggatatctgatggtggaaaggaccatgtgtcatgttttctgaacaagtttgattactcagtaaatcccaatcgctgttctgtattttaccctgtggtaaggaagtattttccaaatctcaaggatgggtctttggaacctggttattctgggatccgaccaaagctttctggtcctggacaacctccttcagattttgttattcaggggtgggatgtccatggtgttcctggactggttaatttgtttggaatagaatcccctggtttgacctcaagcttggcaattgctgaacacattgtttcaaagtatttgtgatgggagtctcctatacaaagcttcattgccagatgctccatgcactgcagaatgatgaacctgacgtgtcaggaccagggttcaccaaagaaaatcgtacagtaaaaacaacattttgagctgttttttttcttgatcatttggatacttattgcatgtgactgttagaagatgaaattctatgaaagtttcagcgaaacattaatatgatggagattgaacgggtatatgacactttacgggcatggtacctggtctggactctgaatgtggactagagaattataccaagttgcttgatagatggcgcaactccacttctagttgcacaacggaaattgtaataagcccaacactgtgatacatgttggtgctagacctagacatttgtgtcggtcgggcatcacttgctgctatcgaaacatatcacgaaacagacgaattcaaaagaatgaagaactatgaattgggatatgatgcataggattggtcatattgaatcacattgagatcgactttcgttttatctatgaacgtgtggcggactggcggctggtgccatgtgtttactacctctttttgacatcttcacaaggacgtccatgatattcttggacttccg

SEQ ID NO: 25440 - DNA, 1361 bp, Zea Mays
atgcagcgccatatccgtgcagtctactccatttttgttcccctctccggtggcggcctagcgggggtgtggtcttcctcgcgtcgcctcccctcgctctcatccggtcatcagtttgaggtttcaacctatttcaccagagctgattggactcatggatgggaacaaagatgaggcattgagatctgtcaagcttgcaaaatctgcatttgcatctggggataggcagcgcgcagaaaaattaattaaaattgctcaaagattggaccctggtcttccacttgatgatttgctgagcccagttgagaaggttggcatcctgaatatttctacttgcaaagacaagactgaaagaggacaagctcttttatacccaaaaacaacaaaagaatctgttggtcctttaaatgttgataaggcttacactgaggagaatattagagtggttcaggatatcaggaaaaagaaggattactatgcagttctcggagtagagagaagatgcactgtggaggaaattaggaaggcatacaggaggttatcactgaaggttcatcctgacaagaacaaggttcctggggcagaagatgctttcaagatggtaagcaaggctttcaagtgcctaagcaatgatcagtcgcggaggacttatgatcagacaggcaccactgaggaccatgaattcaatgagcaatatcccaatgtcatgaggcggggagctgctaggcggagaaggccagcaagaagtggcttctataactatgaagaagattttgatccagatgagatattcaggtccttttatggcacccatgataatatgttccatccccagtatacctacagggctaggggaacaggcaggcaacagcaacagagaagggagcattcagtggagggtggttccagcataaatctaacagtgtttattcaccttgtagtagtactgtttattgtttcgcttgcatttattccagcgcgtcaagctgagtattcgctgcaacagacaaattacttccccatttcaaaggtcactcaaaaacaaggagtggagtacttcgtcagcaaacaagattttgatcagcagtttccacagggtagtcagtctagagagaatcttgaacggcatgttctgatggactataagagtatgcttggaagatattgccatgtggaactccaacgtcgtcaatgggccaaggactaccctacacctcgctgtgacaagctaagggagctgtctgtggcgcagaatgtgcatatgccatcagtttgatctcccgttttcatcatggaagaatattgctcatatttgcaggacagcaccgtaacctgggactgtgacaaccttctgcactatt

SEQ ID NO: 25441 - DNA, 2046 bp, Zea Mays
ggaacacactataacctcgtctgaagatgactggtagtgaacgcaagctagaaagcaacaacgatatcagctaagcaacgaactatgacaaggacgcatcacgcatagaccgacgagaactcaaagaatccgcactggcgcgcgatcgggtacagcccgcccccggcggacgacgagccggcgccggcggaatcagaacgtcccgagaagcgtcccctggacgacggcatcgttgagacgaacaaggagaacgacgcgtccctgcccgcgttgctagccgagaagggcctcagggtggccgatgacgcggcgcggaacgtgtgcagggtcgagtgcgacgtcgtcatcgtcgggtccggctgcggcgggggcgtggcggcagcggtgctcgcggcggcggggcacaaggtggtcgtcatcgagaaggggaactacttcacggcgcgggattacacggccatcgaggcgccgtcgatggagcacctctacgagggcggagggttcgtcagcacgctcagcgccagcgcgctgctcctggcaggctcgacggtcggcggcggcacggcggtcaactggtcggcctgcatcaagacccccgacgacgttcgcggggagtgggcgcgcgaccgggggctcccgctgttcgccaccggcgagtacgccgccgccatggacaaggtgttcgagcggctcggcgtgacggccggttgtgcggaggaggggctccagaacaaggtcctccgcaaggggtgcgagaggctcgggtacaaggtggagtcggtgtcgaggaactcgtcggaggggcactactgcggcagctgcggctacggctgccgcaccggcgacaagcgcggcacggacagcacgtggctcgtcgacgcggtgagccgcggcgcggtgatcctgacggggtgcaaggccgagaagctgctgctggagcctggcagtgccgcggacggcagggcgaagcgatgcgtcggcgtggtggcgaggagcaccaacccggcgatcacgaggacgctggaggtgaccgccagggtgacagtctcggcgtgcgggtctctcctgacgccggtgctgctgcgcgggagcgggctccgcaaccggcatatcgggaagaacctccacctccacccgacggccctggtgtggggctacttcccggacaccgtgccggacctcaggggcaggatgtacgagggcggcatcatcacgtccctgcacaaggtggaaggcggcggtccgggcgcgccggcccgcgccatcctcgaggcgccggcgatgggcctggccggcgcggggacgcagttcccctgggtgtccgggcgcgacatgaaggagcggatgctcaggtacgggcgcacggtgcacctcttctccatggtgagggaccgcgggtccggcaccgtgcacggcgagcggcgggtggcgtaccacctggacgccacggaccgggagaacatgcgcgacggcatgcggcgcgcgctgcgcgtcctggccgcggcgggcgcggcggagatcggcacccaccgcagcgacgggcagcggttcgcgtgcgggggcgccacggaggccgcgctggaggagttcctggacggcgtggacgtggtgcgcgggccccagtcgaaggccgaggcgtggaccctgtgctgcaccgcgcaccagatgggcagctgccggatgggcgccacggcccgggacggcgccgtggacgcgcgcggcgagagctgggaggccgggagcctgtacgtgtgcgacggcagcgtcctgcccggcgccgtgggcgtcaaccctatggtcaccatccagtccgtggcctactgcctcgccacgggcatcgccgagtcgctcaggcgcggcccggtttcacgaaaggattgagactctatttggatatgcacgtatatatccacatcaatttatttcaatttacgtgtgttaaagtggatttcacgaaaggaattgctgcagaataggtctgcagcggttcactgttcgtgtgctggagaataataagaaatggaagtgagacaaatctatcttttc

SEQ ID NO: 25442 - DNA, 870 bp, Zea Mays
gaaaaatcatcgtctatttatggcccttttgacaggatttgttgttgctgaatcaacatatacgatgtgctcaacaaaatatattaccagatgcatcagttcagggactataagatcggagaatcctgtatctttaaacatagtaatcagtacaacgctcttctctatcctccaggtcctctggcagatcctccgtgctgttaccagattgtattcttgatgtggcacatatattgcatctgcttcaacatcaagacagatgagtgggtaatttcaaatttcccatgctttggagtcttcgttcatcaattgcaggtcgtcttctcgttagctgtttcttgtagctaaaaggtgagattttccagattaactggaagaaatatcctgaattccagatgaaggaacaacctcgatcagattctgaagtcaaatttgtgaacccatatgacaagggcatgctgtgtaacataagagaatttctaaagccggaatgatagatagccaattttgagtacgaagacctggaactagaaagatgggaagtctgaagtgcgttataactggatggaagcttgtttccttgttggctatagattttcaggaatctattctgatgttgtagccgtttagttgagattccagatttatgacagcgaatctggttcagtaaactgaaccaaacacactctgaggatcattgaactccctgtagtttaatgtgcaagtaacattcttttgtaaggttactttcacttatggaattcatatcgtggtcctgcatttttcaccgtttggtctgacgttctgtgggaaaagggtcgcacctgtagggatttgaaataatttgaagggaattgccgtgcttttgtc

SEQ ID NO: 25443 - DNA, 1104 bp, Zea Mays
tcagaagaaaaggatcttttctttttgaaggttcggctgctgcgggagccaacaagctcgtgaggagaagatgacagaggatgggtacccggtgaagctgcacgtctacgatcttagccaaggcatggcgcggcagctcccggcaacgatcgtcgggagggaggccatcgaggctatttggcacaccggcgtggtcgtatacgggcgggagtactacttcggcggtggcatccaggaaggccagcccggccggacgccctacggcacgcccgtccgtgtggaggacctgggcgtgacccacgtccccagggaggtgttcgaggagttcctccgggagatcggcccgcgctactacaccctggccacctacaagctcctcaaccacaactgcaacagcttcagcaacgaggccgcgcagttcctcgctggcagcgccatccccagctacatcctcgagctgccgaaccaggtgatgaacagccccgtcggcgcgctgatactgccgatgatccaggggctggaggcgagcttgggagctggggctgtgccgcagccgccgcaattcaggccggttcttgcccctcttggcgccgccaccgtggctctgccgctgacggatgacgtggagccaggatcggctgctgctgatgaaccggaggctgccaagatagcgggcgccagtgacggcacgcccgttccactgtcagtgcagcccgcagcagcaccggcagccgccgccgctcaggcgagcgcggtgcctacggtttcatctatgttggtgcctccagacccccatgcggaggccaagagccgggtgcaggaggagataaagcgcgagtttgcggacatcatggcggccggcactgcgcgtgccggcgaggcggccgcgctggcaacgcgcagggttatggagcggcacggcgcagggtcaaaggagcaaagtctgacgattgattaggtggaactagcaagaccggtttcgacaatgatcctcctctctcatgatcaataattatgttgtacaaaatgatacatatatgcatgatcatactaagtatttggtggaaaaatgacctaagctagcaaaaatatggaagcgagcct

SEQ ID NO: 25444 - DNA, 2836 bp, Zea Mays
aagctgggcgcactgccgcagcaggcagcggccctgtgggggttaaagaagggtttttggcatctagccgtccctttctgctgcgaacttgcgttgcgaccgtgcattccgttcctctcctctctcggctctcggcgagcgagatgcagagcctaaccgtagcaagagcgcttcctcccgccgtggccacagctcggcggcggccgcgcgcgtcctcttctagcagggaagcggttttacaatgttggaagtacgaattaagtcaagaccaatatctgggaggatccctaaggttcgtctcaaggaagtttggacatacatcgctcaacaaatttgctcagaccagctgctgcatctgtttcagttgaacaagatgaagtcaatacttatcttccaaaaggtgatatgtggtctgtgcacaagtttggtggaacctgtatgggaacatcccaaagaatccagagtgttgcaaatatagttcttggtgattcttctgagaggaagctgatcattgtttctgcaatgtctaaagtaaccgacatgatgtacaaccttgtacagaaggctcagtcaagggatgattcatatacaatagcattggaagaagtttttgagaagcatatggttgctgcaaaggatcttattgatggagaagatcttgcaagattcttgtctcagttgcactcagacgtcagcaacttgcgagccatgctccgtgctatttatatagctgggcatgcgacagagtctttctctgactttgttgttggacatggagagttgtggtctgcgcaaatgctatcttatgcaataaagaagtcatactttggggcaaatgttttgcatccgcgcaccattatacctgtgatgaaagacaacattcccattgttattaggaacatgttcaatctctctgcctctggaacaatgatttgcaagcagccggccaatgaaaatggtgatttagatgcatgtgtcaaatcatttgctactatcgataatttagcacttgttaatgttgaaggaactggaatggctggcgttccaggtacagcaagtgctatatttagtactgttaaagatgttggagctaatgttatcatgatatctcaggctagcagtgaacattcagtatgctttgctgttccagaaaaggaagttgctgcagtttctgctaggttacatgataggtttcatgaggcattagcagcagggaggttgtctaaggttgaagttattaatggttgcagcattcttgctgctgttggtctgaggatggccagcactcctggagttagtgcaatactttttgatgcattagcaaaggcaaacattaatgttcgagcaatagctcaaggttgcagtgaatacaatatcactgttgtattgaagcaagaagattgtgtaagggctctgagagctgctcactcaaggttcttcctctccaaaacgacacttgcagttggcatcattggacctggtttaattggtagaacactccttaaccagctcaaggatcaggttgctgctctcaaggaaaatatgaacattgatctgcgtgtcattggaataactggctcaagtacaatgcttttgagcgacacgggaatagacttaacccagtggaaacaacttctaaaaaaggaagcagaaccagctgatattgatagttttgttcatcatttatccgataatcacgtatttccaaacaaagttttggtggactgcacagcagatacaagtgttgcatcccactattataattggttaaagaagggtattcatgtcatcacaccaaataagaaagcaaattctgggccacttgatcagtacctgaaattgcggactctgcaacgtgcctcgtacactcattacttttatgaagcaactgttggtgctggcctcccaatcattagtaccttgcgaggtcttctggagacgggtgacaagatactgcgtattgagggcattttcagtggaactttgagttatatatttaataatttcgaaggaacaagggcattcagtgatgtcgttgctgaagcaaaagaggcgggatacactgaacctgacccaagagatgatctatctggaactgatgttgcccgaaaggtcattatccttgcaagggaatcaggtttgaggcttgaactttctgatattcctgtgaagagccttgtgccagaaacacttgcagcatgctcgtcagcagatgaattcatgcagaagctaccatcctttgacgaggactgggccaggcaacgcagtgatgctgatgctgcagacgaagtcctgcgttacgttggagtggtggatacggtgaacaagaggggacaggtggagctacgtaggtacaagagggaccacccgttcgcgcagctctccggctccgacaacatcatcgcattcaccacctcgaggtacaaggagcagccgctaatcgtgcggggcccaggcgcgggcgcggaggtgactgcgggtggcgtcttctgcgacatcctgcggctggcgtcttaccttggcgctccttcttagagcttccacttacagttgtcaatttgaagaggcagatggacagtgccctgcatgatgcctccgtgtttaggcttattatggacttgctcaaagttgttctgaataagtgccaggaaataaggcctctatctatttaggcctctatcttcggggtagctgactaagtgttgttattgctacggaatccagaattctgtgaattgaaatgaattgtaccgatgaagactgtttgcttgtgtctactggctactgttatgtgtcggtgttttaaccagagggtcccaaccaacaagtgaatttg

SEQ ID NO: 25445 - DNA, 2258 bp, Zea Mays
cacgcgccccctactacccccgttgcccgtccggtccgaccccccgtaggtcgcaggcacaaaagcgacctggcccttaacggcaattcagcctcgacgccggatccgcgcttcccgactcgccgctacgtcacccgattggggctggccctggccacgggcacccgccgaggcatttataagtacgagcgcccgggtgagccagagccccacacaccgtcttcctctgttttgccagggccaacgccattactagaagtctagaagagaggtggggaggcagagacgagaggcgtagggaattcgggggagagagagagaggcagggcggtgacgagcttggactggcgatcgcgggagcgatgacgacggcggccggcatgccggggtcgccggtgggctcggccgcggcggctggcggtcccgcggcgcccgaggtggcggccatggacgcggtgatcgggtggttccgcggcgagttcgcggccgcgaacgcgatgatcgacgcgctgtgcggacacctggcgcagatcggcggcggcggcggggccgagtacgaccccgtcttcgccgcgctccaccgccgacgcgccaactggttccccgtcctccacatgcagaagttctaccccgtcacggacgtcaacgccgagctgcgccgcgtcgcggccgcccgcgccgccgcggggccctgctgctactcggaggaggaggtcgcgtccacggtgatccacgatcccatggaagacctcccctctgaggcggagcccgaacccaggccggagcaccagcaggatcctatacaccaggatccggctccggaggccgaggaggctgacggcaccgtcatcaaccccgccttggagtgtcacgaggaggcggacgcgggggctgactcctcgggagattcgtcggagcggaaggccccctctacggaagacgacaccgtcccagacggacgttaatgtcgtgaaaggcttgaagatatatgaagatgtttttacaacatcggagatcatgaaggttgcagatttcatcaatgaaattcgtcaggctggcagaaatggagaactttcaggtgagactttcatattcttcaacaagcagatgaaaggaaacaagagggagatcatacagcttggtgtcccgttatttcaacctaccacagaggaagctaattgtcacacagaaccaatcccccttgtcctgcaggctgtcattgaccaccttgttctttggcgtttaataccagaaagcaggaaaccaaacagtgtcatcatcaacttcttcgatgaggatgaacattcgcagccctacttcaagcctccccatctggacaaccccatttgcactcttctgctgtctgaaactacgatggcatttggcaggtcacttgtcactgacagcaacggcaactacaagggacctctcacactctcactaaagcaagggtccctattggtgatgcgtgggaacagtgccgacatggcgcgccacgtggtgtgcacgtcgtccaaccggcgcgtgagcatcacgtttgcaagggtgaggccatcgacgccggtggatctgagcccactcccgtcccccaccaaggccttgacgccctggcagccgcagccagccacggcctcccaggtgccggcgcccgcgtgcatgacgcagaagcccccggtcagcggcgccatcatcggttatgccccgaccccgcagaccgtgctggcgcccgcggcctggggcatggccatgcgagcgcccgtcatgatggtggccgcagcgcctgcgaggcccatggtgatggcctcgttgggcaccggaggcggcaacatcagcaagtggatgagccgcagcggcaccggtgtgttcctgccgtggacggtcgggccgaagcggtacaacaagcaccttccgccgcgcatccagaagcgccggttctctgcgatgatgtcgcccatcgaggcgcagggctgaggacctgcccgacttcacgtcgccgtcgaacctgtgttttttttttttccttgagggctttcggtccgcctgtaatttagccgggtttgtgacttgtgacaatgtgagtgagtagcggtttagcggagttcagaaccggtagaggagtacgagcgtagggataggtgaaggcagaatcagggcagggttttccttttgttttcatcctgtccccctattttccgttccgagtaaaacttatggatgttgttgtcatacatgcatcagcagctgagtttggattcccc

SEQ ID NO: 25446 - DNA, 1385 bp, Zea Mays
ttgccttctcttgcttacttgctagctcctcgtcgcagtagcggcagcggacgagcagtcgagcgcaacgccgccaatcattccttcctctgccttcctctctccctccccctcccggcgccatctcgacgctcggccccccgcgggcgggatccgtcgccacagatccgctgcctgacctgaccgcccctcatgctcgggtagcgcttttcagtttcccccgttccccgtgggccactcgacccgccgacggagcggaagggcggccccggccgtgaccgcggcgcgactcgcgaccctcccagtcccagaagcggcgtgcggcgaccgggaccggctgctggtggtgaattcgcgccggcgaactgaattcaagcggcgaatcccctcctctggtcctgtctcgagccctcggcgtccgcgcctcctccgtctcgccgccgttctcgacgcccgccgatccaacaccgggtctgcccaacagcccaagtgtttcactagtgatggcagaagtccaggatggtcattatgattcaatgtcacaggccactgatagcttgcgtgttgaacctatatatgagtcgttcctatgcccgcttaccaaacaggttatgcgggatcctgtttctattgacagtggtgttacgtttgaacgcaatgccattttgaattatttcaatgaatgtcttagcagtggaaggaggcttgtctgccctgtaactaagatggagctcagcaacactgagttaaatccaagcatagctctgaggaacactattgatgaatggatgaatcgcaacgaggcggccaaacttgacgtcgctcgtaagtcattgacttctgacagcacagaaagtgatatcctacaagcactccagtatgttgatgagatatgtcagagaagtcgatctaacaggcaggttgtgagaagagatgggttgataatcatgattgctgacttgttgaagaatagcagtacgaaagtacgccaagcggcactagggactctttgctccattgcaaaagatgacaatgaaaataaggttgagattgccgctggagacaatattcgcacaattgtaaagttcttaaatcatgggcagactcaggaaaaggagcaagcggtgtcactgttgtttgaactttcagaaaataaggctctttcagaaagaattggcagtgtttctggagctattcttatacttgttggtttgtcaagcagtaaagtagaaaacttgctcattgttgacagagctgagaagacattggaaaatttagagagctgtgaaaaaaatgttagacagatggctgaaaatggacgattgcaacccctcctgaggctgcttcttgatgggagtagggcgtctccaacgcctagccaaaag

SEQ ID NO: 25447 - DNA, 1661 bp, Zea Mays
aataaataaagcgtattttgtgtggggagtggcaatgaggaagatggcgggcacaaaaatgataaacctaacaagacggaggaggaacatatccaagacgatgctcatcgaatcgggaagaacaatcaatctgaagccaaattagatgtcaacaataatgggcaaaatgcagagaagacaggtcaaccagcagcgaacgatgcaagtgacaggatggaggaagagcttatccggcaagaaatcgatcaaggcagcaacaagaacgataccatcatggagcctgcagctacggcgccacgcaagcctatctgcgacctttccgaccccaggtacgacatctgcgagatctccggcgacgcacggaccatgggagccaaccgcaccgttctgtacgtgccaccggtcggcgagctcggctcggacggccaggaatggagcatccgtgaccagtctcgcaagcacctcgagttcgtgaacaaggtcaccgtcaagtcgctgaacgcctcccagtcgctggcggcgccagagtgcacctcccggcacgccgtccgcgcgctggtgttcgcgatgaacgggctgacgtccaacccgtggcacgacttcagcgacgtgctcatcccgctcttcatcaccacgcgtgccttggagggcgaggtgcagttcctcgtctccgatctccagccgtggttcgtggacaagtacaggctcgtcctcaagaacctctcccgctacgacatcatcgacttcaaccaggacggcggcgtccggtgctacccgcacgtcaccgtcggcctccgcagccaccgcgacctgggcatcgaccctgcgcgcgccccgcggaactacaccatgctcgacttccgcctctacatccgcgagatctaccgcctgccgtccgcaggcgtcagcatcccatacaaggaggcgaacagcaacgctgcggcagctgcgcccggcgccccagctgagcagctgcagcggaagccacgactgatgcttatcaaccgtggccgcacgaggaagttcgtcaacttcccggagatcgtcggagcggtccagaaggctgggttcgaggtcatcccgatcgagccgcgtagagacctcagcgtggaggacttcgcccggaccgtcgactcgtgcgacgtgctcatgggcgcgcacggggccggcctcaccaacttcttcttcctccgtaccaacgcggtgatgctgcaggtggtgccgtgggggcacatggagcacccttccatggcgttctacggcgggccggccaaggagatgaggctgcgagatgtcgagtacagcatagcggacgtggagagcacgctctacgacaagtacggcaaggacaacccggtggttagcgacccagagtccatacacaagcaagggtggcagcttgggatgaggtattactggatagagcaggacatcaggctcaacgtcacaaggtttgctcccacgctgcagaaggtgcttcagatgatcagggaatagaggaaaatgagatcaatggaacatatgttacattacatttattattcatgcttagagatgaataggattaatcttgtttttttacatttggtatattggcctatacatggaacaattatccatatgcgtcaatcttaatccgtggtttctgttggatttaaatc

SEQ ID NO: 25448 - DNA, 3987 bp, Zea Mays
ccacaccatacccttgcttgccgcctacctgagcctcacctcatctcatcatcgcctccacctcaccagagaaatcctcctcctccctagtccctagccaattcttttttgtatcaaaccctctttccccatctcagatccctctcccgtcccagctcgatcctgcctgatggccgccgtaccgtacgccgctgctgccggacgctgaacgaccaggacaaccacctccgacgtccccccgtgtatccacgagatggtcgcggaggcggcgccgtcctcctcggcggcgatctggtcgctccgccgcgacgagatcactttcgaccgcctccacaagttttggagtgccctgtcatctcgtgcacggttcgtgtgagccaaggattcaggaagttgaagcagaagttcaggacccttcagttcatccttggggaggcctttcgacaacaaaggatggcatcctaactcttcttgattgcttcataaatgcaaaatcacttcatgagatccagaatgtatttgacaatgcacgtgctagagaacgtgaacgtgaaatgctttaccctgatgcatgtggtggcggtggcagaggatggattagtccagtgatgcctaactatggcaggggccatggaacacgagatacttgtgctttgcatactgcacatctttcttgtgacactctagtggatttttggtcggcactgggtgatgaaactagatcatcacttttaaggatgaaggaagaggacttcattgaaagactcatgcacaggttcgacagcaaaagattctgcagagactgcagaaggaatgttattcgtgaattcaaggaactcaaggaactaaagcgcatgcgaagggaacctcgctgcactagttggttttgtgttgcagataccacatttaactgtgaggtgtttgaggatgctattcttgttgattggcatcaatccttattggagcaagatggaatttaccatcatttcgagtgggctattggaacggatgaaggaaaatctgatattctaaactttgaaaatgtgggcatgattgggcaagtccacaggaaaggccttgatcttgatcagtttgaagactattttgttacactgagagcatgtaggctggatggccgccgtacagaattctgtgtgaaggcccatgccttgaagggccaatcttgtgttcaccggaggctaatcgtgggggatggatttgtgacaattacaaaaggtgaaagtattagaagtttctttgagcatgctgaagaagctgaggaagaggatgaagatgatgtagtggacagagacagcaatgaccctgatggtgatatcgctcatccacaaaagcatgctaagagccctgaacttgcaagagaatttcttctggatgctgctgcagtgatcttcaaagaacaggtcgagaaggctttcagagaaggtacagcgcggcaaaatgcacatagtgtttttgtgtcccttgctctaaaactgttagaagaacgagttcatgttgcttgcaaggaaataattacattggaaaaacagaccaagctacttgaggaagaagagaaagaaaaacgtgaagaagaagagcgcagggataggaggagaacaaaagaaagagaaaagaagaatagaagaaaagagaggctgaaaggaaaagacaaagataaagaaaaaatattggttcggtcaaaaaaaccaggtctttcaacattttctccgagcagccaagcagcaccaagtagtaatgagtctcaggatgttctagacttgagatattcagatagcgaagaggaagacaatgttgtggtcagggaacactatcctgattcttcagctgatcaatcttcaagcaaggatactgatgaacgaagcaatgagcatgaatgcagtgcaacagcagaatttgttccctcagattgtgatggctcattcttatgtgatgagtctaattcatcaagaaacttgagatttagatgggacttcccagaaaaagatgtcagttattggtatgaagattgtcgtgttgattctggagatactcaattgcagtctagggagaggatcagaaataacactagaagttacaacactgtatttaatacaaataaccgaacaagagacaagtacaacccctgcagctgtggccatcaagaagacttcagatatttttccacagcaactagatcaagtagggagacaaagatttccaggaaaacagtggctgagaaacccaggttgcaataccgcaggtgctatcctccagaaagcttcgctgtgtcaaatggacgtgttggtggtacaccaaacaagaacacaggtccaaagcaagtatgggagccaatggatgcaagaaagaagatagggaatgggagaggatcagaaataacaccagaaactactggtgctgctgatggttcagatcaagtggaatgctcaaaggacattagtgaatgtgagaagcttgaggtagtgtgtgaaacacttgctgaaacttgttgtgagatatctgcagaagcctgtaagtcagatcaaccatgtagacaaggtgagaaaaatcagtctgcttgcagcgatggatctaaatgcgtagataagccaaattgctgcttgacaaaggacactgttaggacaacaaatttaaccagttcagacagcttttcgtgtctaagtgagggagatagagacagcagcatgagtagcatgacctcactgagtgctcagaatgtagaatcttcatctacatctgattcagatgagtattcagacaggaacgatagcagcccaggcgatccaccagtgaagaatgtttctcgttcattacttgagatgtgtgcaggaaatggtttcagggagtaccaaccgaaaggcttgaaccctcctaatggcaaccaatttggatttatggtggcacctttacaggaccagatgttgcaccaacagaagatccatgcaccgccgtactcgtcaccatttgtggggttccacaatcaccccttggcagttccaacaaatgggtacttgccatatcctcagccaggtcacttctaccctggccttatgacccctgttggatgtggagtcgctggcagccaatgcgttgactttccaatgcagtacagcaataacattcatccttactcgggccccgaatttggttttctgcctgcaaaaccagttcacaagaccccagtgagcttccatgctgtgccagtgccaccactggccccgctgtgtagaagcgaggtgccagtggtgataaatcaagagaggcagcagggctctgcaccccctaaattcaaacaggcagtgctggtccctgagaacggctgttcagcagaagacaacaccttcaaacagaaaggtgatgacacagacagcacacccttctccttgttccagttcaacctgcctattgcccctcccaccctggcaacatccaaagaagagcaaagtggagcgatgccgtcaatggcactgccaccagctcagataactcgagcccagctgtgctccagggaggagaccaatgtcaaggagtacaaccttttctctgggtgtaacggagtgatgtttcagctcaactagaggcgaagaaaagtgagcagctattcaatatacatacatggtgaacgatttgtattctagtaaaacagaataaagtaggtcgaggtttttactgtgttgccctcgaatatttatttcttttttaattttgatttgttgtgcttcccctccctgtttttttgtgtgtatggaaaactgaaaagacagtgagtggtatagattctgcagttttgacacgagtctagtgtcactttttaccccccggatggttgtcatcttccaactaggctcgttcggtgtagctctgtcaattcattttggactgactgaatctgtagcagtttttactacagatacagtaccaagccgtttgttttaattaagggtcctagacatctccggttgctccccc

SEQ ID NO: 25449 - DNA, 1646 bp, Zea Mays
tccttgactttgccaagtgaccacgtggactggcggagggaaccgagcgagtggcccagacgtcgcgactcgcgaggccgaggcgcggcggcagcgacgactccaacaaccacgcgcggaggctgcagtgctccagccaagtgatagggtcgtgacaggcagccccgcaacgtcttggagcacaagacattgaagcttctaaagtattggacctggcaatttgttattgtcaggacagtatgttccattctgattattgcacttcaggttcttgggctgtaccccagctagagttggcacctcacaagcctcttgcaaagtttttgtgcatcaaagggatcgtattcttctgtttctggcaggtatatcatctaaagtgtttctgaaagctttatataaagtttgcacgggtgattgtcttgattgcttatagacaactctctggatggattaatgtgtacttattagatagtatctgcttgccatgacttaagatgaagcttcatttctctttaatattttgatttagttagattttatgtatgagtatgactgtatgaccacctcatgttcacttccgtgccataatttctgttttataaaccccacttacagttttacttgatgtaatcacatcatatgtaaatttgagataataatttctttataaaacagtgttacaagtacgtgttgctttatgggtgatagagatagcaagaggtgcagaaagaggtgtagtggaaatgaaagctacagttataaagaaaaaacaaaacaagctagacaacttgaggtatctcattcattttggaggcaaatttaatttgtagtttgatcctgctggaggacattcactttgtattagtctgccagtgcacttacattaggcaacatttgaatttggaaggaacctcatcccttgtggaaatggaaagagctatttgccttttttgactgaaataccactacttgcctacttggctctacattctttcgccctgacagaaacagaacacgcccacgtactgcactgcactgcacattttcgttccagggtttcgcgctcggtatcttagctggagcaggcgtgatcaaatcccaccatttctggcgggacgtggagcacatccaggaggccatccagaacgtgctggtgatcctcgagatggtcgtgtttttcgtcgtcccctctacgggcttgttcggttctaccccaatccatatggattgagggggtttcaatccctgcggcgctgacagggccaaattcgagaagaagaacgaatgaaccaggtttccggaaggaattggggggggggggggggggggggaaccccgtgctgcttctctctgctctctggtctgccggccggaaatggagcaccagtattttcctcacggatggacatacacaggtcccttagcaagggactggtcgtcttgtacgtacgctattctcagctggggactggccgaggccgactgcgggatccttttgcgaataaatctacagtcctgttctacagtggccgcactggactgattgattccgatgagcaggtttcgtcctacttgaggcagaggctacgagcgctgacttgtcaaaccagggctgacgacgcacgtggtgagtcactcgaaacggg

SEQ ID NO: 25450 - DNA, 928 bp, Zea Mays
cgtacgtcacacaggcctttcaccttgacgtcggcgctaggctctgcctcctccccgccactcatgttcttcgcaggagttcctccccgccgctcccggtcatcgtaggatctcttcctagccgccgcaggaaccggattcaggtggagcaagctgagaagctttttaaagaacaagatccccacaacaagtcttttcaattcaagcattgctggctgttgttgaggaaccaaccaaaatggcatgacaagctaaatcaattagttaccacaaaaaactagtaacaagaagcagaaaacaaccagaaaaatcaagtctaggccttgttgacctatcaatgaaggaggttaatgatgctgctcctaatgcaattgagattccagagatagaaccatcacaaagacctttgggtaagaagaaggcaaaagaggcggcacgtcagggtggcaatgatgcttgcaaagaagcattgaagtttctgtaggcaaaaaagattgaggatgatgcagagaaggagatgaagagagaagaaagacatgcaaagtcatttgctctggacaaagagatgcttgaactagaaaaggagaggattgcgctaaagaaggagaaggttgccaacgaggcaaacaataatttcttgaagaggattgcagaagaagatagaataatgaccattgatctcagtgccatgaatgagatgcagcagcaatattacctgagcattcaagctgagattatggctcgtcgcatgaattagatcatagctcactgctagccttgttcttaatttagtttctagaggcattctattgtacgaactattgtcattgttaattttaattgcatgaactatgtgtcttgagttatcagcattgtaagaactatttcggttgtgatgttaatttaaagaatattaagttcctaattc

SEQ ID NO: 25451 - DNA, 2790 bp, Zea Mays
gtcgaacacaaacagcaagaaccaccaagcgaccaagccaccaagggagcccgatctgagtcaagcgtcttcccatttcatcgcctggaaaaaggcgagaaaccccgaagtgaaggaacagcagcacgagtgctagcagcagcagcgattccttcgccataccgttcgccgcgctcgctcactcggatcgaaccctccctagggtttcgcatcgtcctcccgccaactcctatccctcccccctccctccgccgcgcgcgcgcggggagctaccaaaccctaggacggcaaatccggtgcgatcgcccacggtggaggcctcgtcggccgccgagaggagccgctcggggctcgggtcagggttccggtacttcgccggcgccgcctctgggtggtgggaccggtggatggtcatgggagccagcggctccaagcttgagaaggccctcggagaccagttcccggaaggcgagcgctacttcggcctcgagaacttcggcaacacttgctactgcaacagtgtccttcaggcactttatttttgcattccattcagggagcagttactggaatattatgcaaataacaaaactccaggtgacgttgaggaaaatcttttgacttgtttggccgacctttttatgcaggtaacatgtagatatgattataccaaatgatataaatgactctagagtgtcgtaatttcttgttgaattttgacttttttgggtatcacttggactagaggttgaaacaatgattccataggttaacagctgtagtgctatatccgagtttcttgtggtacaagtgtacaaagaatgtatattttgtcttgcttcgaggtgatgatactcatgtagagtttacccactgtaaatgaaataaatccttctcattttctctatatttttatatgagcttattagttctcgttattgacagatacatttttggcttaaatatattaagagtttcaaaatctccaattatctggccctttcctgataggatatatgctgcattcctgcttactaacttttgttagctgcattcaagttctaaatattaacatgtgcagtattctagctgtatatgtatagctttctttgtataacactgtcaatagaggtccattcatggatatgctctttgcttggcactccatgttccttatgctgttcaatatattagttgttgggaaattagttttgcttcctacttaggttgtctccagcagatcgtgcatatggtcgtgcaaaatactgttttacactttagattgcactgcttacatagtgacgtttgaaataggagataagatgggagataggatgagtaagctgttggagacaaccttacagtgagataatagtatactactcatataaactgaaaacccacattcgtgcaacatagaacatacccactcatggacgcatcatgcatgcacatgtggcatgcttggatagcatcaccattgggcatttggataatgaatctcatgctaagtcgtacttaatgtgagctctgtgattgtagctataaaatattttttttgtacttcctcttgctttgcaattggttgttggacaacttgcttaaggtaatgggttctgttctactgctaattacctgacatataatcaatgtatcaaattgtctaatctatcctagtctccatggcacctatcagcctgactaattgtgacttatggtagtgcataaccgattgctatagcaccaatcatcctgatttatcacgattaatcagatcagatgacttgttaacattgcatataatatgatcctgatgccatttaaatttgtatggtaaatatctttgacttgacatctttgttgtcaatgcattgtttcacttcatgcttgtgtgtcagtgttactacatagtgttttgtatatcacgtgaaacttctgcaatctgcacgatattgcaaattgccaccataaagaacgaagaggtgaattaagaggtggtcattgtgtatcacgtagataagccaagcaaagaaaaagaccggtgttattgctccaaaacgttttgttcagagagtgaagaaacagaatgagttgtttcgcagctacatgcaccaggatgcacacgagttcttaaattttcttttgaatgaacttgttgatattctggaaaaagagtcaagtgctgctaaggactcaccccaatcatcatctccagaaaaagctccaaatggcccagttcaacctttagccaatggagttaaaaaagaaccaccagttactctggtccataaaaatttccagggcatattgaccaatgaaacaagatgcctaagatgtgaaacagtaactgcaagggatgaaacgtttcttgatcttagtgttgacattgaacaaaatagttctatcacaagctgcctgaaaaatttctgttctacagagactttaaacgcagaggataaattcttctgtgacaaatgctgcaggaaagctgactagcaacgttcccgctcatcgctctgacggggtgcggtcagagccagtgccgtctggaggctcacgtgaggccatctcgtccttcgcccaccataataattaaggttaacaagcagctctcagcttacttggtggcgctcgttcgttgatagcatcttctttctttctttctttctttccacttcaatcatcgcgcttctgtctcttgcgcctttccatgtagtaaggctttgccgcaatcaagttgatgtgtaagtaatcgtatatgtggtatttggtatcgtgatgttccaacaa

SEQ ID NO: 25452 - DNA, 3119 bp, Zea Mays
tttctgctgggatccatactcccgaatcctctccacatcacattgcatccaatgtactccatccattataaattggcgagcacaattgtcctggaataatcccactagccatcaaggatgtcttcagcatgatccaagatagtcctggaagagaatttttgctccgtgtgtcgtaccttgaaatctataatgaggtgataaatgatctacttgatcctactggccaaaatttgcgtgtgcgggaggatgcacagggaacctatgtagaaggaataaaagaagaagtagttctgtctccaggacatgctctttcttttattgcagcgggtgaagaacatcggcatgttggctctaacaacttcaacttatttagcagccgaagtcatactattttcacattgatgattgaaagtagcgcccgtggtgatgagtatgatggcgtcatgtattcacagctcaatttgattgatctagctggctctgagagctccaagacagagactacagggctaagaagaagggaagggtcatacattaacaagagccttttaacgcttggaacagtcattggcaagctcagtgaagggagggcaacacatataccctatcgtgattctaagttgacccgtctgctacagtcatcattaagtggccatggtcatgtctcactaatttgcacaattaccccagcatcaagtaacatggaagaaacccataatacattgaaatttgcaagcagagcaaaacgtgttgaaatttacgcctctcgtaaccggataattgatgagaaatcattgatcaagaagtatcagaaagaaatatcctctctaaagcaagaactcgatcagctaaggagaggaattgttggtggtgccagccaggaagaaattatgagtttacgtcagcagttggaggagggtcaggtcaagatgcagtctcgtctagaggaggaagaggaagcgaaagctgctctaatgagcaggatacaacgcttgaccaagttgatacttgtttccaccaaaaacaatattcctgccttgacagatggtcatcagcggcataattctgtcagcgagcaagataagttaagcacttcacaagatagctctacacttgtccaaaatgagggcacaacaaaagaccacctaccagactccttagatgagatcaaccaattaagatctggcagtggtgaacattcttcagctacttgttctgctacagattcaatgcaggcaggattcacggcatcagatcatatggacctactgattgagcaaattaagatgctcgctggggaggttgcatttggtaccagttcgctgaaaaggctaatcgaacagtccatagatgatcctgaagggtcaaaggaccaaatagagaatttagagcgtgaaatccagcaaaagagaagacatatgcgagccttggaaaaacaaatcatggaaagtggcgaggcatcagttgctaatgcatccatggtggatatgcagcagactattacaaaactaactgctcagtgcagtgagaaggcttttgagttagagttaaagtcagctgataatcgtgttctccaggagcagctacaacagaagaatgcggaagtcaacgatttacaagaaaaagtttttcaccttgagcaacaactctccgcaaaagtgggtatatcccctgagcaggaaactgattgcgcacagcaggaggctattgatttgaaatctaaacttcagtccaaggaagctgaattcgaaaagctaaaattcgagcatctgaaaattactgaggaacagtgcgacttgatcaatcaaaaccataaattaagtgaggaagctgcatatgcaaaagaattggcatcttcggctgctgttgaactcaagaatttggctgaagaagttacaaagctatctgtactaaatgtgaagcaagcaaaggagttactagttgctcaggagatggcacattcaagggttcatggtagaaagggtcgtacaaccagtaggggtagggacgaggttgggacatggagccttgatttagaggacatgaaaatagagctacaggccagaagacagagggaggctgctttggaagctgctttggcagagaaggagcttctcgaagaggagtacaagaaaaagtttgacgaggcaaagaaaaaggaactgtctttggaaaacgatctagcaggcatgtgggttcttgttgctaagttaaaaagaggggctttaggcatatccgattttaatgttgatgatcgaactgttaacctagctgatataactaatggcacaaaggaaaacaaaggtgaaaagaattttgctctagttgagaagcaagtttcagaagattctgtgaagtcgctgagcacagaagaacatagaagtccagagtttgaaccacttcttgttcgtctgaaggctaaaattcaggagatgaaggaaaaggacactgatcccctgagcgataaagatgggaactcacatgtctgcaaagtttgcttcgaatctgcaaccgctgcagtattgcttccttgccggcatttttgcttgtgcaagccttgctcgcttgcctgttcagagtgccctctgtgccgcacaagaatagcagacaggataatcacgttcacatgaacggcgtgctagcttcaggtgccaaacacttagatgcttgcatgttggtgctcatgccaacgctatccctctgaaatgtacctaatgatgtgctgtgtatctctgacaggccattctgaagcatggcgcactcttgtaaaatggtcggtggtatatgtttctctttttttccttagcaaagaaggtgccttttatgttccttctgtgttgtatcgccattctttgggttcccctatatggctatatagcttcaccttacgttctttatcaaggagctgcaaacgatgagaccccattggaatgcaggaattgtacaggaatttcacaaaagttcattttcatagaaaaaacacaacaaaaaggcaaaattactgtgttctagtggagccctgacttctcgctctgcaaatctctatctctgcaaatttttcaaaaaaactcctacatttttttataatcaatctgtacttatagtctcttatctactat

SEQ ID NO: 25453 - DNA, 2811 bp, Zea Mays
gtagatccctcgcgtcaggggtataaacgtccaatcccccacttaaccgtcaccacgcccacttgcatcgccgttgcggaattgcggagcgcgccgccaaaacaaacgcgtcctgctgccggaatcagaagatcccgaggggttctgatctgagggcccaccatcctctctacacggcacaggaacccaactactactactacaatcgttgccagggagctcaaccgactcgggaccaaaatcggctgctgttgctggctgggacgaaatcggaggcatccgcctttctcgagagatcgagctccgcgccggagcaggcgggccaggcggtgccgctgctgcctgctggtgggtttacaacatagggatggagtcgagatccatccggattcgacattcgaggtcttctgctttgctgttttaaacctgtagaggcagaggacttgggaatgctgaaaaatgtgcctgcaaaccgacgggggaattttttgtgcaaacaagattcgacctctgttcaagcagatattgttggcttctcatgagtatgggcttcatgctgatactgcccttattttcaatgatttaaagcacagtagattgaaggcctttatatttgttggccatcaccttggagacgacggttaaaatcttctacattctttgataagtggtgtggcgcttgttcattattctatcgttgcatagtttgatacgatggatgggaggaggacaattttgatgggacgatatgaaattggtaaacagctgggacaaggaacctttgcaaaggtcttttatgctcgtaatcttactactggcctggctgttgccataaagatgattaacaaggacaaggtcatgaaggttgggctcatggagcagataaagagggagatctcaataatgaggttagtgaagcatccaaatattcttcagctttatgaggttatggctagcaagagcaaaatttattttgttctggagtatgctaaaggtggtgagcttttcaacaaaattgctaaggggggaaagctcagtgaggatgctgcgaggaaatatttccagcagttggtcagtgctgttgatttttgccacagtcgaggtgtctatcaccgtgacttgaagcctgaaaaccttctacttgatgagaatgaaaaccttaaagtctcagattttggcctaagtgctctagctgagtccaagaggcaagatggtctcctgcataccacatgtggaactccagcttatgttgctcctgaagtgctgagtagaaaaggttatgatggtgcaaagtctgatgtgtggtcttgtggagtaattctttttgtgcttgtggctggttaccttcctttccatgacacaaatttgatagagatgtacaggaagatttccagagccgagtttagatgccctcgttttttctcaactgagctgaaggatctgctacataaaatccttgttccagatccaagcactagaatttctatctcgaggataaagaggagtgcttggtacagaaaaccggttgaagcacatgcaaagaaaaatgaggcagaaacaagcgagaatacttgtacgggtgaaggtacaacttctgtctcaacagagtgcagtacgtctgagggaaatcaagggccattaagcctcccaaacttgaatgcatttgacatcatctgtctctcaacaggttttaatctttctgggttttttgaggataagtatggtcgcagggaagagagatttactaccagacagcctgtaacaacagtatttacaaagctgaaggagcttgccaaacgcctaaagttgagggtcaagaagaaagaaaatgggaccttgaaattggcagctccgaaggaaggaaagaagggtatgcttgagcttgatgcagagatttttgaggttgctccttctttgctcttagttgagttgaaaaaaaccaatggggacacgctggagtatcaaaagctagtgaaagaggagataaggccggcactgaaggatattgtttgggtttggcaagatgatcaacaccagtgctcacaatcaccagagtctctattatcaccaccggagacacaggatgaattgcgattatcattgcctcagcaagagggtcaagacttcttagaagccccattgccatcactatcgcttgaccagttgaaatcaccaactgccccagagcaagcagagcaactgccacaaccagaacagttgcaaacgccaatcgctccagaggagcaaattaactagctctaacagccagctggtaattcatatgcccctctcagccatagttcatagttctattccggtttttactctttgttccggcttttctatttcttctggaattgtaaagctgtatgcctgtatgtactgcagaaatgccatgtattccagtttgaaatgatataatacatcatacatccgatgttaaaccaaaattttggaaagaataatattcattgaccagcactattgagttgtatgaatttatgaccgaaaagtcttcatgattggtttcctctactatcacagctgtaagcagatttattgctgtggattttggctgttatgatcgtattctaagttcgtcgcggagatttgtttccctcgcgtagtgctctgtgtgtcttaggtttgagccttgctaattgccatgttgattagatagatagtgtggcaaaaattcttcacgcttcggtttgcttactgcagatgccaaaaaagcaaaggaaaaaggtcccgacaaaaaagaaaggatttgcatgtacaatatcagcagtggagtgttgaatcgtagta

SEQ ID NO: 25454 - DNA, 1416 bp, Zea Mays
ttatttttttacacgaaaagcaaactgaatctaaaagggaagtaaagaagcgtaccactattctgcacagggttttgatagcagagaccgtctgtctccttttaagttttaacagcaaattacaaggattggaggtagagctaggaagtgttaactaactccattccccatctcatcggttttggagctcttgtgctgccgtaagttgaccatccatgttaaaaacaaagaggcaaattttctctatgaaagctattgtatcagcaagaaaataatagcagtgtgctaccttactcttcttgtgcttatgcacatctactgaatcttctgttccctcatgcttcctcttctgatacaaatggtgagcattgtccatcaaaggtatatatggtttaaaatgaagctattcagagtttttgaccatacagaaaatggactaaccttttcatgatggccacttttatcttttttcttatccttgtctttgtctttatctttgtccttactccgatccttatgccgatgtttgtgcttcttgtgttccttgtctttgtctttgtgccttttatgcttcttctctttgtccttggactcactttttggtttacccgaaatagtcggtatacctttttcagtctaaggcaaatccacaagagctgtttctcgaagttggaacgcttgccccagagtttccatatcaaagggctgaatataagcaggtttatccctcagatatgcattatgaacaagttgatctaactccattccttctcctttgcgaatttcagtgtctcccacaacattgtgaagataatgtgtatctgatattgccagcggcaaaggtttcttgcaaaagaaatcatggtgtggcagcagtttgtagtggctgatcaaatcaacagcaccagtgagctcccttggtcctgaaatacagagatcgtattatcaatcaaccacatagcagacaaataaggtttcagaaaagataggtgcactgatatatctatgatacaaaatttattctagcatacaatagacattagatgcagtaatgcggctcataaaacaactttgtgcactatgacacaaaatattaaccgtccaagttccaactaacgcattgtgaactgtaaataagtaaataaaacagttaaaattttgccattgtaaaaagaactgtagtaaacagctgactacaagacatactggcctcaactggcaaaaccgcaaaagaatcagcaccagaagtttgtatttaaaattccaagcatataattattactaatttttttgcaaactaatgacgataactaataatcaagcaagctgtgatactaatataactctgttgctttgtgcccacatgaattaggatttagcatttcagatttgcatactgaataattggcatataag

SEQ ID NO: 25455 - DNA, 69 bp, Zea Mays
ctttcctatcacttcctcgggagacaataatttgtatttaggatccccacgaattaattgaacttgagt

SEQ ID NO: 25456 - DNA, 1050 bp, Zea Mays
gttaccatttaacatgttctctcgacttctggagctaagtgcattggtgctcttgttgcttgggaaacccgcagaaaagattttgctgtaatgatgtctcatcatgtaataacatctactcttattggagtttcatatctgacaggattttttcgaattgggaccatcgttcttgctcttcatgatacaagtgatgtgtttcttgagactgccaaattgtgcaagtacacagaaaaggagttgggggctagcttgtttttcggtctcttcgctatctcctggcttctattgcgtttgatttacttcccgttttggataatcaaagcctctagctatcattccatcacattctggaggaagctggatgaattccctacagctttgtactatatcttcaatacaatgcttctcacattgcttgtattccatatgtactggtggaaactcatatgtttgatgataatgagacaattgaataataaaggacaggttacagatgatgttcgatctgattctgaggatgacgagtaatgggggagattcattctttgacatctgcaatgtgtcatttcttcgccaatacttatctacgcctgcttccagaattgattgttttgatcgtggcaagtctcgggcatggataggaaagtttatcctctgtatattgccttgtgatatcaaacatggctagaacgagaatggagcaggtcctatacattacgggtatagctagcaagcttacttgaaggttccttcaaaaaattttggttcaccttttctgatatatggggaaagatatgagagggcgtacagcttttttcctgaaacttacagaacccctctgtaccatgttcagtatacttcactcgtgagtagatttagttctaattgacggtaataaactgattctttttgactgggagtaaatctcacctgtatcttaatgatctcatgtgatgcgcattgagcttcatgcagctatattttttttaatagtgttatccctattctacacaatatgatggatatagttgagatccaatttggtta

SEQ ID NO: 25457 - DNA, 3539 bp, Zea Mays
gcgcaaacaagttcgcatcgccatctcgctcgcagggaggagaggggagtctctaaccctaaccctacccgcccctgtcgccatagccatggctgccggcggagagctctccccctcccccgtgccccccgcatcccccatcaagcattctcgctcacccgacgatgcccagcccgacgcatccccgaagcgtcgcaagcgccaccatcaccgccgccaccaccaccaccgtcggcaccgtcacgccgattccccggtacccgtggcagccgacgaagaggtagaggagggggagatactcgaagatgccaccgccgcctctgccatggaggtcgatgctgagtccgccgccccagaggctttccttgctccggagcactttggtaatggtgctgatacagactcaaacacagatgcaaccaagatgcaagctcctgctctgcctacccttccatcctcagaagatggaaggaggtcacttcatgatgcccctgagtctgaaagaggagatattctttcaagtgatgttgaggacaacaaaggacatgaacgaaggcaaagacaaaaccgttctaaatctccaaagtctagaagggagaaggaaaggaggcacaaagatgaccatcacacttcatcttcaaaagattatcattccagaaatcactctagaacatctccttactcaaggcatcaaagtgaagctcattcgagagatctgtacttgagatatagagagaaaggtgattacactaatggttctcgtgcaaatcttagggatggttctgatcatgagagcaatgatcggaatgggaagtctggcagacatacgactaggacccacgggagtgaaagagaaaggagcagcagccatggtattcatgatagacatggtgacaggtacagtgacagacgtgccagccaggaaaggcatagagacgataggatatatagagacaaaatcgattcattagaagctgctcctaggcacagagaaagaagcaggagtcatagtagatcggatccaagggaaaatacacgtcttcgtgatcaaagcagggagagggaaagacggagtggtagttcaaggcatagggatcatgacagcaagagggatacaagtaaagatcggcatagagaatctgacagggttaacagtgcacatgaaagggatagagggagagaggctagggacagggaatggcatagggtcaagggaagtgaaactcatagagctaaggaaggacgggacaaagttagcgataatgataggcacagggattcaacacgctcaaaatatagcgtgtctgatggttacaaagagaggacaagatctggggagaaaggtagagatgctgaccataaaaaccggaagtttgaagaaatgaaggaaaattctctcaaggaggaagatgaagaggagtaccaagagaaaatagaacagcagttagcaatgcaggaggaagacgaccctgaaaaaatcaaagaggaagcaaggaggaggaaagaagctatcatggcaaagtacaggcagcagcaatcgcagaaagaggatatggaatctaaaccaagtggcaatgatgaagaagtaagagcaatggatggaaacgaagctatacatcagaaagatgatatcgatagcagctttatgggcaatgtcgaagctgaaaataagcatgattcttcagaggtatttgatggcaagacaggctttaatgtgggaaggtctcctgctcacaattatgcttcaactagcacgggagcattcactgatgagaggacaataggtgtttcaggtcttggagagggttctcccaagagtgagagatcagcagacatgttttgtgatgacattttcggagaatcacccaccggaattagaaaattgggaaaggatgatggtttgcatattgagagaaatgctcttcatgacaactgggatgatgcagatgggtactacacttatcggttcggagaattgctggatggccgttatgaaatcatagcagcacatgggaagggtgtgttctcaacagttgtgcgggcaaaagatcttaaagcgagtaaggatgatcctgaagaagttgccatcaaaattattcgcaacaatgagacaatgtacaaggctggtaagcaagaggtttcaatattggaaaaacttgcaagtgcggaccgtgaggacaaacgccactgcgtgcggtttatttctagtttcatcttttcatcgccctgaagcacctgaagaactgcaaagttttgcactgtgatataaaaccagataatatgctggtgaatgaggctaagaatgtgctcaaggtatgtgattttggcaacgctatgcttgctggtatgaatgaagttacgccttatcttgtcagccgtttctatcgggcacctgagatcgttcttgggttagcctatgatcaccctttagacatgtggtcagttggttgctgtctatatgagctttataccgggaaagtcttatttcctggtccatcaaacaatgccatgcttcggcttcatatggaattgaagggtccattccctaagaagatgcttcgaaagggtgcctttactatgcaacacttcgatcaagatctcaattttcatgctaccgaggaggatcctgtgacaaaaacggctgtgagaaggttaattttgaacattaaaccaaaggatgttggttctttgtttccgaactttcctggcgaggatccaaaaatgctatccagttttaaggatcttcttgataaaatatttacattagatccagaaaagaggataactgtatcgcaagcacttagccatccatttatcactggcaagtgacacaagatgacgattcctcttgaccttgaacttagcatcttcactgtaaaatacattttgggttcctcttgtctaatcatcaacgtttctgtcttgtgtcctgggagctctgagaaaaagtacatggatgaagcacggaacttcggaagagatggctatctgcagaccttgttgcatgcacttatcatttggatatattctgttgcttgattctgccagggcctctgctatgtgcacattttatatgcttaagggccaacataagaaggtcctgggatggaggtcgctggaccctctactcacttgccatggtacaacacgaaacgacaatgaagcaaaccttcgtcaagagcagcttgcaaaccggaaaataggagctgtggagctttgagcgtacattgatgcctcgaaggagaatgctgaagttgtccgctttggcgccaaaagggcttcgtgcacaaaagaagaaagtaagagttgttgaagacttgtacaacaagaaagaatgaaaaagacagtattgcccctgtgatgcttgtaaaccatgtgtaattttttttggcatacttgtaaattcatacaaagttgtacctctcccctacaaataggtgaacaatgccatgcatagattcacttttcgagggtccatagcttcacttagatcagcttcgaagtaacctagagctatttctcgtgtgaagacgaaggtg

SEQ ID NO: 25458 - DNA, 483 bp, Zea Mays
ttctgctgtagatggtggagatcatctgccatggcgaaccgatctgcccctcgagcacgctgcgtgggctgatggagctgtggcatcgtagacagccgacggagcccgtggaggcgtcggtgggtgcgccagccgaggagttcgtcatggtgctgggctaccgctgccaccgccggcacccttatttggcgcccggcaccaccgtcgccgtgcctccagagctgccctcctgatcaggtcggcaaggttgactgcaccgccgtggagcctcaactgcactgcactgctccgctcgctgtcgtccaatccccagtcagtctagccgtttaggatggaacagaggaaagaaattactcctacagttttttttacacatttcttagactttcttttggatcgtactcgtttcttaaacttttgtaaagatagatagagagggaggagagaagttagtgtaccagaagtctgtggcaaatgattaag

SEQ ID NO: 25459 - DNA, 971 bp, Zea Mays
atttttgtccaaagcctccagtgctaaggacgccggttattttatcagatctgatctagcctgaatccacctgttgtcaagatccatcagcccaccgaaagcaagcatcgcccacgatgacaaccataggcaaaactgcccagtccgccattttgtgagccatacaatttctttttttataacaaggcgtcagcaggagagcaactatatttatatacatcttccctgatctgtccctgtccggcaacaagaacaccaccaataaggatctcatcactacgagtcaccggcggcgtcgaggatcagggccaagatcctgtacgcgacatcgaagcaaggcctgcggcggctgctggacggggtccactacgaggtgcaggccaccgacccctccgagatgggcttcgacgtcatcagaggccgcgcgcaatgaggcccccgctgcgctctgctcctatttacgtacttacctgtgcgtgggcgtgttctcctactactcactgctcagtagtcagtagtcatctgcgttcgtgtgtgtgtgtgtgtgatcggccggatgctaattggcgttggtgtgctcccgtagcgatcgatgctgccaatctgacgaggcttcgcgtgtaagaaaaaaaagtacaaagtggggaatagccatggcaattaaaatgaagttgtgtttaaaaattgcttgctccagttctcaggatctgcctagttttccggtccgttttttagaatcgttttgatgaaaatcgtccgaaatcgacataaacatgccgagtcgtagtgatagtagtaatccgtcacttttaaaacctaaaccatataaactcgtttatctttctttgcacgtaattcttacgatactcatattaataaaagtttgttagaaaaaagctaaaacaaatagtcccatattaggtactctcacactttccagtctagaccttgtactatatagttgggccaac

SEQ ID NO: 25460 - DNA, 4029 bp, Zea Mays
cccgtttcggggagacgccacgagaaaagagggagcagggaaagaaatcgcctccacgtccacggtgacgccggatcgcgcgtcaaatttctttgccgcggatttggtgctgcaaattttctagaattttttcgttttgtagggggcattattggcacggtatcttagtcctgggcttatattatctgcattttcgtttcccccgattttttcgactcaatttcttaacggatttgggaatcgcggctagggggctctgcattgccggatttgctcgatttcgtgggcgcattgcagctttgcattgcataacgatctttgccttggtcgcccacgttcgcgattctgtctgagcttcctcacccgggctcgtgcatttctccgaacatctccaggtgtctgttgcacaagctctcgcttgttgctccaatttcacgcgttctgcatgcatgtattccccgaaggtggtgccattctggggctgttgcaaagttctctggtcaaaaccaatggattccgtcgagcaatcggttccacggtgctaagagattgttgtccattggccatccccatgaatttctgaagggggagaagaattgctgttgcatttcccgggcaggtgcattggcatggtcgcagtagtgtaggaagcagaaaagatgaggcactgttggagtgcatggctcctggccctgtgcctcgtctctgtccagctcctcgctccattggtatgcgagcgattgctcgttgcagcacagaacctgtcaccgccagccttgacaccgccccttgtcaaagaagtagacgatgtggtggaacatgtatggatctcatgtgggttagacaggggatctcttgaagacgttagaaaacatttcaattacaaccacgtatttgacattctccgtacgctctccggaaaagatactaaggatagctctcctgaaactgaagatgccagcaaagcactgtctccagaaattaaaaacactttgctgaactgcttaagcaagcacccacttgtagttgctgcacatgagagtgcaaaaaacttacctattgattatatcaaaatgctttttgccttgttaagaagagatgtggctcaaggatctacaggtgcagcgacaacttctgcaccaccagcagctgtgaaatcaaatccatcaccttctttaggggaaccttcctcaacaaaacctgacaaaaatccagatcctccattagaaacaacacccgaagaaaaaatggtgccccaaactgaaaaaacagtggccaaaaaggaagataacagtaacatgtcaatcactgctgtcattggtttgtctgtgtctgctattgcgttgttagcccttctctgcttatgcaactttgtttgccgtgcaaaacaggcctcttcatctgaagtaggggttgataaaccgcctctgaatcagaacctgagtaatttatctgtagcttctcttaagttttccaaaggaaactcaattgatgtcaacaagctgggagcactgccgctaaagtcagaggctggccaaaatggcaatgccaaactaagctcatctgaaatctctaaaactgaagttaccccagcagtctacaactgtttggctgaaccaatggctgcttctactggttatgtcccaggatcaagaccaacaaccccaccatctatgccacctccagcccctgcacatccgaaggctcctccctcatcaactcctcaagcacctgcatctctgaaggctcctccctcatcaactcctcaagcacctgcacctctgaaggctcctcactcatcaactcctgaaacacccgcaccaccttcaaagcctagttcagttcttcactcagaaccctcatcaccatctgctctaaaagctgcacctccaccaaaagatgcaccacagccaaaagctgcacctccaccgccaccaaaatctaccggcccaccaccaccagcaatgtctggttcatcgaatacacgtccaccaccgcttatgaagaaatcaggcaataagatggatgatggcgcaaattctcatgaagctaaaacaaagctaaagcccttcttttgggataaagtaacagcaaatgctaatcagtctatggtgtgggatcacctcaagtctggatctttccagtttaatgagggtaagatggaaagcctttttggttataactctgtggagaaaataggcggtgatggcaagaaagatttattatctaaggatatacctcaatttgtgaggatacttgaacctaagaaggcacagaaccttgcgatatcattaagggctctgagtgtttcaccagaggaagtatgtagtgcagttaaggaagcttctcttgtaacattggatataatgacgctgctacatgactattattttgatcccataacctacatataaagattagagactaatctgttttttctgagctaaggaaatgaacttccatcagacttgatagacacactactaaagtggatcccaagcaatgaggaggagcttaggcttcgactgtacactggggaactgtctcagcttggtcctgcagagcaattcctaaaatcgattatcgatattccatatattttccaacgtctggatgcattacttttcatgtccagtctaccagaggaaacttcaaatgtgaaacacgcttttgctactttagaggtggcttgccaagagcttaaaaacagccggcttttcttgaagttacttgaagcggtccttaaaacaggaaacaggatgaatgttggcacattccgtggaggagctcaggcttttaaacttgacacgctccttaagttatctgatgtcaaaggaactgatgggaagacaacacttctgcattttgtggttgaagaaattattcgttctgaaggtatccgtgctacaagggctgcaaaagatactgacggtaataatatgcgaactgaagatgattacaaacaacttgggctgaaagttgtgtccaatttaagtgatgagctacaaaatgtcaggaaggcagcgatcctggatgcagatcaattgacaatgtcagtagcaactcttggccacaagcttgtcaaaaccaaagaattccttaacacgggcatgagaagtctggatgaacacagtgggtttcaccgcaagctgaagcatttcgcagagcagtgccaaactgatgtttctttgttgcaagaggaagaaaagaaaattcggtccttggtcaggggcactgttgattatttccatgggagtacagggaaggacgagggcctgcggttatttgtggtagtacgagatttccttgcgatgctggacaaggtttgtaaagaggtgaaagaagcatcaaaagtggctccaaagaaaacaaagaccgctcagccatctcaagcatctttcaatgatcccaggcgcaaactattcccagcaattcaagacctaagggcagacagttcaagctctgatgaagacgattagctgtataccgaatcaaggagtccatgttttcaccttcgaatgcactgaatttgacccttcaaaacaatagtgcggtgatacataatacatggaaactgatgggaaatggtgaagtgacgctattttttgccatccactgatcaaaaaggcaacaatcaaattgggaaacctggcttggctttacactgacatgttggtaatgacaaatcatcagaccagatctggcattcttggccaatgggtttgtatggcactctcctatctagcaagaaggatgttcatatggtcgagacagcatctatataaaaggtgtggctggtggaaaatggataattcaaaggaaatggaagaaaactggctctagtttagaaccggtgtaaatgcaggaggaagtctgactaatactatttttctgttcattgtacacatgtaccattgtaccgaacgcagagaaatgcagcgcaaacttgtgaatccggtgccattacccttgcaaacaggaatacaaatgaagtgtttggtttgagaaataagctagtttatcatcttc

SEQ ID NO: 25461 - DNA, 2453 bp, Zea Mays
tggaaacacggcttgtcagccgagattatcagtttcaccatttttttgaatttgaaatttaaaacaagtccgaaaattcggatttcggtaaaaaccggtcaattcctcttttttcgctggtgaccgaaaaatcaaaccaaaacggtttgttctgatcggaccccagatccagattactgctaaataaaaagcatgtgaaggccttcctccccctcccagtcgcccttcaacttgccagccgatcccttcgcgtttgtctccgcggttccgacgctccgcactccgctcccctctcccaagcaaacacagccgagtccacgcacgcctcccatcattcctcaaccgcctcgccggagcaaggggagtagcggaggatggagattgaccaggcggtgcgcgggtgcagcgaccgccgcatgcgcaccaagtacagcaacgccgtctacgtcgtccagcgggccttcgcgctctacccatttgaggaagttgccttcagctttaatggtgggaaggattcaactgtgctcctgcatttgattcgagctggttactacctttacaagaaggactctggtgatgtagcccaaacagatgctgttaaaaactgtccactgcgtactatctatttcgaaagcccttgtgctttccctgaaatcaattcattcacttatgagattgtctcaacgtaagagttgtctaagatgtgtctaactttacccttagtctatccgctatttaaggaagggcaggcctggtgcggtggcgagctgtctcactgaatcatcaggttatgggttcgaaacaacctccgtattttcggagggaaggcttgcttcggtttatcgctatcctagatcacactcatttatgggttacctctggaaaccatccattcagatttcaagtctggtctagaaggccttctgaaggagaagcccaccaaagcaattttcattggcacaagaattggtgatccaaatgcggttggtcaagaacagttctctcctagttcacctggctggcctccttttatgagggtgaatccaatcttggattggtcatacagggatgtttggtcttttctaataacatgtaaggtcaaatactgcagcctttatgatcaagggtatacttccattgggagcatacacgatactgttccaaatgcactccttagtgattcatcatctgagaaaagttttagaccagcatacatgctaactgatggaaggcttgaaagagctggtagaacaaaaaagattaatcctaaagtagaaatgaattctgctgcaagcaatggcatcaacgatactgagggaggacggatgatctcacgggcggcatcaatcattgtagtcggtgatgaaattttgtttggtacaactgaggataacttaggagcagccttgtgcaagaagcttcatgcaattggctggcgggtttctcatgtagcagttgttcgcaatgagattgattctgttgctgaagaagttgaacgttgtaaatctactgatgacatggtgtttatttttggtggactcgggccgctacattcagacgtttctttggctggtgtcgcgaaagcatttggagttcgtctggctcctgatgaagaatttgaagattaccttagtcaactcatgggaaacaattacactggtgaccgaaatgagatggcacagttgccagaaggtattacagaattactgcatcacaaaacgctaccattgccattgatcaaatgtagaaatgtcattgctcttgctgcaaccaatatggatgaactagacaccgagtgggattgtcttctaggtacccaggagagtggtctaatgccatcaaaaccttttgtgtcaaagcatctcagcactacactttcagatgttcaaattgcttcagtccttgcaaaactgtgcttagagttttctgatgtttacatagggtgtcatcggatatcaagagctggtcctttggttgtgaatcttactggaaaggataaccagagggtagatgcggctgccgagaagctgacaagcagctttgaaggacaattttcccaacttaacagttgcaaataagctgtcagagacacccctctatttttgccaaattctttccgcctgaagctctgagattgtgcaggactgatgatggtgctcaactgctctaaaccgacgaccaaaataaaccacggagctggtactactttgaagctacaaattttatttagggaacataggaattttgtactaggaattggtaactgggttctagcataatgtagctttgcagctaatattttgacattattatacgttccaaattatttcatttatactataatttatagcataactttactgctcgatcatgatgtcttcagttgtttgacctttttgctacttgttcgagcatagctttgcagtgcttggtgatgcaaacattgatgctga

SEQ ID NO: 25462 - DNA, 3002 bp, Zea Mays
cggtcatctcttctgtacagccaaaacccaaacccaacgggtcgttcctattcaaaaatcgaactcctacgctccttcggtccttcccctccccatcttcccaaaccgccccacgcttcatcctcgcaagcctccccgaccccccagctcaacgagatccggcgagcgaattccctcttccccgaccaccagatcgcagcgatggagccggatcgggtcgccgcgggggcatcctcctcgccgcagccctcaccagcgccggccatgttcctgccggggcaaacgcgagaccatgagcggggagcggtcgactgcgcggatcccggcggagacctgaatcccgcaccgccgccatcgcctcagcaggctacagttgaggatgccgcggtgggcggcgatgtggagcaggaggagccaaagaaggaggcgatggcaggagtaggggaggctctccggagcttcatggaggagtttggggatcaaggagaggactccattatcttgtcaccgcggctgcaggagatttgtactcctgaccgccccactgccctgcgcttcttagaaatataataacctcatggagagatacaagaagcaggtggtcaagtgttctgaggagtgtgaccctagatataacggcttgaagaagaagtacacagacgagtgtgcagagaggcggcgtctgtacaatgagcttattgagctaagaggtaacattagggtgttctgcagatgcagacctctgagctccaatgagctcgcccgtgggtgttcatcagtagttgagattgactcatcacaggagactgagctgcagtttgtccccaatgaaaaagaaaggaagccctttaagttcgaccatgtttttggcccagaggatgaccaagaggccgtgttttcagaaacagtgcccgttgttgggtcagtgatggatggtttcaacgtatgcatctttgcatatgggcaaacaggaaccgggaaaactttcacaatggaaggggttccagaaaataggggtgtaaattatagggctttggaagaattgttcagaatctcagagaaaagaagtgcatctgttgcatacacattttccgtaagcatcttggaagtttacaatgaaaagatcagggatcttcttgatgagagcaatgatcaatcaaaaaggttggatattaagcaaaatgctgatggaacacaagaagttcatggtttggttgaggctccaatttataacatagatggtgtgtgggagaaactgaagtttggcgctcaaaataggtctgttggctcaaccaatgctaatgaactcagcagccgctcccacagtttggttagggtcactgttaggagcgagcacttggtgacttatcagaggagcagaagccacatgtggttggttgaccttgctggaagtgagagaatagctaaaactggggtagaaggagataggctgaaagaatcacagttcatcaacaaatcactatctgccttgggtgatgttatatctgcccttgcctcaaaaaattcccatattccatacaggaattccaagctgactcatttgctccaaagctctttaggcggagattgcaagactctaatgttcgtgcagataagcccaagctcaatggattcaggagaaactctcagttcactcaattttgcgagtagagtccgagctgtagaacatggccctgctgctcgtaagcaagcggatccagctgggagtttgaagttaaagcagatgactgaaaaacttcagcatgaggaaaaggagaatgcacagctgaatcaaagcttgcagctgatgcaactgaagtatgcttctcgtgagaatgtcttcaggacactaaatgaaaaggtgaaggatgctgaacaagcatgcagaaattatcagcagcggattagagagctggaaaatgaattaggcaatgagaagagggcttctagggattctgctagatcctcaaggcccccacttgttcctacgagacagagacaacctcagggaaggactaacagcttcgcaccaccttcaggcccttctagatggaggctcaaagcccccgcaaaacacaacaaagagaacattcctgtggcgatgaataaaccaaatgctggggatgatcctaataagcctgtcggcagagcaaggcgtgtttcacttgctccggtgattcgacaaatccccatccagcccaagaggcgatcttcgatggcagtgctaccatccgtgagagagcatctttctgtgctaaacgacaagaaagcaggatctcgactgtcgcaagccaacatggcaagaggatcacttggggcatttggcttgaatttggttccaggaacacccctagcaggacatggtggacctgttgatgctacaccagatggagcaaagttcaggagatttgatttcggaagcagcagcaagttcacaagccctgccccaaatgtgggcatgtggaacaaaatggtcacgccgcagcagaagctgggaatggcaccggcaggagcgaagctgtgtttcagcatccagaaaagagttacgcctccacatgttcgggcgaaacctggattgggcatcttcgacccagctctgcgtgagaatatggtcgtggggagagccggcaatgcgctgcgggtgctcaaccccaagcgaaggcaatctgttatctaactcttgaagccaaaggtacagcagatgtttggacgttcaaacggagcgtgtggttcttagtgaaaccgtgaagatgttcttttcagcatctttaaatggattctgcttggttgttactagttgataggaaagctatgttaatactgttaatggaagttgttaattgtatttgttcgttactaagaatcgcttcaactgttgagcaattttaggacttgtttggtagagtcccgcttcacaattctctaatagagtgattctgattgattctctaccgaaagtgaatctatttgacgaaaatcatttggctgtgaagattcctgag

SEQ ID NO: 25463 - DNA, 3963 bp, Zea Mays
tcgggccagccggctggcttggacgcgccaagtctaatggctactgagagtgctttccgattgattggtgggacgggggctagggactggagtaagggatttggtgcatttggctcttcagcaggtgccttatcaggggaagacttgggatttgtggataatgacactggggtttatgggggctggaacaaatctgttccaaatcgtagtggaagcgcaccgcctagcatggaaggatctcttgctgctcttggccatctcattgatcagcagagtgggagctttgaagctagtttgacaaccttggataacataactgacagttccaaatctgaggagcaactacgtgctgatccagcatattttgagtattatggctccaaggtgaatctgaatccaaggctccctccgccacttatttcaagggagagtcgccgattaatgaaccgtgttggcaaggctaaagagtggaggatggtctcccaagataacagcagcaaaggctcaatatacgttcctcgatctatgttgtcaactcacaaagaagaacctgaggatgataaatctccaagattggattcaagttcagtggaggatgcccagattgtctccagtgcatccaactttcagagccaggattttatgctggagaggtttcaacagagtgttgcttcttcgcctgatagttcatcttctaatccttcaaatagcaacactggtgattctatgcctgtatattctgacataaatttgttaaagagtttgtcatttgatgctttgaagcaatcggatttgaactcttggacaccaaaaggcccactgaaaagtaatgttaacaatgacctttcatcgccacccctttccagttcatcatatcctggtagcaaaactggtacgcaaacttttgagcaagaaaaggctgctgctgacaccaaacatggaaatgttgtgcttggcagtggcgcagctgttactgaagttgataatgtggactccattatgaagaatttgaagttaagtttggatgtccatacatcctcacctgccaagcagaggtggcaggacaatgtcttgcagcagtatggttcctttttaccagcccaaggtgatcctattcaattgactactcaaggaccccatcctcctcatgtaccttttgttgataacttgtctcatgctcagctcaagttgcctgacatccaccaaaatttaccacaacctagtatgacaacacctttctatacaccaaattcttttgggaacccttattatcagaatttgcaccctgctaatgcttttccaacctcaattggaactgggggttatgctgtaagtggttctattttgccaccgtttatggctggctatgctccccaaggtcctcttgctacacctcttgacagttctatgactccaagctttagtggcaggccatctggatttcttccagcagggaatcttacagggggaacagattttatgcagtcatgtaaagtatacggacaatttgagcctggtatgcagccatccattcccgatccgaacttcattcatttctttcagcatccctctttatttcagtatactggaggaaatcaatacaatacaatgggtccaagatttactgttgttgggaatttagctgaaagctttgattcacaaaacacgatacctcaagctgcatctgcatatccatctgatcagaggcttccactgccaataactggctttcctaattctcctacagccagaagaggagggactgttccaaattatcaaggcatttcatcctacattggagtgccaatgacttatcctactagtccagtgtttcagggacaaacattgcctggagtattgcctcctgttaggagaaacgactctgctggatttctgcccccctcaagaaacatcactggtagccctggaattcaagggcagcgagcaagacagaagtttgatgaatcaaagacctgctctttcttagaagagttgaagtccaacagagcgcgcatggttgagctttctgacatcacaggccgtgtagttgaatacagtgctgaccaacatggtagccgattcatccagcagaagttggaaaactgcaccgccgaagagaagacatctgtgtttgccgagattcttcctcatgcttcagcattaatgactgacgtttttgggaattatgtgatccaaaagttttttgaacatggaactcgtgagcaaaggagggatcttgccaccaagcttgttggtcacgttttgcctttgagtcttcagatgtatggctgccgtgtaatccagaaggctctggaagttatggaacttgaccagaaaatagatctagttcatgagcttgatggtcatattatgcgatgtgtccgtgatcaaaatggaaatcacgttatacagaagtgcattgagtgtgtccccacagaacatattggttttgtagtgtctgcttttcagggacaagttactagcctttcaatgcatccatatggctgccgtgtaattcagagaatcttggagcactgcggtggtaactcacaaggccagtgcataatagacgagatattacagtgggtgtgcatccttgcgcaggatcagtatggcaactatgttacacagcatgttctagaaagaggaaaagctcatgagaggagccaaattattactaaattggccgggcaggttgttaccatgagccaaaataaatatgcatcaaatgtgatagagaagtgttttcaacatggtgatattgcggagcgggatcttctgatcagacggattgtggagcagacagagggcaacaacaatttattggtctgtttggtagtgtagtaaaagtgttccctccattatcccttcctctctttgccaaacgggtcggggttctggaaggtagggctaggacatggggacctgatctcagttcggtacagccaatcagataacaccatgagtatctcagttctgctattccagctttctgggagctgcgaatcctatggattaccaagacatgggatctctgtaaacttatttcttcctgtgttgatgttagtttatatttcctaatcaccttttatattcaatcaggcaatgatgaaggaccagtatgctaattacgtggtccagaagatacttgaaacttgcaacgaggatcagcgggagcttctgctcagccgcgtaaaggatcatatgcaagcattgaggaagtacacatacggcaagcacatcgtaagccgagtcgagcagctctgtggcgacggaactgccgagtcaggttcttgaaacgaaccgccgcctaattcttcataggctggagggtgtcctgctcttttgctcattccgtcagtgacgaagaaagcaaaacggatcaagtctaactctggcgcttcagaacagactaacaaagctgtcgtcgaagattgtataggtgtgactctgttcagggatagtcttcaggttctagaacagaagggtagtggtgtgcatcagtgtatctgtttactggataatagtggttggttaggtgtgtgcagaaaaagtttagtgctatgctttgtatgtgatacatattaactatgccttggaatgttcatatgttgtcctgattacgtgtgatatctctcgttcagttcaagttgcgttttctacatggccatgggaccatctgccgatttgatgaaaaaggaaaggttgtgcacctttgtaagcgggcatggagatgagctgcgctattttttttttttacaaaatgtctgctgggattgaactgtctattttataaaaatatcatattttcttttaatgtcaacagaaaaattacggactgtgtatggatcccatgtagctaaggccagtgagtgttacgatgctttgtcagttgatgttatgtcagtcttttcattgttaattctgaaagtagattttatgccgatgaacctttataaaaag

SEQ ID NO: 25464 - DNA, 1909 bp, Zea Mays
ggaccaatgggcctagagcccctagacaggcagtttccatgcctgctccaggcccaggcaaaacagcaccggactgcggctccaccattgccgttcctgtttcttcgaattcttctcccgttcaggcgtccatccctcttttctctcgtggcgacgaagacgaccgacgccgacgctgacgccctacgccaggtgccaggttccgtcgggtccttcgccggcgaagagcatccaccaggcgacccagtgctgttctggtgcggtttcattgcggaagttttgttgtgggattttccggtggcgaagatgatccgactacccatgtacgcggcgttcagcctgctggcgacggcttcggcggcgtactacgcgttcagcagccgggagcagttctacccggcgatggtcactcatacagaagcgggaggcgtctgttgccatcttcttctcctttgaatatacgatactagcaacatccactttatcaacatttgtgaagtacatattctatgtcagtgacatgctaatggaaggtcaatgggagagaaaggcagtttatacattttacttggagctcatcagtgaccttgtgcacttgtcattatacatgctcttcttcatagctatcttcttgaactatggtgtcccgctgcacttgattcgtgagctatatgagaccttccgcagcttcagaattcgcattgcagattacatacgttacagaaagatcacttccaacatgaatgaacgctttccagaagctacatcagaagagctcgatgcgagtgatgctacatgtattatttgccgtgaggagatgactacagcaaagaaactgctctgtgggcatctgttccatgtgcattgtctgaggtcatggctagagcgccaacacacttgccccacgtgcagagctccaatcgttcctgcagataatggacgtgctgcatcatcacgacaacatggagcccaggctggggttcaacctggtactgccactccatcctcagaaggagcaccaggtgagaacatgagcaggcgccaagcaaaacttgaagctgctgctgcagcagcttctttatatggaagatcttttgtttatcctccagcaaacaccctaaacagcaggtctggttctccccagcctacatcaagtgcaccacaatctgaagccagtagctccaatcatcagtcacaaaaagaccaagaaacacagctccaaaacagcagcgatggtttagtgcctctgccttttagtgcagatggtgttgttggttcaggaacaagcacaagagatcttgaaaattcactgcagaaggcacaagaaaactttattaagagccagattgagatgttacaaatccaactgcaaatggtgcagcgtggcgctgctgggttgagcagtagcgagaacactgagcacacagaagactgactgaatctgtaaacaggcactcctgcatcgtggagtaataatgagaatactgagcacacgcagctgaatctgtaaataggcggagatgaggatggggataaaagaaagcaatcaaagaattggctatacctgggggaaactgatgttttgcctggattttggtaggcttgttgactatgctttcctgttactgtgttagtgccttcttgccagcgttagatgtttctctacgtgtggtggtttctgtaggttgggtacatctaattgctagtttaattatacgattacacaaaattcttgtaccgagggaaaatagaaaggataattgtacaaatgacttttttgtgtgcatatccatgatatcgggattgtctgtagattttgtgtttactggagtaaaacagaaaatttggctgctgattggatgttgaacagagtggatctggcatgcctaatactgcagctaaccgagcg

SEQ ID NO: 25465 - DNA, 1048 bp, Zea Mays
tcacataatggacattcatccggatgagggctcaggtgctgaagttttggttggtagctttcagcttgctttttcattaagaagtgtttcattacaagcaggctttcttccaccttcacgcaggcgttctctttttactttggcaacttcaatgctcgtgtttttttcgaaagcttttaacgttcttgcgctcattccagttgtgaagcaagtgttgacagaaagtacagttgatccatttctttgtttaatagaagactgtagattgcaggctcttgatagtgctaatgagtcctgcacgaaactctatggttcaaaagaagatgatgagctagctctgaaatcactgtcgaacattgacatgaatgaaaatcagtcaaaagaaacatcagtgcctcttatacttgacagcttggaagatatgtcggagtcagaattgtctgctattaggaaacagttgcttgaggaattttcagcagatgacagctgtctgggatctcattttactgaaacaccttcacagtatccagcacaaaatgggaaactgcaccataagtctatggaggttattccattgggatttgtttttgaagatgatactctcgctgaagcatctgacagctcagtagaacctcacttgcaacatccgccatgtaacaacattcttgatgtcaatcggcttcttgattcagttttggaaacatctcagcatgttggaaggtcgtcagtgtcaacaaaccaggatctgcctttcaaggacgtagccaaccaatgtgaagcacttctgattgggaagcagcaaaagctatctgcgtgcatgagtgtctgtgaaaaagaggctggtgaatcttccgtcgagcagtcatctcggcaggatcctcaagcagatacgtttctctgcacagctgatgaacaatggcaccccaattcctggcctgcctgcaggtgcgttttcaatcctaaacccggtgtaatgaaggtttcatggaccgaactgaaaaatagtctttacaagcctgaagacctcgttatgtctcaccagggatga

SEQ ID NO: 25466 - DNA, 2383 bp, Zea Mays
tagaaataatagtaaaccaaccggggggatgggtgggccttctcttggacaagaaaattttacgaggcctacttatgggcacaggactgctgctgcaccgtgtgactggatttgtactatatgcggatgtatgaattttgcccgcaggacctcctgctttcagtgcaatgaacctcgtactgaggatgctcttccagctgatgcgacaggttccgcttcacactttgggagaaggggatctgaactaggtccaactcatgttttagttgttcgtggcttggatgaaaatgctgatgaggaaatgcttcggtacgaatttgctaagcacgcaccaataaaggacatccgccttgttcgggataagtttactcatgtgtctagaggttttgccttcgttcatttccattcggtggaagatgctacgaaagctctggaagctacaaacgggattacacttgagaaaaacggtcaggttttgcgtgtagcatatgctaaaagtacacatggacctgcatcagggggttctcagtcaaacagccttgctgcagctgccattgaggctgcatcatttgctcagcagtatgatgccataggttgggctccaaaagagtacaatcctgatgacaaacagaacaacaactctgaatctcaaaaagatggcagcacagcacagtcgggatttgtttgggatgaaaaatctggttactactatgattctgcatctggattctattatgatggaactactggcctttactatgacagcaactctggagtttggtattcatatgatcaacagactcaacaatatgtcccttgtaatgaccagagcaacactaaggcagccggggaggcggccagcgaaaacacgaaaacctcagatagtaatagtggcaaaaaggttgtgatctctgcgcctgctgccacaattaaacaaagtgagaaaacttcacttcctgacgctgttcaagctgctgcaaatgctgcactggctgcagaaaagagagaaaaggagaaggcaaaagagattaaattggcctcaaaaaatagtctcatagctaataagaagatgagcaatgtcctagctatgtggaagcaaaggaatcaagaagggcaggccgcacgaattgtccttgatgacaaagaaccagcaaattctgatgataaatttagtcattcacgtagtggaactggattctctttgaaaagcaagccaaattctgaccttgaaaatgctatgggcaattctcttggccaaggaatgacatcgactcaaacattggattctgttgtaaagcctagacctgtcagtaacagcttagggactacagttatgggtgtcataagaggttctgctagaggagtgatcaagtcagatactacgtttcacgcattatctgatgctggtagcactgattcccgcaccactataaccacaagagcaagtgggttaatgacaagttctgaggcacttataactcctgcacccttcaaaactgatgtgtctgccttagtctctaatactccatcgggagtttctgggagtggtaaacgtcggttttctgaggcaccgggacaatcccagtacagggatcgagctgcagaaagacgaaatctgtatggatcatctcatggcactgatactgttggattggattcaatgagatagggtcgatgccgtttcctcctggtgtgggtgaacgttccagtggtgaaattggcaacagcgaaaactatgaagttattaccgctgatagagcaatcgatgaaagcaatgtgggcaaccgcattctacgcaacatggggtggcaggagggactgggtctcggaaaggatgccagcggtatcaaggaaccagtcctggcaaaatccgtcgacgccagggctggactgggaagtcagcagcggaagcctgatccatcccttgaagcccaagccggggacagctacaaaaccatcatccagaagaaggccatggcaagattcaaggagatgtcttagctacactgttttatctattttattgctgcattttgtagtccgtttttaacagcatgcatttttttgtttgctcgtgtgttttttaaataaactgagccgctgaattgtgatttattatcctgaaaggggcactacatagttcgagacctggatgctttggttcccttgtgtgttagttttcatttgcacgacctatgtgcccgggtgttcataagttgatttgccacaatgtggtcgtagagtctcaacatcaggtcatatcacatatcgtttttttaaacggtgagcatgttttctccattattactggatgaagagaaaggttcttcttggtttgagggaagggtgatttaagggattaagattctttttagaaaaatac

SEQ ID NO: 25467 - DNA, 3289 bp, Zea Mays
cacaagtgcggtgccataagtgacagccacctcagtctctgtctgtggagctctctctcgcgcgcgttgccatctcgcaggcggcgacaggagatggacggggagcaggcggcgcggtgggcggcggcgcaggagggggttcccgtcggggcggaccttgtcgcggcggcgctgcggcagctgcgcttcctcgcggcggtggaccgccgccggtggctctacgacgagggcccgctgctcgaccgggccatacgcaggtacaaagcatgctggcttccgcttcttgacaagcacactaagggtgtggttgtagatggtccattggttgttcctcttgattgtgagtggatatggcactgccatcgccttaacccggttcagtacataagggactgcaagaaagtgtatggcagaatactgaacaataacaacgttgagtcgtccactcaaacaaagtcgacacttgagtcagaaaaagtttggaaagagctgtatcctgaggagcccttcgaattgttgttcacaagaacctttgacactgccgtggatgtcaaccctgcaggtgcagaggaggacattacctatgatctggtctcggctgttaagagacaatcctctttctattatcaggttggaacaccaacaatgcatgatccacggtttctccaagaagctctagctcgatacaaggcgtttctttacctgatcaagatgaatcaagaaaaaggattgcagcgcttccgtgtaccaacctatgatgtggatctgttgtggcacactcaccagctgcatcctattacctaccgcaacgacatggtgaagcttcttggaaaagttctggagcatgatgacaccgatgctgatcgatctgaagggaagaaactcgatgttggatttaccgagactactgaacagttcgagagtacctttggtgtaagatactggaaggctggatgtatgtaccgtggcaacgtgccatctcctgtgacatccactcctcagacattcagtgctgaggttggtactgggtcttacatctgcaaagcccagaaagatcttaatgcccttgatgtaacagttgtagagttatatttacaaattgtagacatcaagaatttaccatctgctgttcaaaaagaaaatgtgtatgtacggttcgccaagaatcaatcagatatgttcatcagtgacggcggcaggttggatatctcaacagttacagggaagaacaccggagtttgtttacagtgtgaacctaccggagaactcattcttgcagtaatggttgatcaattatcaaagaaaccagaaccgatagggaaggtttctttcccactgcacgatttgacagggcctgattctaagctctccttcgagaagtggtttgaactgaaagctcatggtgggcatgccgcttcacctcctgttagtcttcgtgttgcagcttctgctactgtcccaagcagcgctcagaaggtgttcaccatggtcaggatggagccattctctctcaagtcatgtcttttgccacattccatcaaggatcagaacacgggcagctggactcgtttcgtaaatgattgtggtaccgagcttatccgtctccagataagagagcacaaggcgaagaatagcatggccgtcgttcgagaattggttggagtattgaagtcaacaaaaaagcaaattcaacttgcagaattcaaggaaaacaagtggaccctaaaagactccaacttgccaataagtcatggcactgatggcagtctactcgatctcaaaggtgacaaccatctgatcaagctttatcggggaaggaaactggaatacgagcgcaaatgttgcagcgctcactctgaggacgtatcagctgttactgctgtaaagttctgtgctgaacatccatatggcaaagccgttgccttgctagacactgaagctcagcttatcatggtgaacgaggattggctcctacttccatggatctccatatcagtcctgtttatggacggcgatggcggtacgaaacttggcggcggtgccatggttcagaaaggtacagtgtttggatccgacactagcatggtgctagagacacagaccgtcggagcagggagcgtggcatccaatctagcacaatgtggcacttgcagcgccgtgttcggtggtgatgataaagaaatggcgaactgcaaggttgagcatgcgagctctggcgcttctcgcacggttgttgcaagtggtgagaatgggcacactgagactgctggctgtggaggcggctgtggtagcaattgtggacccatgatggctgaagaccccaaggccggcaatgccaagtccggaggctgtggttcggggtgtggtggtggctgcggtggcgcgggaggttgtgggaccatggccaacgaaggccaatccaggtccggaggtgttggcaccttgttgagctccaacgccatgggtggtgagggccagcaggcccattcagctggctgtggctccggctgtggtggtggctgcggcagcggcatggtcatcgaaggctccaaggccaacaacgccatgtccggcggctgtggctccggttgcggtggtggttgcggtgccctgttcaacgctagcactgctgccggagagggcctgcacaataagtcggctgggtgcggcggcggcgggtgcggctccgggtgcggcggtggcggcggctgtggtagcggcatggctatcgaaggcttcaaggccaaccacgccaagtctggtggctgcggctctggctgcggtggtggtggctgcggcaccctgttcagctccagcgctgcggccagccaaggccagtccagatccggcggctgcggctctggctgcggtggtggaggctgtggcactggcagcatggtcgctgaaggctccaacggcgggaacgccaagtccggcggctgtggcggcggttgcggtggcggaggtggctgcggcggcggaggctgtggcgggggttgcggcgccgtgttcaacgcatgatctcggtggagtggaggcatttgtgcagacatgcagtcgtcgtcgtctactgctagataccacatgctacagcatactgtgtattgctgtgcataatctactaaataaaaggaatgaataaacaatggatggatcggctgcctccgtggcgtttctgcaaacgaaaaatctcggtgttgttgggtgcagggatgaggatgaaaacgatttcaaacggtccgaaacgatatcgtctatttaacggttggttaagaaattacctgattta

SEQ ID NO: 25468 - DNA, 3194 bp, Zea Mays
ttgaaaaaattacgacactgaagatattattctgtcacaaaagagacactcctctttgtgtgcttgtatggatgacaaaaaaacatgtttggaaattaagtgatgcatgagcctggattatgtatggaaatatggatatcacacatacttttgcattatggatatcacacataatatgtgacgaactacaaagatgtgaaacagaaaagaagtacaacaattgtagcacactcctgagggcctgtttgggaactcttcctcaaaaccacagttttataatgccacaatttattgtatgccattgacatagccatggtatattttacatcagtccaatctgatacctatttggagacacaatatttcagttgtagtgtagaagagaagactgcagggatgccgacattactttctcttgaagtaactggtgatgcaattgaaggaacaactatgtttgccagtaaaaggtattggggaggagaagaaggggacacaatgttccgctggatactgacaaattctgatggaaccgagaaagaaattgaaggagcaacaagttcatcatacaccttgaaatgcaatgacattggcttctacatatctgtcttgtgcaagcctgttagaaatgatggagttgatggttctttagtgtcgactgaagcgattggtcctattataccagggccaccaacatgtcaatctcttgaactagctggctctatggttgaaggtggccgtttgacctttcatgctgtgtatacaggaggtttgcggggaagttgcatccaagaatggttcagattacatgatgatgggcacaaggacaagttgactgctgatgaatgtctagaccttgatctagctgatatcgattgccggattgaacttatgtatacacctgtacgagaagacggagtgcacgggttaccaaggagtgttacttctgatacaatcttacctggggagcccaagggtgtcaatcttattctacctgagtgttttgaggacaatgaaatttctcccatcaaaacctatttcggtggcaaggaaggcactggcaaatatacatggtttcgaaataaagagaaacttgataacttggaatttgatctggttgctgaatcatcagaagttgttggagaaaccttaaaatataagccttcattgaatgatgttagttcctatctgattctttattgggttcctacacggcgtgatggaaaggttggtgatcctttgatggctatctctgatgatccggtcatggcagcttttccatctgtttcggatgttcacttagagcagaaaagttcagatgtatattgtggactaggcatctattatggtggatatgagggattaagcttgtatagatggtacagggaatctagtgatggaactaggcttcacatagatggtgctgattcagtcacatacgaagtgacagatgctgattacagctgccgtctactgtttggttatactcctgttcgttcagatgggataagtggagaagaaaaactctctgaaccatctgatgtaattttgccagaactactcaaaatcgagacactcaatttcaaggggaatcaggttgaaagagaaacactgactgctgctgaacaaattccgtacagtgagattcaacaacatatatggaaaaattataagaaagagatgaaatatcaatggtttatttccaatgaatcaggaggcgatcagtcttttgaaccattggcaacccagtgttctcgctcatacaaagtgcgctttgaggatattggtcgttgcctgaaatgcgaatgctttgtcactgatgtatttggacgatctagtgaattggtatccgctgtgactgctcctattttgccaggaaggcctaaaattgaaaagctggagattgaaggaagaggtttccacactgacctatatgccgttcagggtacctatagcggaggcaaagaaggcaagagtaaaatacaatggctcagatcgatggttggaagccctgatcttatctccatacctggcgaaactggaagaacgtatgaagctaatgttgatgatgtagggtataggcttgttgcaatttatacacctgtaagagaggatggagttgagggacaacctgtttctgtttcaacagaacagattgcagttgagcctgaactttacagggaagtgaaacagaagctcgatgatggttcagtcaaatttgaggttctgtgtgacaaggaccgaacacccaaaaaggcacaagtaatgggccatttggagcggagggttttggaagtcaaccgaaagaggataaaagtagtaaagcctggatctaagacatcattcccgagtactgaagtacgaggaacctacgctccaccgttccatgtcgagctgtatcgcaatgaccagcaccgcttcaagattgttgtcgacggtgatactgaagttgacttaatggtgcaaacacggcacatgcgagaccgcatcatcctcacgatcagaggcctcgcccagaagttcaacagcacctccctcaacacacttctcaggatcgagtcatgatagacctgacagtgtaaaaaccaactattacgggaagctgtaccccttgttccgattggttagagtgcgtggttttagtaggattcgtgacatgccagccttttgtgtgtatgggtgtgggacgggccgagcgtgttggattacaattttttccctgacacatctctcaaatcagagcagcatcagctggttgctctgactggtgccgtcgtgcgtcatgaaatgtacatagggtggttagagcgagaaagagagtggtgtttcttggtgctgtatttattatgcactggttgggttgggttttttcgactgccattctcatactaagtattggttctttcttttttcggtcgttgggtttgcatatacttgtaccgacaacacagcttggggtgattgggcgagtgctgttcagaatgcctggtccacacttgtgtacgactggaatcctacggtggcgtattcacatgctgttttatggtgcaaatgtaaattcatctgttcataaacgagaatcaaaatcgtcggccacgtgtattcgtcgtattcgtaccgatgtatactaccttataaaccagtactaatctcacggtggcatcaattatcttcctctgtttcacaaggcacacgtt

SEQ ID NO: 25469 - DNA, 1780 bp, Zea Mays
cagaacactacgagactacctccttctctccaagtcgttgtcttcttcggttcttcctagcgtctccccgttcttctctccgtagtagctaacagtatagtgtggcctcgcatggagactttccctcctcgctggccccgcatctggcccggattaaccgccttgggctccctccccagattgccccacccaccgtcagcctcgtcaggtatgtctcgtgttccctaaccttgacgcttctcccttctcggcgcctgcttcgttggttgccttcagcggacgccgccgattcggctctcctgttcggcgccctccccagattgccccacccaccgtcagcctcgtcaggtatgtctagtgttccctaaccttgacgcttctcccttctcggcgcctgcttcgttggttgccttcagcggacgccgccgattcggctctcctgttcggcgccgtgtcttgcgacagacaatgctacattctggagtacatggattagatgggtgttgtgcactgcttttatatggatctaatgattgtggccttgaacgttctcgccaggcatatctcatgtttttacatggattagataagtacatgaatctttatttaggcctgtttggttactttagtctagggactaaagtttagtactccatatccagcttgatttgagggactaaaagtatccataacgcattaaatgactcgtaagaaaccaaaatgcctctcatcattctctggcattagagcatctgaaataaatgagagccaaaagtggaattaatatggtttagtcccttttatcacccctttaagggactagagactaaagcagtttaatccttgttttagtcctactatttggcaatttatagactaaatgagactaaaatggagggactaatctttagtccttggaaccaaacaggcccttaacccgaaggtaattgagattgcgaagaagatgaaagaggagagggtcaagttgtttacttcagaatattttgcttacagatgatacgactagatcaaatcagttgcattgtgagttgtgacatgttggcaggatgtcagtttcccttttaacctggctcttgtttgcttcctgtgtaatttgtgtatatccctgtgatgaacattttagtaatctgggtgctcattcaattggcgcgccctcctcatcactcttagatggggaggttgaaggaacccatatcgatgatgtatacaccgttgagatgtttgcttctcgtgtaatttgtgtatatccccgtgatgaacattttagtaatttgagtgctcattcagttggtgctccctcctcatcacgcaaataggtactgaagcccatatgactatgcagatctaggacagaatgtttgcaataaatactgacatggatatctagctttggctttgaaagatgtagggatcttttgttaaattgatttacctagggtcctgctacaagagcttacctgttacctcgttatatctttgtgagattacagcaaaagtatccaatttctacatattttactgctacacagatttgtctgtctgtttggtcatggatatggttcggttttactgctgtaaaaagggattaaaaaatctgcaacctgatttcaatttttattttttatttgcatcacgatgaaatggtagggtcctcccaggacaaaccatgctccggagacagaggcggcagagctggggcaggagcagagccatcacagaaattcttgtctccaggtaacaggaacctgaacaaaatggc

SEQ ID NO: 25470 - DNA, 2453 bp, Zea Mays
taacgaggcacccgaagcaccaccatctatcaaacaaaatggggtgaccgctgtacagggagaaaatctccacgacatcagtgtccgcggagaggaggatgagcagaaagagatgctgcagcaaatgactgacggagtcagagcaatgctgggctcaataggtgacggtgcgatcaacatttctgcctacgacaccgcatgggttgcccttgttaagagcctggaaggtggcaatggccctcagtttccctccagccttagatggatcgttgagaaccaactaccagatggctcgtggggcgacgaggagttcttcctggtctatgaccgcatgatcaacactctggcctgtgtgattgcacttgagtcgtgggaaatccatgctgacatgtgcgagaaaggtttgtcattcattcgagagaatttgtggaggctagagcacagtggttcagatgactggatggtcgttagtttcgagataaccttcccccagctgctggagatggcaagagacttgggtctcgacgtgccctgcgacgagccatccctgcgagctatctatgcaaggagagacgcaaagctcgcaagaatccctaaagaattactgcacgcttcaccgacaactctgcttctgagcatagagggaatgccgggcttagactgggagagactactgaaactccagtgctccgatggttcgttcatgtcatcgcctgcacccacagcctacgctctcatgcagaccggcgacacgaaatgcctcgagttcctcaatggaatcgtcagcaagtttagcgggggagtgccctttacctaccctgtggatctgttcgagcacttatgggtagtggacaggatagagcggctgggcatagggaggcacttcacaggtgaaatcaaggagtgcctagaatacgtacacaggtactggggcgacgaaggcttgcccgccacgagggacggtccggtctcagatgtcgatgacacggccatggggttccgtcttctccgactgcatggctacgatgtctctcctttaatgtgatgcgatggacttgcatgttgcatgcatgcatatgcagctgtgtttaagcacttcgagcaggacggggcgttctactgctacccagggcagtcgaacaaatccgtgactgctatgtacaacctctaccgcgcttctcaggtggcctttccaggcgaggatgagctccgacgcgctgaggcatacagccgtgagttcctctgccgcagacgagcctccggggagctcaaagacaagtgggtcatccccaaggacttgcctggcgaggtcgcttacgcactggacgtgccgtggaaagctagcctgccgcgcatcgagacgaggatgtatctggagcagtacggtggtgccgatgacgtgtggattgggaaggtcctgtacaggatgtctctcgtcaacaacgagctcctcctccggacagctcaagccgacttcagaagtttccagagacaatgcaagctcgagtggcatggcctcagaaaatgggccagcaggagaaacctccaagcatacggcgtgacgtcgaacagcacgctgcgatcctacttcttagccgcagccagcatctttgagccagacagagcgacagagcgtctgggatgggctcgcacggcggtgctcgccgaggccgtctcctcctgcctccgagacggtcgttgtagccgtgccgacggcatgctgagggaactgaccagcggcatccacctacgcaacgacgataatccggcagccagcttggtgcatgctctccatgagctcattggcctccttgcattcgacaatgcttcctacaacagccttcttgatgcctggaagcaatggctcgccatgtggaccgcccagggacacgaagggagcgtagcgctgctgctggttcgcacagtggagatatgctccggccggaggcgtagcgcctctgccaccgacgatggccaagcacacagcctctccgagtactcccagctcgagcagctcacgtcctcggtatgcagcaagcttgctgcagcaggcaccggagatggagacgacctttccccggcaagtgtggaggacgcagcagatcgccaccgtgtggatctggagatgcagacgttggctcggtgcgttctccggagccgcagcagtatcgacgcagtgaccaggcagacgtttctccatgtcgcgaggagcttctattacgtcgctcattgctcagctcgaacggttgatgcccacatctccaaggtcttgttcgaggatgtcgtgtagccaccgtttgggcctcgttttgtatctttaaagcagtgtttggttccagccagatttagtctcggccaaatcaaatgtttgaatggtaattacatgtattaaatatagtctaattataaaactaattacatatataaagactaaaagacgagataaatctact

SEQ ID NO: 25471 - DNA, 781 bp, Zea Mays
atccctctctagtctctaccctttccgcctcggcacctccccacccctctcgccttcgcttcgtcgccacggcgagccccacgccgccgatcggggcgccgccagcggcggcggcgcccgatccgatggaagcggaggtggggccgccgaatccgccgcggccggagccagccggatcggagcccgacgacgcgcgcctctccccgcctcctcctgctcctgctccgccgcctccgcccccgcctcctcccgccgccgaggctgccgccgcgcccaccgcctccgcggccttctcgctgcaggctccagctccggcgccggcggaggcgaacggcagctccgacaggaagaggaggaggaaggcggaggacggggacgggtgcaagacctgcagctgcaagaagtccaggtgcctcaagctttactgtgtgtgctttgcttctgggttacattgtactgaatcatgtggatgtgaaccttgtcataacaagccacaattgcaaggtactctgcggatggcaacagttttacctctgaaacctgtccaaacattcgaagctggccaagatatagtggaacaagtcataaggtctcctatggatcttattagaagaaaatgcacatgcaagaagtcaggctgccttaagaagtactgcgactgctaccagggaggggcaggatgctccatcaactgtaaatgcgatgattgtagaaacccatttgggagaaaagcttggagctggctattcttatctgcgagattggtccaagaccagtaggg

SEQ ID NO: 25472 - DNA, 3224 bp, Zea Mays
taagcggccatgaggaggacgcaggcgaaggagtatggcggccccgtcattcgcgccaaacggacgaggatgggtggctcctgcagcagccgcgacggcgagcagggccagcgccgcccacgctgatccccggggcacaccgcccctgccacatcacctacgcagcccacgcgcaaccaggtctcctcgacccagatctctgccccaggagtggaggcgacgccgtaagcgccccaatgcggcgagcggcaatggccggtgcgtgcgcggacgtcgacgccgccgcctgggctccgggcggcgaggcgcgggatctgcggctagggttttggcgcgcaggaggattcgggagttgcttcggcgcgagggagtgggaacgaatagggagagctggagcagcggggcgacgaccgatgaggttggaactcagaagggggagggaaaaaaatcgaggggagcagagcacgcacggacgaggatgggcggggacggggataagatatggttccatcgatccattgcagggacagtgcaagcggccgggtccggcgacggagacgaagccgaggaagagaaggccttcttggtgccgagcgccgcggccttcccccacggcatgtccgccgccgccgctggcccgtcgctggccgtggccaagaaagaggagttcagcaagtcgccgtccaactcgccggcctcatcgggtggcacggacggtggctcgtcggctgtcccgtggccggagcagatccacgcgcagaacagcagcccgacgctgttagaaccgagtcgccaagccatccctctggagtgagtttttttgctattatggtactccttttaacatgcttctccattatagtactcagaaattaatcttgttcctaatagtatttataagtgattttgtcctacaaaatagtactgtaacctgtttttaattatttttattttttccattttccttaacatctgacgtgcccatattgtcattcccttctccgattcgctcgctttcctttatgataaagttattttgccttgtggatgattatgtcatatttggtgaacttaaatatggtgatcaacatctcctggtgcagctcggtatctcatctaaatatgctgaaagtggatgtaatatgctgaaactgaatatgtcaaatctgaatatgctcggtctctcatctgattatgttgctcggccattgcctttgggattggtcaaagctgcgaaagggatctgctgtagaaactttatctattgcataaactcaatctggctgtctactgctgttggtagcctcgcaatggtagctgtatctactggtaatgcagctctctctctctctctgtatctacaggttcaaatcgatggccggttgcttcttcaggctagcagaattttaccaagacccagagttcggcatgttgtggcaatggaaagggctggcgttggcttcagagaaccaatctgcatgacgttgattctatcacccatatccttgacgaccaaatggaggtcccaaaaaattgagcaaccaagcaagggctgtctgactctgtcaaaggcccagcagagattgttcacacaaagtaagcgagcgaaccgaagaagggaaggacaatatagtcacgtcacgtgttaagtaaaaaggaaaaacataaaaataattaaaaaaaaggttagagtactgttttggaggaccaaatcacttataaatactattagacagaaggttaacttgtgagtattataatgagaagcctgttaaaaggagtaccataatagcaaaaaaactcctctggagcatcgaccgactctccacctgaggaccgccagctccttcctccgcctcgacaagcgttggagagatggtgaagagaagcaagaagagcaagagcaagcgcgtcacgttgcggcagaagcacaaggtgctgcgcaaggtgaaggagcatgacatggaaaaaatggttacaaaggctgatccaagtaaacggattgtactacttcacaacaagatagatcttgttcctaaggaagcggtagagaagtggcttacatatctgagagaagaaatgccaacaattgcgtttaagtgtaatacccaagagcagcggaccaagccgggatggaaatcttcaaaactagataaaacaaacagcatcccacaaagtagtgattgccttggtgctgagaatctaattagattgctcaagaaatattccagaagccacgagctcaaactggcaattacggtgggtattgttggactccctaatgttggcaagagcagtctgatcaacagcctgaagaggtcccgagtggttaatgtcggttccactccaggggttactagatcaatgcaagaagttcaattagacaagaagatcagtgatcctgcgccgtggtgatcgcggccatcgttcgccgatggtctgcgtcgtcttcactcgtcagggaaccggctgtgacggcttggttctaacaggcgccgatggaggccatggagctcgtcgtcgcgctcaccgcctgcgccgactccgtcgcagcctgcaaccacgacgtcgccaactactacctcgtgcggctgggcgagatggcctcccccgcggggcccacgctgatgcaccgcgtggccgcctacttcgtggaggtgctcacgctgcgcatggttcatgcaaaagcatttaagtttgctaagttgcattctaagaacatgtatcaataatgattggaaatgaaagctgaattttttaccggcgagaggctactggagtttgcacctggtggtgtgagctgcgcaccacctccttcataggcagatgtcatctatatggaagcggcaggaggtggaagcactatatatgacacctctatcgctcttgttgattgctggggtcaacatgtgccgctgctgcacttggtgggcctagggaattctaggactctgggctggtttggtgggtagtgaaatttaaatagcaagtgattttctctctggatctcatctattttcttgtccaccgaaccagccttaagatttgttctgtctggatagcacaaaaattgtccatcttgcttgcacccataacactgctctgaacagaagatgcatgattacctgcatgcattaaacgatatactagataaatgtcaccggtatcacaagcttacatctcggagacaccttactatatgatttatgttgtcacaacacacg

SEQ ID NO: 25473 - DNA, 1194 bp, Zea Mays
tttaactctcgtggcaacgaaatgacacgttagttcataaaaccaaatacgctaactttttctgatcggcatccaacgacgcaattgacatcccctcgcctaccccagctctacccgcgacgaagcatcaccaggtacccccagaaccctaatccaagcgacttttgttcggatctcacccgattacgagaaggatgacgtgctcaatggatctcccggccaagggcgggttcagcttcgacctgtgccgccgcaacagtatgctggagaagaacgggctcaaactcccgggattcaggaagaccggaacaaccatcgtcggcctcgtctttcaggatggggttgttcttggggcagacacaagagcaactgaggggcctatagttgctgataagaattgtgagaagatccactttatggcgccaaacatttattgttgtggagcaggaactgctgctgacactgaggctgttacagacatggtcagctcgcagctacagctgcaccgttacgcaacgggtcgcgaatctagagtcgtaactgctcttacactgctgaagtcacatctctttaggtatcaaggccatgtcagtgctgcccttgttcttggtggagtggattgtactggaccgcatcttcacactgtttatccacacggctccactgatactcttccttttgccacgatgggttctggatcccttgctgcaatgtcagtgtttgaatcgaagtataaagagggcctcactagggaagagggaatacaactggtgtcagaagcaatatgtgcaggtatcttcaatgacttgggtagtggaagcaatgtggatgtctgcgtgataaccaaggggaagacagaatacttgagaaaccaccagttgccgaatcccagaacttatgttagttcaaagggatatagcttcaccaaggggcagactgaggtgttgtccgcaaagatcacacatctcaagcagaaggttgaggtcactgagggcggtgatgctatggaggagtgatcctgtatgcttgcatccagataaatctcaaatccgaaagtcattgagttatcttctgacgacagttgtgggccagtggcccaaagcatgctgagggcagccatggctctcagggcatcgtgtgtatgcttgttgaggttcctatgctctaggctcactcaaatctggaatcactgag

SEQ ID NO: 25474 - DNA, 226 bp, Zea Mays
gtaaaggcaggcgccatagggggaagagatagagagctagcgcgcggagagaggagcgtgtgggagaataccagcttgcccgcgcgaatgcgttctcccgcgccaccaggaaaagttgccgccgcctcccctcttgcccgtcaagaagagcctctgcctcgagttgcgtgagcagcagccgcccacaggccgcggttatctttccctgccacctactctggtcgtc

SEQ ID NO: 25475 - DNA, 2288 bp, Zea Mays
tgaatggagtctagggaagagataaaccgaggcaaacctccccccacaagcgcggagaggttgctttggacatgcgacctagtgattcagttcttctcatgacgctccaaaatgctcctccaggtcttgactatgaccgtgataaaagattttcaaagtccttcaaggaaatggttgcgatgtgcttggtgaaagatcaaacgaagaggccaacagctgaaaaattacttaagcattcttttttcaagaatgcaaaacctccggagctaactgttaagaacattttaactgatttgccccctctttgggaccgtgtaaaggcactccagctaaaggatgcagcacaactagctttgaagagaatgccttcttcagaacaagaagcactttctatgagtgagtaccaacgaggtgtcagtgcatggaacttcgatattgaggatctaaaggctcaggcatcactgatatgtgatgatgatccacctgaaataaaagaagacgatgacactggtagaataactgacattgataaggatacatcttctgacgattattttggaaagacagcaccatcgaatggaaataactgcagtgatcgttcttctgtgccagcaaatcctggtcaaaatggtcccgaaataaatgaaatattgtcttccaacaatgggaatgcctacagtgaaaggaagcctgatggacgtaaaaacccagaatcagaaaatgattcattgccctcgacgtcgaagcatgatgctgatgggaaagattatagatgtgatttcaggcaaaaacagaggacatactcaggtccagttctgcaatctggtccgaataatagttcgatgactgaaaggggccacattattgaaagggatgcaggagttcaatctgtatctgataaacaaaagaatggtacaagaagagccaataatcttagtggtcctttgtcacttccaactcgtgcttctgcaaatagtctttcaagagccaataatcttagtggccctctgtcacttccaactcgtgcttctgcaaatagtctttctgctcctattcgatcttctgcaggttatgtaggctctttgggtgataaacctaagcgcactatggtggaaattaaaggccgcttctcagtgacatctgagaatgtggatcttgcaaaggttcaagaaattccagggagcagtgcctcacgtaaattgcaagaggggccttcactgagaaaatcagccagtgttggtgattggtcagcgaatgataagacaacgtctactaatcatcaaaggaaggaactctgcaatagctctgtatctacatcaattctgattccgcatcttcaaaaccttgtgaagcaaactgcattccagcaagatctgattacgaacctactaagtagcttgcaacaaaatgagagagtcgatgcagctcagtcaagagtccagagcacgacgagtgatacagtggttgaagctgctactgctgagagagaacactcgttacttgttaaaatttttgagttacaatctaggatgatttctttgactgacgaattaattgcggcaaagctgaaacatgttcagctgcaagaagagctaaatgtactctactgccaagaagaaatcctggatatgagagaggacgagagcgaagaagcatgatgcggtggagcctgcccccctttttttactactactactgagggggactaaaagccacatgctctaagcccgtgcaattgaggcttggctaactggctgcatacaatacaaggactcgaaggatcattggccaactccgggtgcaatcgaagaacctgcaatgagtttgatggagcggggtttatgatcgttggcctcggatttgaactgttatgtatattcagtcgacccgttcgatttctgactcgggtttggtttgttcagtgagcttttaaggcgtcttgcgatgcgcatctacttgatcattaagatggctatgacgccagcctctaatatatactactagtggtagtaataggtatagcgtccgtatagtaccattgtacttgtacctcagaagtcagcaagactgcgacaataattgcatcgcgtctgtagacagcggaatgcatgagtagctactgtagtacaatggagtgtccccgcatccaggctttgggctgggaaccctgcctgtgctgctgtgagcagtcatgttgtcacctgcgcccattacccgtacatgcgcaatcataaacaaatcagctagctcatcaataatgcactcacggacgggagggaatccacctt

SEQ ID NO: 25476 - DNA, 149 bp, Zea Mays
cttgcctttaatttaacacttagatagtgtttgctggggaggtactcgcttggcgagcatccactggttaagtccatccttcaggtcatccaccaactgcgtcttgtggttgcaccacatcactggctcgatcatcatctctcggtcct

SEQ ID NO: 25477 - DNA, 649 bp, Zea Mays
ctcagttatttcttcctctaatatctcacgagcttggctcgcctcgcctctctgctctctccttgtcctcctgttgccgtgctgcaaaactatagcacgccggagcaatggacgggctcaactacagcaagttgcgctcctcgctccggcctcggctccaagcgttctccggcgtcctcttctccagtttgcgctccctagacgggctcctgcacatggcgtctgtcgccgtcttgcagtttgtccacgatccgcacgatgatccaccagtgctaggctgcgtacacttgactctagctcgcgtatatgccttggatcgagctcgctctctttctctcgtcaaggaccacttcacaaccttgggaaaagacctcaccgtcattgggtactgctgcgatgatgctgaaccccgtcgtcgacaactccagttctacgtcgccgagtccatgtttcgggtagcagggtgtcattttgttctgttgtggatggtgccaagtgctggtgggttcagccttcttatataagtatatcccttctatagtttctttaatgtggactgtcacttaagctagcatgtatttcaaattttcaaatattctataacattttaaagtgtaatccttttgaaacactttcttttgtaatcaac

SEQ ID NO: 25478 - DNA, 1974 bp, Zea Mays
tgggctagaaacaaaatctgtgggtgccgaaattaactggggagtcagatttaatgacaacaaagatgccgaacattttcttaacaacctttgcaaggaggtttctctacgcttgcagggttgtggagttcagggacgtactattacccttaaggtgaaaacaagaagggaaggtgctggggaaccaataaaatatatgggatgtggtgactgtgaaaccacgagtcgttctatgacgattgcaggtgcaactgacagttttgtcactctccagagaattgcaaaacaattattttcagctcttcatcttgatgtgaaggaagttcgtggaattggactgtcactatcaaagcttgagcatgcagatttgggccggggagcatcgcaaggacatatgcttgaatcgtggcttgcttcaccagccgccaagctcaagaaacagcagagtgagatactggggaatgttaatgttgcagggaccagcggactgaaggatttgagatctggaccatcacatacagcagaagcgaaccttagaaatgataggtctactgtatttcacaatgtcgagctgcctccgttgtcccaacttgatttggaggtcctgaagaaccttcccccagagataatgtctgaaatgaatgaaatgtacaagggagaattacaaagtcttgtggacaccctcaatagtgacaagggcaaggaaaatagttcaaaatctcttgctttgcctgcagttattcgtaagtctgtacctgccgatgcaaagcttcaaggatacagagaccacagagactccatgcatttggaggaggaacatactaagggaaaatctgacaaacaactatcagaagctaaaccagccaataatgcttcatgctcaagagttagtgcatcaattgagaaaacaacaaaaagtgttacacaacttgatttgatgcctgattcgctaagccaggcagatctaacagttctgcaggaattacctgaggatgtgaaggctgatttgtttagtgcacttccactgcatagatcaggagatcctgcatgcagcacttccaatgtatctgaaagtaaatcacctaatgtggttagagctgaaaatagatcttctaatgatggtggaactgatgatctgaaaaccccaaggtcttttctcccaccaggaagttctcaaaaatggatcgaacagtttagagttagcagttgcctgattttgaacgtaattgcagagcaacacacagattccagctgtcaacgaccattgtcttctgttctagagcctgtagcttcgttcctacctttgtgtcctaacccaggtagtgaagaatggaatgaaactcattcatgtctctccgagcttcttagacactacatacaactgaaagttgaatatgatattgaagagctctacaaatgtttttgccttttgaaaagattctcgtcagcatcagagttttttctggatctacatgatagcatccttcctttcctacaggattctatcagccagcattacggtgggacactgcaattctagctccttgctcaagttgtagccattctattttgctagaaaggaagaagcaatgccgtgaatgtgcggagagacgtgttatgacaatctgcgcctccaagcagctactcaaatcccgtgctggcagattccttggacgcgtttataactttattataactaattgatgccaatgctggaagttttattgatatattcattgcatctatggatcaatagatgccatgtggttcgatatatcattcgtggagcaatggtttgaagggacctttgctgtgctttgatgttcccaggcgaatttcatgtttgcttcataacccatatgaatttcatgttatctttgtgttgctaccaaaaaggttcctggtttgaagttctttgcgtcaaattttcacctatgatctgaagtaccatccgtgcatcctagttattggaag

SEQ ID NO: 25479 - DNA, 2358 bp, Zea Mays
gatagggcatgtcgggtctggtgggaaaccctttcatcgtcctcctgcgtcgccagagcggagcaacgaggggcgcgcgcgatggcaggcggcggtctccagggagcgaagaagcgcaagcgcgagcacgcggaagggaaggcaaagcctcggaagcaagtcaagggaggcggggacggagcgaagcggaagagccactcggccgccggcggctacacggcccatggcggcgccggcgaagttgtcgcgaggaagaagaccccggttacccccaaggagaagcgcctcgcggccaaggaaatgtcggaggccaggaagatgaagaggaggcagcattacagccttgagaaggaactaacgaaattgtgggaaaagatgagatgtcacgatgtgagcaaagaggagaggtccaaggcagtaagtcaggctatccataaaatggatgggaaatatttggacattgccacatcacatgttactgcacgtgttcttcaaacatgtgtaaagtggtgctcggagtcagagagggatgctatctttgatgttctacagccacatttgcttaccctttcttgcaagaaatatgccgtttttcttgtaaagaagcttatagaactcgcctctaaaaaacagtttgccagtttcatatcttcccttcatggtcgtgttgccaaccttcttcatcatactattggagctgcagtcgttgattatgcatttcagcgaggaacacaacgtcagaaaaggcaattgttagttgaactgtactcccctgaacttcagctattcaaggatctgactgtgcaaagttcctcctgatatcatctgtcctgcttcatatgactattgtgattgataaaatcttggagaaaggtactgttgagtacttaatagtgcacacggccatattggagtactttacaattgcagataagacctcagcctcggatgctatttgtcaacttatcccccttcttactcaaggggcattaatcatagatggagatgaacctacaaacgctccagaactaccaaagaaagcaaaagctaagaagaaaaggtcgaaagagccacttattgttcggatcatgcagacaagggaaggattaaaactaggaattagttgcgtcaagtatggcagtgcaaaggacaggaagaagattattaaaagtttgaagggccacattatgaagcttgctctaagtgattttggatgtctttttcttatctgcattatttctattgttgatgacacaaagcttgttaataagattgtcattcaagagctggtaaaacatttaaagcagctcatttttgacaagaatgggagacggccattgctgcaactacttcaccctttttgctcacgctatctttctccgaatgatctagcttgtctgaactacaatgtgccttctcttagttcaacagaggttgagacatcagagagtgctataggagttataacagaaaataaattagatgatgtgactgctcaagatcccaatggcttagaaggcaagcaaattgtgtttgagagcaagaaggatccattacaaaggcgacatgaactgttgataaaaagtgagcttgccgaggctctcgttcagtcatgcattgaaaatgttggagaattacttcgaacaaattttggcaaagaagtattgtatgagatggctgttggtggtaaagacaacgttctggatggcctcaccgataggatccacatgttgcacgatgcaatagcgtctgatgcggcccaaccgaagactgaagatacggaacatgcatttgaaaacttcttttccagccgtgtaatcagaagaatggtaatcgattgcccagcgtttgcagtcactctctggagaaaggctcttcaggggaagtgcaagatatgggctgaaggacacagttcgaaggtggttgcgagtttcctggagtcgccaagtacggaggtcaaggatcttgcaaaacctgagttgcagccgctggttgatgctggcatccttaaagtgccagaccctaaggttgttcaaaaatgactcgtgcgcgggggcctttttgcgccagtaaatgactcgaggaccatcccttgtttaagggatacggataggttttttgaagctcgttctgccgataaaaattgttaaatcactcgttcgtgtgtacgccagtccgttgtacacataccctggatatatggtgaatcggatacgttattttgttttaaactcggaatgctcctttttatctataaatttttttaggagatttgtgttcttgtcctgctttggaaggccaaaaattattttactcttgtttttttttaaaaaaatccgaggttcttgtaagctcact

SEQ ID NO: 25480 - DNA, 769 bp, Zea Mays
agctcagactcagagtttatttatttattttttatttcagaaagtcattattcacatcatcacctatcctgctgtcccactagataccacatacaaggaaaatatcaaactgcaaattaagaaattaagtaaatggagaagtttatagcacttaactttctactgtctgttcatttatcgattagtacgtacggagcaggctcttggcctagcatgtacgctacagatctctatcaggcaaactatcacatccaacaacagtatgtgcttgtggctcaactacttgcaagcaacgcatgtcatgttgcgcagcatgtgtgtgtgtgtgtgtgtatcagaagatggcaccagcaaccggatgactgaaaacggcaatgctggaaagaggcacaaagaaccatgctgtggactggtaactgacctgatgagctttgcattgcatctaggctccatctacaagatggcaagtcttgaattgaccaagacatgggataagtaggcccaataatgctttccagtttccataggtagacaggcttcgggtccacactacacacctactagcagctagatgtcaggcatagtcaaatgcatgacatctcacatatcctactatgattttgttgctggcttcaaactaaagctcttgtcttgggttacagttttcggttatcatggcagatttcaccctcctaattcaaagtgacacatactaacttacataaatgtttctgaaatgggataggccacatattaccagtcgtttcat

SEQ ID NO: 25481 - DNA, 2283 bp, Zea Mays
gtcacgaaaggggttaaaataaaaaaaattcgggcccaacggccacgctgaacacgaataggcaattaggcatagcgctctctctcccgctcgccccctcgagtcccgactcccgtcctcgatcgaaattccccggatcttccagctattagacagttttcctgctgattttcgcggcttcttttcttttgctcccggggagataggatggagaggatactcagatgcttcaatctagggccaacaggatccgaagatgatgatataagtttcacactgaccgtggaaacgtttagcttcgaagagctctctgctgcaactgataatttcagtagcaccctcaggataggctctggggggcaagccacagtctatgaaggccacataccccacattggacaggttgctgtcaagcggttgagaaccaatgattttccctctaagcaaagggcatttcttatggaggtctatgtgctcaattcaactaaccaccctcacattgtgaaactactcggttgctgttctgagggaacagaacgacttcttgtgtatgaatatgtaaagggggggacattgcgtcatcgattgaaagagttgaactggtatacgagaatgagaattgcacgtgacacagctacagttctggagaaactccatctccaatccgatccaccaatcatccacagggactttaaatcagacaacattttattaagcacaaaccttagtccaaaggtttctgatttcgggatagctaaaattgccccagctggggatgagcttactgcagcaacatcagaaacgttgggaacgtatggatatgcttcaccagggatttttcgtccattaaatgcgacagtcatgacagatatctacagttttggggttgtgctcttggagatcattactggaaagcctgccattgatcatagtaaagaaggagatgaacattatctagttcactggagacaagttttttttggagctgattatgttattaaagagcaagttttggagtagtggttcatttgactgtgtttggaagtccaacgaatctatggacagactaaggttgaaaaatcgtttgtggaactaatgatgatatataaactgatgggcatgtttaggcatacatgtggtttatctgttattttctgaagataaataatactggagagagagagagagttgtcggtacatgtactgttcgtattataattggcttgggagagtgctgcatctgatgggcatgaagatatataaactgctgcatcaaacaggccaatttgaaagaactatcagaaactactgggaacagggactcacttcaggtcgtttatggcatatatgtacttgtccgaagataaacaaatacctgagaaagtgtttggtatcaccatatactgtttgttcttcatcatcttggagatgtgcagcagccatttgtaaactactttggatcaagttcctggtgtcatttctccctagattatcatttcacaaaacaacccctgtgcaggccgcaagcaagtcgaaagatgggaactttgaggaagtacttgatccaaggttacgtggctctgtatccagaatggtgctcagcgaggctcttgctgtggtggataggtgcactgggacagaacctgttggccggcctcggattagagaaatcattagagcccttcgccatgtggtgtccatatctcaggatgatactccgggtgcgtcatcgtcagcagcgagctagatacgtgcatggggtctgtcactccatcttcgatgaagcatataagaggcaaatgctgacaagaaagcaaaaactgtcgactgatgcgcatctgctgtttactgattaaaatataattcatgcatgtgactgttagactgtgtgctatatgtaagagactctgccttccatctcgtacatcctgaaagcttctgtcagccacctgcacagcacttaggtgcgtttggttggagagtcaaatggaatagagtggatccattatagtatttgagaatggagccattctattctacgtttggcaagaataacaaagtcgttctattttttgtttggttgaagagttgaatagagcggagccgttccattctttgtttggtttgagagccgtatgagtatagaggggaggataggagggagagtgcttgcatccggttgtttttggagcgggagcgttccaactacttatagtaaatttccataagtagatccagaagtcgttccactcttattttgttggaaaccaaataaccaaaaaa

SEQ ID NO: 25482 - DNA, 153 bp, Zea Mays
agatcttggtggtagtagcaaatattcaaatgaggactttgaaggccgaagaggagaaaggttccatgtgaatggcacttgcacatgggtaagccgatcctaagggacgggggaaacccagcagatagcgcgatcacgcgcgtcacccgaaag

SEQ ID NO: 25483 - DNA, 471 bp, Zea Mays
gtagacgtcgctggctcactcactcgtgcagttgcaactgcatcggggatgcgcgtacatggtgttcgcgacgacggtggcggcgctgcaggcgtgcttcgtggggctgctcggcgtcgacgccctgcagtggagcaagctctgcaacatctacacccgcttctgcgagcaggcggccgccggcatggtctgcagcctgctggccgccgccggcatggccgtcctctccgcgttctcggctcgggacctcttccgccgcccctgctccccggagtatagatgaattccagtagtacaagaaacctcaccaagatatatagccacactttctgatgtgtaagaattggcgcttgggctttgatcaagttcataagaaaaatgagaaacagatctttatggaataatactttaattgcttctaagaccctgtttggcaactcggaaaggattcgattttccgaacagtaacag

SEQ ID NO: 25484 - DNA, 667 bp, Zea Mays
atcagttgtgagtacaacaattatcttctctccctgctgtcctccacttatgtgcacaaactgggatagacttggggtggacaatatggagctcgagattcagtcaccccctctacagaaaattcaccccctctacagaaaaatatcagtttgcaccattgagcctatccacaagggaagtccctttctgtttattactgtcttcagaactggacataattagataattgtgttgtacctgtggtattggaccaggttcggtgtctcaactgtgcagatgaaccaatgtggaattgatacttgggagccacgtttgtaagcccctattgtgctggcgcactgggaaacactccccacagcatggttgccatgtgcagggacacctgcccctatattcagtgccttggggctgaattttgtgaagttctcccctaccctcaacctctagccaaagtagctgcttgtgcgttgtagttcctgtctccacgacagttttagctcccctcctcagccactagatcgatctgcccttgttcatcacaaccaactcctgtgtctggtgaccacaacagcaatccttcaacctcatcatggccagggttcgtggagattgtctcggccgtgttgtgcccattccttgttcctcacagggttttatcccctgttg

SEQ ID NO: 25485 - DNA, 1865 bp, Zea Mays
ctgcattgtgttttatcaaaagcaagcacgatcggatgtagatggtgctctctctttttaggtgcaggtgtaaatgcagtcagaaaattcggcatgagccccctctctgagctggtgtggtctccggatgaaggcttgagcattaaaattgcggcgtctagtcttagcacaagaaaggcttctcttcgttggaatgcagatacattgagcatattgatatcttcacctcaacgaagtggttctggtccaggtgaaaagaacggtgataccataaatgataacctagaggtatcagaaaagatgccatcacaactgcggattcgcagtgacagctcagtgagagtaaccgtggatagccccaatagtacaaatgttgacgccctacaatttacgtctatgagatcgcaggagcaagattcaactaaacttgtagagtgctgtgaagggattaatgttatgaacgaaggtaaagaagagtcagaaaactgttgcgtggataagctggaggacatggaagtggggaattgtcccaccagatgctgcaaggatgcttcccatagttcagcctccaggaaaaaagtcgtgcctagcatttcagaaaaccaggcttgctgtgcaaccactttctgcaatgaaagatcttgggaaactaatgcatggcgtgctcggttagtaaaggcagtttgtcagaaagaatctattttgccaacgaacacagagaatccaattttaccttcttccataggaatttcatgtgatgcagtagagttctcaggcaaattggtaggttcccaaggcaagtttcaaagcctgggtgtaagtagtaatgctctagaaattcattctcatgacaattgccaagatccggttctgcacgaaagccataaggatgagcctgttattgctagaggtgagtcagcatctggtgttaatattgttgcaagatgtgagtcggtacctggagttgattccagcaattttgtgagaggcaaagaaaaagttatgtacaatgacagcaattgtggtaacaatacaagggagggtgatgacagcaatgagagcatcgagagctgtacaagtacaaaagccccaaagcgcaagcatgcgcagtgttgtgcagccacgatgccttcttctggaaacaaaagatttagaagagaagacaatgagagttcttgttcgggattattgcaaaaatgtggtacatctttcttcaactggatgtcatcactcacgaatgggttacccatgctagatggagccactgctgccgttccacttgaacagaagttttcagcaagtacaggagatggatctgcagcaccttcccagccacttcaaaacaaccgcagcgttcctatgcaattttttggcttcaattcgctcttccagtccctgtatactcgtaatgttatgataacttcaggagataattgtcgtcaaccagaaagcaactgtgctggacatgtgttcaatagactgaccctggaattaaatgatagcaattctatgttgaacaaagaaattggcatgggtagagaaactcttgatctggctactcagacttcagctgctgaaggatttcagatgatttctggtggctgtagaggaaatgttcagagtcaaattgatattttccaaatgagaccagaaagaaatatgaaactgcccagttccagtaagtttagctctagatctctagaagaaaaacaaaatcagtgcacagctgcctgctcaaatgatgcaacacaaaataaaggtggtttgagggaaagcttgtgggtaactcggcttttgccaaaagcatcagtagaattgatggagggcacaccatgcaatgtagagaatgctgttagtccacaggc

SEQ ID NO: 25486 - DNA, 5368 bp, Zea Mays
gtgcacggttctgccatcgtctcctctccgcgacgcacgcctccctctcctccgccccaccctcctccccacgccatcggcaccgccatcatcagatccggcccaagacgcctctgccccacgcgcccgagtcgtcgaggcacactcctgcccgcctccggcgtccacgcacatctccgcctcacctcggcgcccgagtcgtcgcacgcgttcgaggtggcgtccatcccggcaccggcctcacgcaccatctacagctcccaactctgctcctctcagttctccctctgcattccaccttctctcccttcctctccaagcaccgtcctcctcgcctagatccgtacaagctgcaaataacctctccggtggcaagacagatggagtcgatctccggcgaggatgctccgaagcacaacctgatcctgtccgcgctcgtctccaacctacagtgcatgctcgccgcccgccgcccgttcacggcagaggtcagcaccgccgccacagctagcgaggctgaggccttggctcaggaagcagaggcgtccgatgcccccacgggagatgggacgctggcgaggcccatcgtgctgctgacctgtgccggaggggaaccggtcggcgggtctcgcggcgctcgtcgacgccctcgttgccgccggccgctgcgatgtccacgtgtgtgcccccgaatcgtacatgctgtgacttagaaaaccaaaccacagcgggaccggtgctcggatagggtccaacggcgatgcaagcaaggagtggcatgcggccggaggggcgcagatcggctcctgcacgtgcagcgcagccgcgtgacagtgaagcagggaggccgcgataggcggcacagggagggtgcgacggaggcaaagtgcaagcacctggggacttcaggtaagtagaaaaccaacactgaatttgtcggttctctgttttgtgattgaccgattggtttgttgatctcagaaacaaaaaattgtttcaccgtcaagcaccaatttttaggtaggtcagtgttttgggatgattctccgatgcatcaatagcaaccttgtgcttggcaaagttatttgccctgataatgttgtaggtttagtgaaaagaaatatactgacatatccatcgatccatcgatgcccaatggagattgacctctatcaagatttagttacgtgtctcaatagggcaatatttctgtgagttgtatactgtggattcctcatctgcatcatgaattgatcgcactatttatgccctatttttcaaaccatggtttctgtaattctttgcaccatggtatttttctcaaatgattttatctttcacaacccggactgaagtcactgaagcagaaagaaagagtacaagtctactactgcagaaagcaaggaggatgccaacagaagcagatttcatgtttggatcgggtattgacctttttgtgttctcctcaactcattatttagctacatatcttattaaatcttaatatttggtcattagctaccaacttgcactattattgtgaaaatccattaactttagccaatgaaatggttagactatcaccacgtaggtgatattagtggcattaagttattaatctgtggcaaattctattatcaactattttcttggctaatcattacaatatataatgaagaatactatggcttgaagggatatttatacagttggctatgtatacggtctgcccaagcgcccaacaatgaatgatgtggtgaaggaacttgagatcatcagatagaatgaaggggcacaattgctaaactcaacgtctttatcagttgaacaatttggaaaaaaagagaagagatccttatgcatttgcctatggatgatggaagcaacaacaacacttttgactacaacagtgggagttcaattaagttgttcacccaagtagatagttgtctccactctttcaacaagttattggagtgattatatatgtctgctccatatgaatgccttttcgttttagtatcacatctgaaattaccaaccttttagatcgggtattgacatctttgtgttctcctcaactcattatttagctacatatcttattaaatcttaatctttggtcattagctaccagcttgcactattattgtgaaaatccattaactttagtaagtgaaatggttagactatcaccacgtaggtgatattagtggcgttaagtgattaatcagtggcaaatcctattatcaactattttcttggctaatcattacaatatataatgaagaataccatggcttgcagtgatatttatacagttggctatgtatacagtctgcctaggcgcccaacaatgaatgaagtggtgaaggaacttgagatcatcagatagaatgaaggggcacaattgttaaactcagcgtctttattagttgaacaatttggaaacaaaaagagaagagatccttatgcatttgcctatggatgatggaagcaacaacaacacttttgactacaacagtgggagttcaattaagttgttcacccaagtagataattgtctccactctttcaacaagttattggagtgattatatatgtctgctccatatgaatgccttttcattttagtatcacatctgaaattaccaaccttttagatcgggtattgacattttttgtgttctcctcaactcactatttagctacatatcttattaaatcttaatcttttgtcattagctaccatattgcactattattgtgaaaatccattaactttagtcagtgaaatggttagactatcaccacgtaggtgatattagtggaattaagtgattaatcagtggcaaatcctattatcaactattttcttggctaatcattacaatatataatgaagaatactatggcttgaagggatatttatacagttggctatgctgcttacatgatccatttagctgtctttggatttttggggtaactctccaatatctcacatgaggttctttgtgatagctgttacttaatctgtggtgatctatgtaaatgtggcaacacttgcagttcctcgagcccttgtgcatggatatatcgtttagttgtgtctaataatttgtaattagtggcaacatctttttgttattttggttttatctgctttttattgttataagatctcgattgcaaactggcagttagtacaccattaggttttcctttgtcgtatcaagctaataatgtgtgaagcagggttcccattctgatctttagttttttgtgattttaatagcaataaccttttttcgcaaaaaagtaacaaactttatgcagaatgcggtccgtatagttcccagtatccttttgtacttagatttagtttgatatatggttatgtttattgacagaatgctttttagctttgcagataaaatcttaagcaaaatgggagaaggtttgggttttctgcaatctgtcgtctcctcttctgctgggtatctccgttattattctaatgaagagggctatgagttggattttcgtaggtacatttgagcgtgttttggaatgctgggaccgtgaaacacatgaatatgttgccataaaagttgttcgcagtatccacaagtactctgatgctacaatgattgagatagatgtgctcaatcgccttgtagaaaatgaaaaatatagatctctgtgagtatctcagagacctaattgcttaaagtataaccctattctatttttgacttgacagttcctcttcaatttgtcagctgtgctcaaatttagagatggcttgactatcgtaatcatatatgcatggatgcgttactttatgtttgcttgtatttaatatagaaggctcccttgccttcgttcgatcatgtggtatttgaaagtgatgtctctataaatgaagtaaggtagggcaatgcttatgttactgttgtcagttattagctttttaaaccatgcatctgtcaatgtgtcctgtttcaatagggtcttattataggacgtgatggcactgaattaggatgtttgttcttttgctacctttgttaaacaacatcagatcattcgtattgtatccttcctcggattgcttcttttgttctactacaaatatgcccaacatggcagggagaggtatgctcctaaatttcttattttgtgcattgtgaaatgattgttctaacaacatcaagtttgtgttcttcatataatctatctcagattgctctgtgttttgcaggtctcgaggtcaagcctggacccactgtcaagtgtgtgcttggacatgactttatcctgcactttccactgctgcacttggggaatcaaagaaaagtgaaagtaccatgtcaaagttgatgaccagaagcttgctattggaaccctctctattgaaaaatacccctagatagaaattgatttggttttcaataaagagtgtgagttgtcacacacatagaaaactacctgtgtatttttctttggttacaaggttgagcaaccaatcgaggaagatgaatatcctttttaacattgatttttttagttttatttcatgtaagactgatctaaacaatttctttgtggagtattttgtttccttgatctcatttttgcttcttgcctcttacataatggatcttgattctgaagatgaagagaaggagctaaacattccagtaatcaaggaaaatggcaaaggtgatgggaaggcagttgctgcagcttcaaaatcaagtcttgggcttgaaaaaaagcaaggatgagtatgagtctgatgattctgatgagggagaaggtgaaaccggagaatgaggagatgtggttgttcatggacgacagcatcaagaaacctgcaacatgcaacctgattttaagaaatctgccacctgcaacatgactgggcagtggtatctctgagatataatgtggacaacggcaaagaatactatgcatacacaacaaaagagtcctacaacctgattttaagtccatttgtagcaaaccatcttggaagccattaactcgttgaatttgaagctgatgtgcagttttatttttatgtcagttttactgatgcagttagttcctaagaagatccatggcaacttgtttcacgctgatgcttgagaagttgagagggatggaaatgacactcacaataaaaatttgattttctttcttgtgatcgtcgatcacaataaacacagtggcacaatataccgtgtaattgtcctttcctggtagaacatgaaatgttgaacttcctcttgtgatatataaagcctatgtatcctacataatatttaacatcttacggaaatttatttgtgctgtccca

SEQ ID NO: 25487 - DNA, 2377 bp, Zea Mays
tttgcttcgtgttcttgaagttcataggggggacaaacaaggggagctgtttactgaatctttatttgattattaggagatttgggatcttcgatttgatcttcttggggtctttgattgaactgagcagttataatcccctcatgatttatcctttcaatcgacctttgggttgcgtgtattgaagtccatccatccttctgtttgcctcagctaggtaccatgctcctttatttactaaatattgctaaggtccgactttttgggatgtacttcccttctggtcacagatcagtccgtgttagaatagattatcttagtgaacaagatctcgagaagttaccaatcagtaaaatagttcgtactatgtttattcgttaaaaaagttcttttaccctgaaaaggcaggagctctgccactggattaaaagactattcggtaaaaaaaatgtctgttttgttgaaatactaggacatgatgttatgatcctgacaagcttggctggctggtgaacctatgagttatatactcacccaatagaacaattctatgcctgatgattgtacttcttgaggtagaagatcatactgaagcagaactcgagcggtgttgaatcgaaatggaaggcaggatgacaagtttggaagccaccatgaaagtttcctcatcgatggcaagcagcatatcaaggaatgctgaccctgaccaacagactctacgccccaattcggtggagcagttttattttccaagacctggtcaatctttgccaggcattcctccattctttgggcctccctcctccagtttgtatcttcctaatgacaatgaagctaaatttggcaatcagtttgaatcaaatccttcacagaatacagattgggatccgcaggctatagtgagcaacctaaccttccttgagcagaagatcaagcaggtaaaagatattgtgcagtctatgagtaatcgagagaaccaattagctggcggttccagtgagctagccgcaaagcagcatcttgtaactgctgatctcactagcattataatccagctcatatctactgctggttccctgctcccttcaatgaagaatccacttcttagcagcaatccagcagttaggcagcttggcaacactcttggttctcctatgggccttggcatgaatgctaatcagagaccaagtgtagacagcaagactgatattcctgacacaggaaaaacttctgattatgatgaactgatgaatagccttaatcctgcccaagatgaaagagatgagatgatcaaatgtccaaatccctgtggtggggaagggtctgaaccgactcccatggaggaccatgatgtgaaggaaagtgatgatggtggtgagggagagaatctcccccctggttcatatgtagtcttgcaattggaaaaggaggagattttagcaccacatactcatttctgcttgatctgtggtaagggtttcaagagagatgctaaccttaggatgcacatgaggggccatggagatgagtacaaaactccagctgctcttgccaaacccacaaaggattcaggtgcagatcatgcacctgttacaaggtactcatgcccatttgtgggttgcaaacggaacaaagagcacaagaagttccaacctctcaaaacaatcttgtgcgtgaagaaccactacaagcgaagccactgtgacaagagttacacctgcagccgttgcaacaccaagaagttctctgtcatcgcggacttgaagactcatgagaagcactgtggtcgtgataaatggctctgttcttgtggaacaaccttctccaggaaggacaagctttttgggcacgttgcccttttccaaggccacacacctgcgcttcccatggaagatgtgaaggtatcagaagcatcagagcaacctcaggacagtgagccgatgaatgaaatggcgaggagtaatatgtatagcttcccctgtagttcgtctgatggtatatcgaacctcgacatgaaaatggctgatgatgatcttgcagttatgggcagcagaacggagatagctgatggatgccgccatcgatgatgacgacaacagcactgccaacctttatttatgttgttgcatgatgctagcttggttcttcctctgttcaagagccatttgagattatgcctttatattttccctaaatgtacttacgtttgtggtcattaataatgatcaaggacttctagcatttcttagacccagatagccccaattttcagtatacatacgcaagtattgcttgttcattttgtctgaatcggcgtgatgcttgtagcactgacaatttatcataacaagctgctcagctattaatctggttctcc

SEQ ID NO: 25488 - DNA, 2441 bp, Zea Mays
ccagactcctcccaaaaccctcgcatcctctcccacgcatgtcacaatcgccatgaccgacagaaaccccgccgccgcctcaagcaagcgtcactgtgacctctccctcgacgatcccacgccgtcggccaagctccagcggtgctccgagccgtcagaaccaacgccggcggggaaaccgaacggcggcgcggcgacgggagaggagagcgagatgatggccggcgcacggaaccctagggcgcagaggtacctggtcgccgtggagtacattggcacccgcttctccggctcacagaagcagcccaaccagcgcaccgtcactggggtcctcgaggaggcatttcaccgatttattgggcagccagtttcaataatcttttctagccgaacgagtggaatgatactagcagattcatcaaaagtatgtatgcgttattgtattttcaaaaccatagcaaacatccaaatgctcaaaggtgtgtgatggagacaatgctggtgtcaaaacaataattaaaagaaggaggtactttttgaataggcgtcaactgtggtctatggagttaggatcgaaccttgcatgacatgccatatgaggctctatgcatttacttcttagttccaaacgtactttgctgtgtaggaagagatcttcagatcgttgccatggtttgaggcctgattagtgtttttactgatttgtaatgcatacttttctttagtactttattcttgtagtggtaacacttctctggactctggagatctattttaatgtgtttaatgtcctttgcttttgttcaggttcaggctacttaattcttgtactggtcaatcttctctggactctagagatctattataatgtgtataatgtcctttgctttttttttcaggatgcaggtgttcatgctttatcaaatgtttgtcatgttgatgttgagcggataaacctggcggctggcgccactgctgaaacaagtcgctgtagtctgggcgtctggattgatgtattttggtgggagagttgtttgttaacacctcatgagcctggagttgtaaaacgtgctgtgaaccactttctactgaagagtgaaggtgacataatggtgactgatgtctgctgtgttgcaccagattttcatgctagatacaaatctctagagcgcacatatcactatcgcttgcttgctggacctgaatcaacatctgtttttgagaaaaactctgtttggcatatatctgaagatttggatattcagtcaatgaagaaagcatgcagcatacttgttgggcatcatgatttcagttcatttcgagcggctggatgtcaggcaaactctccagtgcgaactctggatgaacttagtgttacagaagtattccctttcatgttttttccttcaagtgtagaaagatcagagttggaattatcaaatgtctctcttgtttattcaaggaaaccagacatggaatcttctgggaaaggatctgatggttcctgtaccagtagtgtgaaatcagattttgagaatggaaaagattttggaaagcggtcaaggcaccgttgctttgttgttactgcaagggcacggtcttttctttaccaccaggtaaggttgatggtcggtcttctaaaatctgttgggactggagatctaacaactgcagatgttgagagaattctggatgcaaagacggttactgctgcacccagtatggcaccttcttgtggtctgtaccttgctaacgttaaatatgatctgaatacctgaagacaagttttatctagtggcttctgttggtgggcctccagattttgtcagctgttggctatcaaaggtatacctgaatccaatctatgaatagtgcacctcagtgagtgcaactttgaagtatctgtaccaggtcgaataagatattcaaacatgtcctttgcttatcaagaatgatacatcattatacaccttgtcgtaatctgtaatttcactttgatcaggaattatatgctgccacttgccaaagctttcagttgcctgttttgtccactgaatcttgcatggtgattgaaaacctagaattaagtttatctgtcagcacaagagccggcttcattctcttcttgtacacagagctcttctgcatgttcagaaacaaaataggtagcttcattttagttaagttcaactatccactctttaaatttcagctggatccacccgattttgttgggtgtacgtagatttgacctggtaggggcaaaattttatttcttggttttctcatgactgtacttggttcttgatatataattaattagccaaatgcgttgtgtgcatattgaaaatattcttttctgttccttgataaattacatcgagcaagactgcaagagaactttcttcaagaaaatattcttttctgttccttgataaatt

SEQ ID NO: 25489 - DNA, 1068 bp, Zea Mays
ggccgctcgcccctgcggcttgggcgctcggccacagccagtgcgggccgtgcggcagtgtccactcgggcctcggccagctgctagctaatcctaatcagtaattactgttgtgtttcttctcaagtcaaccaagagcagcctcatgatggttcccctcctctgagagaagatgacaagaatgggcattatgtttttgctgttggagataatctcacatctcgttataagatcaatgcaaaaatgggagaaggttagtttggatgaccatatattctgaaatagttgatttaactcgattgggcatgccaatacattcaacaaattttgtctataactgaatgtagctgggactacttggtgtaacctgttagcccctttgatcttattgtgcacacagaaaaaagataactaattttatgagataattccttgcctttgtttgcaaaagtactttggccgataagctggtgttgactaatcattgtatgttgattatgtattcaattcagcatggagttcagtttacttgcatactggctaccatgtatacagaatgctagtgtctgctgacacgttcttttttgcttgttttttgtttgctcttctcaaaaatatagtctacaggaatcagtggtcttctccgctacgctcctgaaatatttgagcagtctggagtggctagtttgttttcagacattggactttctcctcattcaacatcaattctcatgagtacccttaatgctttgctgatactcccttgtataactgccgcaatgctgctgatggatgtctgcgggagaaggtagaatctgagacaccatgaaaattagtgatgcagttgtggacttttgaacaatagctggagtgatatgaaacattagtgatgtagttgtgggcttttgaactgcttcaagctggagtgatgtcgctgtggtgcttttgtgactgatctagctagctatctgtaaatgatctagttgtgaatgatattataattgtgatgtttttgtgaatatataattgtggtgcttttgtgtttatgtgatggatctataactgtgg

SEQ ID NO: 25490 - DNA, 233 bp, Zea Mays
tgaggagccgcggccagcagcagctcctaggtgtcctccgttctccctgcatgagccgctcacctcccatgcctcaacaaaatcccctgcagcctgggcgtggctagctgcctctccttctcccccatggccgatcccctctatttctcccccatgtcgttctgtgctttttctcaaggaagaagaaaagcaccgatgcagttgttcgttcgtgcaaccagggaaaagaaaac

SEQ ID NO: 25491 - DNA, 258 bp, Zea Mays
atcaaatccaacctctaatcctttaattcccatgatccacaacctccaaaagcctataattacagggaggaacaaggatctcatccatacctagggtttccccaagaaatcttcaagaggatatggggaagaacatctccttgatcctctcttcctcttcaattcaacgtgcccctccttttctcgatccttgctgcgtagggggagatcttgggggaggaagcaatggaggatggctgccatagggggagggggcgt

SEQ ID NO: 25492 - DNA, 1711 bp, Zea Mays
gctgccttttttaacaacacaatctacaataaagaatgttgaaggccatcttatcaagagagttggaagatattgcatctattgaagacaagttaggaaggtcacttacaaccatggagaaagatagaattggagtgggtaacttaagattatatttggaagagttgctgcagaagaggtacattaagagtgttccattaatcattccacttcttgagaagcaacatcgaaatacaacaagtaaattgcgtgaaatcagtcatgaactcagtgatctggatgaaaccaaactgaaggagaaagctcagctattccatgacacatttttgaccaagttatctttgctattgaaaggcatggtggtggcacctcctgataaatttggagaaactttagtcaacgagaggattaatggaggaacatttactggaagtgagaatttccagctcccgaacaagatgatgccaaatggtggcatgcgtctttatggtggtgcacaataccatcgggcaatggctgaatttcgtctggtagttggtagtaccaggtgccctccaataactagggatgaaattgtcaatgcttgtggtgttgaggatattcatgatggtacaaactactccaggactgcttgtgtaattgccgtggcaaaagcacgtgacacgtttgagccattccttgatcagttgggttttaggcttttgtacatactgaagaggctgatcccaatctctgtttatctgttggagaaagatggtgagcactttagtagccatgaagtgctcataaggcgtgtccaggaagcattcaagaggtttgttgaatccactgagcaatcatgtcgtcaaaggtgtatggaagatttggagagtaccactcgttatgtcacttggtcccttcacaacaagaaccgtgctggattgagacatttcctcgattcatttgttgcaccggagcaactatcagtaaatacattgaacgagcggttttctgggttgaatgataacaaacaggataaggcaaagggtgactcgaagtcaaaccattctccagacacaaattcgtccactgctatgccagagacaaggctggttgacctattggatagcacactctggaacagacgcctggttccctcatctgaaaggcttgtttatgcgctggttcaccagatttttcatggaatcaaagagcattttcttgtcaccactgaactgaagttcaattgctttctcctcatgccgattgttgacaaactaccagcacttctaagacaagaccttgagtcagctttcgaagaggaacttgatagcatctttgatgtcactcagctgcgccagtcacttgggcagaagaagcgcgagctggagatcgaactgaagcggatcaagcgcttaaaggaaaagtttggagagataaataagaagctcaattctcttcaggttaggcagtaggccaggctcaaaatttagcagtagcttggtagtctaggactccaggtagagtgtttcaatgctgtaataaaataattggtcatctagagtgacttcttgttgtatcctatcagttgtaaatatgaagtattcctatgtcttaacgtatgttgttgctacacgggttttcggagtcttttttcccttgcatgattcgttacactgcgattccttcaggttgaagtcagccaaataggtccaaagtaacagcaagctct

SEQ ID NO: 25493 - DNA, 4877 bp, Zea Mays
atggaggacgcggtgtcagggctgcgatcttccaactccgccacctccttcgtcgccgcgccggtgtacgacgacgacgtgttcagctcttcggcgacctcgcagcacaacgccagcatcctaggacggcgccagcatctcagtcgcagcgcgcggctgcagcgccgaccgctacagcacctgaccgtcgaccccgtcagcgccgtccatggcagcgacgactctgagttgtcccacagtgaggtcgacagggtccttgcgaccgtcgtgctctccaacccgcgcgagaaggtccatgacgggctcgtcggcgtgacggagttcgcgcatcgtcctctcgccgtctacgacagctacgtcgagcacgacctctacagcttcatcccgctgctcttctacaccgagcaagccaaagaggagcaggtacccgtcgacacgcccaccaggtgttcgatgagagtcctcaactgcagaacctttcctcgacaagggcttcaaggacatccgtccagcctggtgtgtccactcgtgcgtcgccacgatggcaggttccacctctggttcgaaccctccgtgctggtcgcaccgcacaccaggggccgcgctgagcagatgacgctttcctacgacgctgatgccgaagctgacgactactacaatgcgcccgatgtcgagatcatggtgtccaacttcggctccacctccaccctcagctacctcgagcctgatctcatgctacccacgcggtacaggaacattctagcgggcatgctggagaaggccgtctacgaggaaggccatgacctgttcggtgtgctgtatgaatcccgatcgcttgttggaaccattggtagtatcgacttcagttttgaggagaatgatgaattagttgatcgaaaagaaactgtcgtcacctctcagttgcaggaagagatgggcagcaaggaacataccacgggtcagtttcagacactggacaagcccattgcagataacagcagtgcagcggtcgaattcagcaacaggaattgctgggtctcattgattcaaggttcttcggtgtacacgccatatcctagcaatcgagtggagcagggactggttgcaacactacagtccgatgaagatggatgtgaccaacaaagggatggtgagtccctaccagggagcgacaatttgtttgcaagagctgctatcgtcttttcccactggtggagtagtgcagctgctgatgatttcagaggacaacaactcagccgactggtcaatttggctccacgagtgcagcagtctccaggttgtcttcgttgtctggtcttggggctcatggaagagccgaggaggcctcgattcttcaaggtcctcgttgtcgacttcgcgcgacgaatagagatacctcaaggcttcctctgccattttccagaggggagagacaggaagcccggcaccacagcggtggcgtctgctaaagtcgtcctcaccaatgccgagggtagtagtatctggccggttgcgctagagtcgaccgacggccgcgtgtttctcaccacggggtggccaaagttcgtggaggacaaccgtttggggaagggcgagatccttatcttcaagtaccacgggagaatgcgtttcgtggtctcgatttttggcgtggatgccgtcgagaaggcaggtcgctggtctgcaaggagtggcgcccaggccgcggagaagacaggtaccatgcaacgaaacactaaaggggatgaacacatttcatcccagggcacagctggtttccttgactcacatgaagtagtttgctccaaagattacttggagacgtacttgtcagaggagacaatggaggatgataaggctaaagcagtagcggaagtaatgaagactttgcgtgttgacaaattgacagtagacttattctgtgctatactctgtttgtgtgaatggaaagtcgaggcagctgcagaatattttaatttttgtaggggcaaaccacaaatcccggaaaaatctctgaagcagaaatttgtttttcagtttgactttgtaaagggacaactacaacgcttcttccctgaagattatgattctgagaaaatcaagaagaacaatattgagtcacctaatttgtctgatcaaccactacaacgtgaccttatagtggcgccggtgaaacgaaggctagttgatgaatttaaatcttgtgacttgtctcaccgacagaagagaaaagttaagttgcagggaaactcactgcaaactcagacaccaagaagatcaccacgattggtaaacgtgaacaatacttgtaataagaacaaaaaagtgtcgaaaggaagagccaaagtgctgaaaacaccaccagatgcaacagatcaggtgaaggatagagcacataaatcatgtttgcttgatgagaaactagataatgccttgaaagctgttcatgaagaagcgacaggttccttatctcaggatctcaggaaactggattccccacggtgtgaggttggcttaagtaaagagcatggacatgatcaaggagatactggaaaaatgttggatgaagtcagtgatgtagaaaacagtaaagaacatgtgggaagcgatgctatggggaattctgaatcatatatgagtacatactgtgtagagccattgccaaccaactctaggttgacagcatattcaagaataaatgagctatcatttacatggaagcactcacaacatgccagttcccttgagaaagttttacttgacattcaaagagataacttcgtgaacaccattgcacgcatccagaaaatcgtccgggatgatccttcagatgtgcttagtgcagatgtaattgaagccactgtacagatagaaattcttaaatggggtttatgccttcaggacaagtgcgcccacaagatagtaaatacaatgttggattatgctaaaaaggtcaaggggagacacaatttcaatactgagatgaggaaggaagagttctctgcaaagctgcaggatctcctgaagtggcagcttaaagaactagaatttaaatacacttccttggaatcagattacaagaaagcaatggctgatgctagcaattttttctcgacatttgaagagcacaggaaaaagttgcatgccattaaggacggtatcaaggacctgcagcaggcctgtatgactaaggacgatgaaatgcaaaaattggcacttcaagtcgctgagcatgcgaccgcatatcagaagtctataatggaaaaggttagggtcaagatggctctgaagagccatgagcagactcttggttacataaaagagcagctagcctctgcggaatctggatcaattgatgtaggggcattggttaagatagagatggataatatgagtagggagattgaactctccaagcaaaatcttctaaatatcaacttcaagaaagagtaaagaaggtgtaagtgtttgcttgaaaaccagattaggaatgctgcttatgtgctataataacctagctatcatatcaattactgcgggagtttgattagatatagggggtgtttgaatgcactagaattaatagttagccgctaaaattagttgagacatccaaacaccctagctaatagttcaactattagctatttttagtaaattagttaatagttacataattatttgttagctagctaatcccactaataatttttagccagctaactattagttttagtggattcaaacaccccataatagtttacatgacatacaaaggttatagaatgccccttgttgttcatgagctgcgggtaagagccacggcccatgggtaaaagccactcccaggaacgcaattgactctacattcttgattgtgtttagtcgatgtgccaccacaattgtggtcctccctgacattattcgatcaagagcctagcaattgctctgactgtgcatcaagcacacttgttgcttcatcaagtagtagtattgagggattccggattattgcccttgcaattgcgattctttgcttctgccccctgagagctgtataccgtgctctccacaatcagtattttttatggagtcattactgtaggtgaactatgtacatgttacatgtacatacggtatatgtttacagttgttgcagccagttctgcacctgttcagctagcaatggcttcaatctatggcagattagtatcatttctctcctaaacatgtctttgcacgcggctattgttggcgggatattttcaaatatctagctgttccggtattttcatatgcaccaagtcatggttatgatgacctctattttccaaggatttgccaattgaagcctcattcatcgcatcgcaaggagtcgatcagaggtgcggggtggcgtgactccaattatctgccaacatcttcgtacgaagctgcaccgcaagaacaagtggacagttttctcctccctttgtcggatgcaattttcacatgtgaacaattcaagatccatgttctttctccttagcagtgacctagtattcagtccagcttccaatagaagccagaagaacactttttgttttggttgacatttcgatgcccacaaccacatgtatgcggggtgtgctagctcttctgcaatcatgtgtttatatgtttttgtgacgaaaatttcagatttccctagatatatgaccatgtgttagtttgaccaatggttggttgtccttgcaaatgggtaatgaggagttggtattgtgggaaagctgtcacggacatgggtgtgtagaacatttgttgagggtgttcaatagcctttgcttgtaatattgttatttccttatgaatggcatacgacaacagttctgaataca

SEQ ID NO: 25494 - DNA, 2838 bp, Zea Mays
gtaaacttgtaattcgattatttcgatcctcctctatcatgggaatcgtgcatggctcgtgatttgatcgatgtgatcactcagcgattgttctttagttcaatccgtggctggagttttggcattgcctggtggacgcctggttcgtgatcgggtaggcggcggccgcggtagttgcgtggcgcacttgagtagttggttgactggattcatagctgggagagctaaaaaattctgctcctgatagtaaggggggaaatcaaagcaaaaccagaagagaatatctaggttgattcgattcaacaataatagtttgaagcaattggttctagattgcaacggtcatagtcataggcgtgcacagatctttcttaatgcgtgaaatcgtgcggttgaatagctgttcttctgggcataccctgggtcaaagcgtcaaccgtcaaatgtacaaatgctagtagtatgctaggtgccaagagtcctacagagtttgaaattctccatggattctttcttcagtatctggtctactcaaatttccacggttggcttcagatgggcatgttgctgatggtgtgcatcccacaaagtttgcattccaattattataaccctgagcaaatcggaatcgtgtacgtctgtctaaatggtgcctgttcatttggtgcaacgcagcagtgatactttgcagtagtagtaatgttatgcatattctgtaggaacaattggatctataccattaaaagatccaaactttagatatataccatggacctcacatgtcattgactcatgtggacccacatgtaagtgagatagtaatggtatggatccaaagtggtgatcttttaatggtatggatccaaatttccctcttctatacaacttccttttaaaatcacccttgagtgttgcattagctatcatacttgtaggatgcaagtgtgtactcaacggtgttttgtgtgtcacctatcttggttcatttctccccttaaattaattatgtggcatgccattctagttcattttatcaagttctgggttgatccaatgacttagaacatgggatgcttgcatccctagctatcaacgcaaaatatcggagctggccttttttgctcagttattcatcatcgatagtgctgatctagtgctcataattctgttccatttctagttggtactagctcatgcttctctaactccttcagaaaagcatagtagattaacaactgaatttggaacaccagttttacctactcatggccccttaggtattcctcctgcaatattgccacaggccggccaaagaaattgttcattatagtgaacccttatggtggaaagagaagtggaaggagtattttccagaatgaagtcctccccctcattgaagcttctggcgtgctttatacgatgcaagaaaccaagcatcggcttcatgctcaagagatcgcacgttcacttgatcttaggaagtatgatggcatcatttgtgtcagtggagatggtgtgatggtagaggttgtcaatggtctcctgcagagggaggactgggaaacagcaataaaagtgccccttgggatcgttccggcaggtactggaaatggaatggcacgatctctattgcatgctgctggtgaaccattctctgtatctaatgctgtgtttgcaatcatcagaggtcataaacgtgcacttgatgttacttctgttgtgcagggaaacacaaggttctttagtgtcctgatgcttacatggggtctggtggctgatgttgatattgaatcggagaagtataggtggatgggaagtgctcgccttgaattttatctcctactccgcatgctgaacctgcgacggtacaatgggcgcatcctttttgttccagcaccaggatatgaagaagttggtgatcccgtggaacaaactaccggtcatgaaacaaatggggttagcgggggcaactgacaaaaatggtgaaacgtgcggctatgtcggcccgtcgatcaaagaagccgatcttagatggagatcgctgaacggtccgttcgtttcagtctggctcggcaatgttcctttcgctagcgaagatgccatggcagcaccaaaagcagagtttgcggatggctacttggatgctgctataatcaaggactgcccgcggtgggatgttctggggctcgtgctccagatgaaggacggcgcctacgtgaactcgccgtgcgtggagtatttcaaggtgaaggcgatccggatcgagccgggcctgcgcgtgggcagcagcaccaagggcggtatcatcgactcggacggggaggtgctcgcgaggggcgacgggtcccactcccgcgccggcgacgagccggggcacctgatggcgtacggcccgcccatccagctgacggtggaccaggggctggccaccatcttctccccgagatgacgattcttctatctgttctccaccgcctgcgaggactttgcttcgttagccctgccattttctcgagtagaaccatgtgactctatatgtaaatattagtcacacggtcacaccccactccagtggatgagcgatgagccaaaacacaagagggacagatcctttatctccgtcaagagattgttttcttttcacggccacagcccacatggccgccgcttttagtgttagcgtgagaaaatgacaagtgggctgtgggcagctcctattctttttttcaccttgtgtgtgttgttgattgtcccttgacaaacagtggactgttttcctgcaaaattggtgtttaattaacctgaaaagcttccacttgcatctaagtcttggcttgg

SEQ ID NO: 25495 - DNA, 1375 bp, Zea Mays
agtggactaatgaactatgacctctcacctgtcaaaagaaaggacgggcaaagagccggagccgcgaccgacgactcatcagacatggcgaagccggcggcggcgaggaagccctctgcggcgtcgaccgtcgcactgacactggttctggccctggcttcggctgtcctcctcttcctcctgctccgcttctctccctcctccccgtcccccaacccgcacccgcaccgccgcctccgcctccgcccccgcgcgcatgcgcaccaccaccagatcccattcgaccctgtcgtcgcggacatagagcgccgcctcgaagaccgcgagtgggagcgcctcgccgctgcagggctgcacgctccgggcatggaggcggcgccagtcccagaggatctcaccgacggtgaggtcgacgccgacgaggactacatcaatgacgctgcgcgcttcaacgtcacgcttcgcgtggaggcgctgttcccaaagatcgacgtcgaccctgccgatggcgccgtcacgggcgctgagctggccgcgtggaacctcgcaaatgcgcggcgggaggtgctacaccgcaccgcccgggagctcgagctgcacgaccgcgatcacgacggccgggtcgcctacggcgaatacgagcggcccagctgggcctggcgtttcgacgatcataactcaaccgatgacggagtgggatggtggaaggaggagcattttagtgctgcagatatggatggtgatggctttctaaatcttactgagtttaatgactttttacatccagctgatactaccaacccaaagctaatacattggttgtgcaaagaagaagtcagggaaagagataaagacaatgatgggaagctcaatttccaagagttcttcaacggattattttactcaattcgacactatgatgatgaaggcttaacagatgacaccggtggctctgatgcaccagctaaaaagtcattttcacaccttgatctggataatgatgggctcttatcagcagatgagctaaagcctgtaattggtaatctccatccatcagaatacttctatgccaagcaacaagccgactatgtaatatctcaggctgacacgaacaaagatggacaattgagcatgaatgagatgatcgagaacccctatgtcttttacaatgctttattcacagaagatgattatggctttcatgacgagctccgttagttcccaattcaacagcacaaagctttatggaatcaccactgtaggaagtcggaagactttgttatgcactgctaagaccatttccgttttctgtctgaaatcatccatcatttgacggttgtgacaatcgcaaacaactgttaccagcagttgtaaa

SEQ ID NO: 25496 - DNA, 804 bp, Zea Mays
ccggtgacgggttcgaagtgtcgtgcgcagtcggcgaagaggataggcctgccactcattgtccgtgtcatatctggaggtggagcagttgtcttctctctctctcttctatagagccaatcgcaaagcgcggtgctgtcatggaggttgggagaggagcacgtggccgtccagaatccagtgatccaccacaaccgcccgtccattctccaggccatgccgcgcacggcactgctccgcctcgccgctgcttcgacgacgcgcgcgtcctcggcttccgcggcggcgcggcgactgtgcccgtcctcagagtcagacgacggcggcgagcggcacgcggccgcccggaaggatgagctcctcccgccgccccgcacgccgcgccccgacgagcggcggctgtctcggcgtggagagcatcggtgagcatggagccatggatagatatagtagtaaaagcgtgcattcgagcacttctctgctcgcgcgaatacctcgtgtgtgtgtgtttcttgtttttcctgtccccgctgcggtcatcttcgtttccgtcgatcacgctcattattcaatggcgggtctgcattctttttctatttttttcctcaaaaactaccagcaggacgtctggagtattcttcttctaatcatgatacgtcgtcgtgcgtcgtaaaacgacacatgcgtatggattggacacaggcaactccaatcactctaccgtatccgtatggacgtttgtagaccattcattgatcattgcgggcctaataaatacggtcctgcctgccaggtgtcccaccc

SEQ ID NO: 25497 - DNA, 3003 bp, Zea Mays
ctactgccacaccgtacctttcttggatccgaagatcagaagaagctaggcttctcatcaggttacgaaggtgattgagttcatctgtggtaaggaactggagatctagatcgctgctgctgctgctagctagctagcagctagcaccatcacttcactagcacaaaggccaagcagcagaggagtctgttgcgttctcgggagcgcgcgcgcccactgatcgggagatcgatcgatcggcggccgctagccccaacgggcgggtgaagtacgtgcatccatatatggcgccgccgccgagctcttggtggggcagcgaggagcagcgcggcacgccggtggtggtgaagatggacaacccctactccctggtggagatcgacgggccgggcatgccgccctccgacaaggcccggggcaagaacgcgaagcagttcacgtgggtgctgctgctgcgcgctcaccgcgccgtggggtgcgtggcctggctcgcgggcggcttctggggtgtcctgggcgccgtgaaccgccgcgtgcgccgcagccgcgacgccgacgacgagcccgacgccgaggcctcgggccgtggccgggtcatgctgcggttcctgcgcgcgttcctgctgctctccctggccatgctggccttcgagaccgtggcgcacctcaagggctggcagttcccgcagcacctgatgccggggaacctgcaggagctggaggagcagctgcagcacctgccggagcacctgcgccacctccccgagaacctccgccagctgccggaccacctccgcgtgcccgagcggcaggagatccagggctggctgcaccgcgcgtacgtggcctggctggagttccgcgtcgactacatcgcctgggccatccagaagctgtccaccttctgcatcctgctcttcatggtgcagtccgtggaccgcatcgtgcaatgcctcgcgtgcttctggatcaagatccgcggcatcaagcctcgtatccccgcgtccgccggcggcaagccccgtggaggaactactggaaggaagagagtggacgacgttgagaacggtgacgccgacgacgaccgctacttccccatggtgctcgtccagatgcccatgtgcaacgagaaagaggtctacgagacgtcgatctcgcacgtgtgccagatggactggccgcgggaccggctgctgatccaggtgctggacgactcggacgacgaggtgtgccagatgctgatcaaggcggaggtgaccaagtggagccagcgcggcgtcaacgtcatctaccgccaccgcctgtcgcgcaccggctacaaggccggcaacctcaaatccgccatggcctgcgactacgtcaaggactacgagttcgtcgccatcttcgacgccgacttccagcccaacccggacttcctcaagctcaccgtgccacacttcaaggagaacccggagctcggcctggtccaggctcgctggagcttcgtgaacaaggacgagaaccttctgacgcggctgcagaacataaacctgtgcttccacttcgaggtcgagcagcaggtcaatggcgtctacctcaacttcttcggcttcaacggcacggccggcgtgtggcgcatcaaggcgctggaggactcgggcggctggatggagcgcaccaccgtcgaggacatggacatcgccgtccgcgctcacctcaacggctggaagttcatattcctcaacgacgtcaaggtcctctgcgagctgccggagtcttacgaggcttacaggaagcagcagcacaggtggcactccggccccatgcagctcttccgcctctgcatcccgaccgtctttaggtccaagatcccgttctggaagaaggcgaacctggtgatgctcttcttcctgctgcggaagctggtgctgcccttctactccttcacgctcttctgcgtgatcctgccgctcaccatgttcgtgccggaagcggagctgcccatctgggtcatctgctacatccccgtgctcatgtccatcctcaacatcctgccggcgcccaagtccttcccgttcatcatcccctacctgctcttcgagaacaccatgtccgtcaccaagttcaacgccatggtgtccgggctgttccagctgggcagctcctacgagtggatcgtcaccaagaaggcgggccgcacctcgtcggcctccgacatcctcgcgctcgccgaggccgacgcccacgcccacgcgccggcgccggcggccaagctcgtgcgcggcgtctccgagggcggcctccaggagtggggcaggctgagggagcaggaggccgccgagtgggccaacaaggaggacgccgccgcggctctggctgccgccgcggccccggccacgcccaagaagagcagcaacaaggccaagaagccgccaaaccggatcttcaagaaggagctcgcgcttgcgtgcctcctcctcacggccgccacgcggagcctgctctccaagcaggggctgcacttctacttcctgctcttccagggcgtcacgttcctcgccgtcggcctcgacctcatcggcgagcaggtcagctagccggccgccgccacagaagaataaacttaaattagcggccggctcggcatgcacggcctgcaagccacatgcacagggcatgcgtgcaggcggtgtaaccatgcatcaccgtggcagtggatcgacggatcggattaatttttagactttcttccgttaattttatccttttgatattttttgttcagagatcaacaaagagtctgtgtggtgaactctactcttctgtagctagtgcttctttgttggtatattgctagcgctactaggggaggcagtccggttgttccttacattcatatatcagtactacttcatgcatgtattcagtagccttgttttctttcaaacattacattatgatcgatatggtgtaacagaaacattttaatggataaatcaatcttgtatcctttcaaatgtc

SEQ ID NO: 25498 - DNA, 1531 bp, Zea Mays
gattgcttttccctttcacttgtatctttgtttcaatctgccggtccttggtgatcttactcgttcgactagaaatccaagtcacaacgatataaggttcccaacctagaagtgagcgatccttctctcctcctctcgtccttcgtcgtcgtcgtcgtcgtcgcgtgatctcggcctcctgcgacctccatggctggcaaagctgctgcagacactgggagcaacgaccgagtcgttgaggttgaggggtcctcctcctcctccatggcggacgtgtacaaaggcgagctcacgccgctgcagaggcacgtctccttcttcgaccgcaacaaggacggcgtcatctacccctccgagacataccaagggttccgagctatcgggtgtggcgtcgccctgtctgctgctgctgccgtcttcgtcaacggtggacttggacccaagaccgtactggagaacgagaagcctgcgcctttcaagttccccatctacgtgaagaacatccacaggggcaagcacggcagcgattcgggcgtctacgattccaacggaagatttgtacctgaaaagtttgaggagattttcaagaagtatgcccacacgaggcctgatgcccttacaggcaaagagctacaggagatgatgaaagcaaacagagaacccaaggacttgaaaggatggctgggtggcttcacagagtggaaggtgctgtactccctgtgcaaagacaaggacgggtttctccacaaagacactgtcagggcggtctacgatggcagcctgtttgaaaggttggagcaagagaggaactcaaagaaagagtcgagtaagaagaaatgatgagaaatccagacgctcttatgtggacgagtttgcaagtcacgctgtgcgtgtggttgggtactatcataatttgatttattctatatgtttgtcgattcatataacgatattgcaagtatttgtcgaacgtgtttgaattagcaagacatatagctgtgagctttgatagcctcccatatttttttcagttcatattttacattaacgtttttgtgcggtgcttgaaaatatttcgagcgtgttgttgttttttttcagttgtcttagtcatggactcatggtagattgctaccgcttttaaggctattgtttgtctagtttaagcctctttcatctatataatcagatgctcttgctcggttggttaatggaacaccccaaattccaatttgtgagttcaataatttttttattttttatttgagttaattaccccttttacataaatttagaattgaaataaataaatggtgattgaaaatattttgtatggtatgctggatttttaattgttgtatttcaagtgcaaacttgaaatatacattcttatttgaatttgaatttaaaacttgaactagaaaagaaaactataaaaaggaatgatcaaattagggtatttttgtgcatttaatataattttctaaaatgaataatgagacaaaaataaaataaataaatataaatataa

SEQ ID NO: 25499 - DNA, 2550 bp, Zea Mays
taaagccctgcctagtgctagtgcctactcacactcgaagctcaaatccgtctccgtctctccccctcgtaagctcggcgccgatgagatgtgaggcgaggaggggagaggcttctccggtcggtggcgcgggtgcgtgggttcgagggaggggggcagtgccggagcgccggttgatcggcctgcttggcggtggtgccatggctatggaggatgcggtggcggaggcggaccttgcggacccgaacccggacgtgggggacctgttccaccactacgacagcctctacttccagggcgcgctggctgccgccggcttcaccgtccagtggacctcctcgttgccgtttgccagaaggtcttttggatcttgctccttttcaaaacaacaaaataccattatactctcggagtcatttctgaagtatcgctcatgtactgaccggaagaatgcattgcttcattatatgatccacgcaatcatatacgtgaagcatcacaagaaggacagcaatcatggccctgcttttcgtgcttggatggatgccattaactcatgctgtgtagaagatcaccagagaccaaatggtgggtacaatatcaccacccgccatgatttcatcccagaagagccccgtagcttgaagggtattgtatggaagtgtaggtcttgtggtgatacacttctgaggttcacaaaccagggtcctccatctgatgcctgctgcattgagaacgatgacatcaatgcatcctgtgggaacatgctttgttattggcacaaccacaagaatgactgttctggtacatatgaaaaaacgatgaagttagaagcaccatctcaaaagaaagttgcaggaggtgctcagttgcttctgactttgccatcagaaatgtccaacattcaagaatccagttcatctatattgcagttagagtggagtactaaatccacagaaccaaatgctgaagacaagcatctttgtctagggagtggcagcaatgggaaacctcagggaagtagctcctcgaagaaagcaggtaagaggaacagtcctgaaatggttggggaaacaagtgttctgcctgctgcggcccaaggaaaacccaatcaaaaccatggattggttgcgatggcgaagcaagcgcctgcgtctgtggaaggctacagtgatgcagaatcaccggggagacatacatcaaagaaagctggcaagcgacataagcctgatgatcttcagaaaagcagtgttctcccttctgtaccccagggaacaacaaaaccaaagcatgcgttggttgcgacagagaataaccctctctcctcagcagagcgccgcaacgatgcaaaatcgccaaaaaccaatacctcgaagaaaccaggagactggcatgagctccagattgctcagaaagcctgttctcagccagctgaccctcacaaaaaactgaagcaagacctgggtgcaccggaaaagaaagaagttttctctttgatgggccccagcaatgagaagttactgggcaggagctcctcaaagaaggcaagcaggcagcatgaccgcgaagacattcaggaaaaaaacaccatcctgccaactgcccctggaatcagacccaaagcatcagcctttgctgcaccagagaagcggcgaaagggaaaatgcaaaaggaagcctgtggaggaaaaggagtacgctgtgatgagtgcgtggctgaactactacgaatcagacaggtcaagtggatcgcccgagccccttgtaaacaaaagaacagagcgaaggagaagagaaagggcaagaattctgacttattcacgatcaaagaagaacaaaactgagccattggccagctccgggacacatgcctctgtcagtagccacaaaatcgagatggcaccgcaagaccatgcagttgttactactggtaaccaggtggcggtggctccagcaactgtacatcaggcgcagccatctgctgattctgctccatgcctggatcttgttccatttcttcagccagcagatccattgacttctccagatcaaagcactgcccgagacatgatagtgatttctgatgacgactgacccttttcgatgatgatatcctctatcacattttggatggttgccgggctaattcagtggatgtggcgagtatgccatactatattagaagtgacatgctgtgcttgttcttactatagagtagtgtctgagggccccaccgaagtcccttaaactctttcgcgaacatgacgcgagaatgcaggtgctgcagcttgaacttgatttcttgaacaaaattcttggagttcagtactctcctgtgcttctgctggtgcttctaaagcctagtgtgcatatgcatgtggtacttgcatgaaagaaacatcaagtagtatccccgaatcgatcggtccggcataaagtcgtccgagacgtttcgaggaatgagtccatcgtcgttaagaatatctcttttatctattatttaaactacactcaacgaatagtgtagtctatggtgtaaaaatagtgtttt

SEQ ID NO: 25500 - DNA, 1103 bp, Zea Mays
ttattatatggtacagatagtagagagatgagaaaggccatgagccccatgactgtgtctgtgtgaattgcctttggatcgtcctagcagccttgtcgtcgttagaggatttggaacccgttccattcgccgcctttctttttcttcgcccgtccaccctacgagcgcgcacgctctcctggctatagcaaccgccgtcgccgccccacgctacgtgctcgagtctagcctcgtcggttccttcgtcagttcttcgtcggatcctttgctggcgaccaacacccaccaggatgaattctaagcgtaggaggagtcatagcccagttgaatacaaagaaggtcgtgaaaaagattatgaggcttctggaaggaaggataaatcaagagatctagatgatacatttgatgctaaaagaggtcatgaatcgggcaggcactctgataggcattcctatggaacatcacgtgaatccaggaggcatgatgactataggaggtaccatgataagtccggtgatgattatggtaggagctatccaagagcctcttggtcagaccgggaatcaagggctgatacttattatgatcgctcaaagcatgatagcacatctggtagatcacgtggtgaccagcaagatgttggcagtaggtacggagaaaaatctgtcaatcgagatcagaggagtataaatgaagaaaagcaggagccccctcgtggctatcaaaagagtgatgttggagaatacaataaatgtactgatgcaagaaagcaagagtacagaggttatggagatgatagagatcattacagggttgttcataagaacaaggaaaccatcaaagaggaggtcctgaagaggagaaatggaaaagaagttgagaaagaagctttagtggaaactagggagaagaaaagaagtttattcagctctactggaccaaatgttgataatccaggggatgccaaaccatcagccacaactgaagccttcgataactcagcaggaaccgtagatggtgtgaatgcagctaaagttgcagctatgaaagctgctgaattagcgtgttcacctatcagcaatgctgcatggtttgaagaaaat

SEQ ID NO: 25501 - DNA, 1610 bp, Zea Mays
gtgaggataacctggagctgataccaggtgtcatggaccttcggtccatgggtatagttgtcttctccggcgaggttatatccctctgccacaggcttggttctagggtagcagccctaggcgcttgagagggtcattgcaagagagagagattggtttgataatgatcttgcttgatttattccctgctaccatgcggcttataaatagccctatagctaaccaacttctacaaactctcaactaactactactttcttggacttatctgctgctaaccaactctccacaattctctcatctcaatcttattctctagccttatcccagctcatctcaatcttattctctagccttatcccagcctggctgttgcctctcgctccctatgatgcccatgacaggaatgggattggttcttcagttgaagctccagcaactatttgtggcatcggtattagatggaagcagcaatcttttaccagatagattgaaacaaatagctcagtaaatcggaaaacctgatgggaagaatcttgggcttaatcactctgtatttggtaaagtaaagggtgttcagctgtcatcgtacgtacaacacaaaatctccgatttatctcctagttcatcttcggctctggctccatcgccatcacagtcactttctccaagcatgccaccgtcgttatcatcgtttgggagcatcccttacactgcagggagactacctcgtccagctttagccccttcatggaacagacaccctcgttttccatattttaggtgtaatccctctcctgttggtagttcaatgttaaattaaaacctccttgcattattgaagacccctggttacctctcttaatgcattcagcaaagacatccatcttgccttccctgccaaaactcgttcatccagcagattcaccgcctgctcacatagatcctcctcgccccttacctaatcccattcattttccaaaagcaatctctggacccacttctcaaatgatgtcaataccttcaccccccatgaccagtgtctcaacattcgatgccccaaaaggaaaaaatggaatagcagaaacatcgaggttctcttcaattggcgccatcgccacatgctctcgttcacacttgaagttatggttgcttcgactgttagccatgcgtcatcaggaaaatcgagccagaagacaaggtcacaattttgcttcaagcataaccatgagttgcaatcatgggctatgatgcaaagatgaggctttgtttattggctactgtaactatatgattaattttaaagctttttgaggtcaggttaactgtagatatagatgttgcttcgactgtatatatgattaattttaaatctctcaccgaagggttgggagcttatatagaggaatgcaaggactcttactcgggtccacgttctgcaataatactttcttgtaacgtattgaccataaatacataatacaacatgcaacttctctgcaagattctgtttgttctatggtgcttggagcgtttaatcaatgctgattgtctctttgttgtctagtagacataaggttaagagaagataaggaagtgttatcggttcc

SEQ ID NO: 25502 - DNA, 1421 bp, Zea Mays
tttatgcgccgtcgcagtcgccgccgccgtctccccacaatcgaaaagagaagaagaagaagaagaaaatgggaacttggtacagccatccatggtatcagaatatgacctgggaggagaaggggacctgttcaaagctccagaagccatcatcgaggaaccgctgctcagcctcgatcctgtcgcagctgccttttcaatgatggctggcaatggaagtgctgtcatggatcaaactattaaggacgcaggcatcggcaccatccaaaatgaccccctcctgagtgaggtgctgtacgagtgcgagaaggaactcatggagaagtccacaatcgaagagacaatttctgaacttatggatgttaagattcctatgctgcaagttgaagaaatcccaagccaagctgaacaggttcttatacagaaccagcagctcccggccatggagaaagagaagcaatccgttcctgaatgctcgctccaaaaaagtgttagttctggatgcctcaactcagcagattggatgaatggacctgccaggccaaactttctagacttccaggggctggactttgaggcagcatttgggctgaggagagcttacagcgaaaggagacattcagaaccttggagccaacacgcctcgaccagcagcaaatgtttgtgtgaccatcagtgacctcaagaccgaagaaaggaagcaaaagctttccaggtataggaagaagaagatcaagcggaactttggcaggaagatcaagtacgcgtgcaggaaggctctggcagacagccagccaagagtgcgagggagatttgccaagatcgaagaatgcgacctgctgaagccaagcaagtagatccaagtatgcttggttttggcttctagctaggcgccgctccatcgtccttaccttgtgcgctggagaggcgccgcgatgcccgtcggaattcattcaattgacctctcctgtttctctcgggcagcatgctgtgtaataataatctcctccgggcccttgggtgcgagtgaagagctgaaaatttggtatggtagtctagcccccctgtactgtacaaaaggcttgaagatggtaataaaactcagctcccctcttgcttgcttggcattttttttaatgttatctgaatctgactgttagcattgtgctcctgaacatggatcattgggcaacaggaggaaaggtaacagaatatgatcatggtttcatattgtcctatcatgatggcattctgtccgtcaaataataataatgtctaatcccacagctctagaataatatgtacccccaaaaacaagaccaagctatcatgatggtatggatatggtgtaatatagatccaaaatctcatcgcaagtaatgtctaatcacacagctccagaatagcatctaccctctcac

SEQ ID NO: 25503 - DNA, 569 bp, Zea Mays
acgaagttgtaatgaagggtccattcaactacacggctcgtgatgaagctggttcatgatagattagcttgtattgttgagatggaaaaagagaatgcaagtttggctgaacttcgcgaaaggaagctgatgaacaagtacaacgagctcaaggaggcaggaaagcttgatgcattcatggaaaagcggtggaggaagaatgcctccaaagatcatcggttcatgccgtaccgacgcagtggagatgtataatagtttcctgattctggaggcgagtgaaaggatgattttaggacggtgttctcatggtggctggacactggacagtcagtgtctctgttactttgttgccctagccgtacaatcgtcagctccgtgcacaatctctactacttcttaagaatatagtgcaggcgtccatggtggttttttatgtttctcatttcactctctgcattttcagttacaactatactgcatatgctggcagatttgttcatatattactccagctgacattttcactatcgcaacaacatctctactactatttgtttttttgcatataa

SEQ ID NO: 25504 - DNA, 182 bp, Zea Mays
ggagaagaacaagtggttcaagagtagtcatgtatcgaggagttcgattcgatctaggtggcgtctcccagttgactttctggcgccaaggatggattttagatcctattatatttatcttttatttttgtaagacttccgctatgtaataagtactctgattttattatgacatttatctc

SEQ ID NO: 25505 - DNA, 1976 bp, Zea Mays
gcaccacgcaaaccgagctcgagaacaccaccacgaacaagaaagaaacacggccgcggcggggcggggcggggcttcttctccttttccaactcgctgcccgttgcgtgattccgccgcgtcgcgtcgcgtgtgcatttgcgcgcgcgcgcaggagccgccgctccgatcgccctgaaaaagatggcgaatagtaggaagcctcctggcctcaggttactcggaggcgccggctcactgacaacgtaccagacactagtcctggtcctcacgttcttggcatacacatgcttccacatgactcggaagatcccaagcatagtcaagagcgctctggacccgcagacgaaggtggggttctcgcactggggacggttgcacgccagcagaaacgctctcaccaccggctggctgccgttcaacaccgccgacggctccgcgctgctcggcgagatagacgtcgcgttcctcgccgcgtactccgccgggatgttcttcgccggccacatcggcgaccgcatggatctgagggtcttcctgacggtcggcatggccggcaccgccgtgttcacgacgctcttcggcgctggatactggctgaacgtccacagcttctactatttcttggttattcagatggtttctggcctgtttcagtcagttggctggccttcggttgttgcggttgtcggcaactggttcgggaagagtaagagaggattgatcatggggatatggaacgcacacacctctgtcgggaatatagcaggctcgctgctcgccgcgttcctcctgaagttcgggtggggctggtcgtttgccgtccccagccttatcatggcgctcgttgggttgatggtgtatgttttcctgccggttagtcctgaggccatggagattgacagtgacggcggtgagcttaactgcgagaaggacgctgtgaaggagcctctcttggaaccaggccaagaagtgaaacatagtgcagtggggttcttagaggcatggaggattcctggggtcgcgccgtttgctctgtgcctcttcttctccaaactggtcgcgtataccttcctgtactggctgccgttctacatcagccatacacgcattggtggcgagtacctctccgacgccacggcaggaagcctatcgacgatcttcgacgtcggcggcgtgctgggaggggtcctggcgggccacatctccgaccgcctgaacgcgcgcgcgatcacggccgcgagcttcacttactgcgcgatccccgcgctcttcctgtaccgcacgtacgggagcatgtcgatggcgtggaacgtctcgctcatgttcgtcacggggatgttcgtgaacgggccctacgcgctgatcacgacggcggtgtcggccgacctcggcacgcacagctcgctcaacggcaactcccgggcgctggccaccgtgacggcgatcatcgacgggacggggtctgtcggagccgccatcgggccgctggtgacggggtacgtctcgtcgaggagctggagcgccgtgttcaccatgctgatggcggcggctctcctcgctgggctcctcttgagcaagctcgtgtgcgccgagctgcaagggaaaacgcattccagcgtgagcaaggacgcaggcggtgaacatggtgcctactcagatgaagtgtaagtctgaagccctggttagtaagcccacgttcccgacctgaagatgaaaaggcagagatttagctgctgagtgacttgctcaaatggcaattcagatgattttcttttgttttgtgtggtagaagatgtaagtgtgtgcttagattggtttttcaggtttactagactctagagcccaaatacaggcacattttaggcgcctttgtaaataaggtcgggctcatactagttaccattgctagttgctcaattgtatgtgatgtttagggtatatgtcaaatggagggcgaaccaccttttgtacaa

SEQ ID NO: 25506 - DNA, 2851 bp, Zea Mays
tctaggatggagtaatttgggcctctgcggcccgcttacgcacgttcttgccctgctttgctctctccaactccagcatcgccccaaacagcggagccagcaccaccaccaccgcggcggcgcgagcgtcactgccctgccctctcctcctcctgtcctactgctctaccgtcctctcccccccgcgccgctgccgcaaccaaaaccctaaaagtcgctttctatccacttgctccgccgcctccaccaccgggcgccatggcggacacagtgcagtaccgcctggagcggatgaccgacgaactggacgacctggagcgccggggcctcttcacgcgcggcgagctagctgacgtcgtccgcaaacgccgcgacttcgagtaccgcctccgccgccactccccgctccgccaggactttctcgactacatcgcctacgagctccgcctcgactccctccgcaacctccgcaagcgcgccatcatacgcgccgccgccgaagacgacgacgacgagcctcagcacgacgctcgcagcagcgacgacgagggaggccggaggaagaggaagaaggataaatccaagaagaagtggaagaagtccgtctccgacgtcgcgggcgtcctccgcgtcctcgacatctaccggatggccaccgtcaggttcaagggcgatctcgacctctggttccggtacctcgagttctgccgcgacaagcgacacggcaggatgaagcaggttctggcacaagccattcgcttccatcccaaggttcctgggctttggatctatgcagcagcatgggaattcgatcagaacctgaacgttgccgcggcacgtgcactgatgcagagcggtctcaggtcttgccctcagtcagaggatatgtggatcgagtatcttcgcatggagcttacctaccttaacaagctcaaggctcgaaaggttgctcttggagaggatgtcaagacgctgcaaaagaaagacaacgatgcgagccagtggaaagaggaaaacaaggaactgttcatgccactgaatgaacaggtcaaagatcctaaggagccaggctcggctggagatgccctggaggagaaggaagacctgttttggcgtcaagggttgttaatcattcagaccatatatcatggtgccgtggaagctcttccgtcaagcttaaccttgcggaagaaattcttggagatactaaacagtgttgacttggcacattctgatgagttaaaactggaggtcctggatgaccttaagagagatttctctcatagcgaggactactgggattggtttgctaggcttcagcttagcaacttgaacagttccagtaattcgaatagaaaggatgctatatcaaacaagttgaacagatcaattcaggtgtatgacgaagctatcaggaagctaccaaattccaaaatgtactcattgtatgcaaagttttggatggatgttatatatactgacagagaagattcagtcacattattccaggattctgaatttgatgcttcagagttcacttcatccatactgaaagtttatgaaaatgcagaatcatgtggatgtcttactgaggatcttgcttgccaatacatatcactttacttgaaactagaaagactggaggaagctaagactctcgcagaaaagctttgtgatggtcctctttcaaatgctgcaaatttgtggagcctgagatttactatggagataaattcaattgcaactgctcctggcagttcttccttgagcaaggagaacctgagctctctgcttgatctatttagcactgtactctccaagttgtctgtaactgaggctgagagactgtggcatatggccatgaagttgttttcccatgataaggtctgtttcgagaagctggtgaagtgtgcgatgctatcattaagtctggcaggtggcagtgattcaggagcatcagtttcttctgctatcgttggatggtatttgcaaagagatggtgtgaagcatgctaggaagatgtataagagattgcttgctttacctcggccaagcctcaagttcatgcaatactgcatagcgctggaggcgaaccttgcatcgctcggagacaacggcgccctcaaagatgctcggcggctatatgattcagcgctcgacctgtatccccaggaaagagaagtgtggcggagctactacgacctggagctgaagatgggaacatcggagtctgccaacgccgtgtactcgcgctctcgtaaggtgctgggtgactccactgccttgactgctccccggggctaggtcgcagcatgcaatgtattccaagatgcaatgtgattttttttgtttggatctgtgttttccaatcctctctgagtctgggtcagcaagcaattaagctgatgcatcgaaattttggctctaaatgggagacctacaatgtgctgctggggaacactgtatatcttgttcaaaaaacaagagtactgcagctgctggtggctgtctcctttgagaacacttgcctgtgtcccttttctttctttttcttttttgtttgagcagtagctgggctgttggtgatgctgttccttagtgttgaggtgctatggtgtaacagtgtcaattgcgacgtgaacaaattctgggatctcgaaccatttgttgagattttgaaagtgtactggtggtcataatttttgttgggacctcgaaccatttttttagattttgatgtgttccttttatttatttattttttgtatggttcatggatgagccacatttgcttttgtgtcagtcttgctgcagattcctggtattaataaattagatgaattatgatgat

SEQ ID NO: 25507 - DNA, 2004 bp, Zea Mays
aggcttcccttcagcaaacagcctggtagttctattcagccgcttaccgcgcgctctcttgtgcggcaattgggcgaccgccgccgccctaactcaggtgccgaggtcttcgccagtaacttcaacaggtcctcgcctggtccttcgctggcgaggagcatctccaccagactttctgctggttcaggtgcgaatcatggggaagtttatgcatgacaatccaatgctatcatgtagtgaagtaaacagacatcactatagtcttgcggcagttgctgtcggtttgggactaggagttgccgggttatgcaaggcattgtatagtggtctgtccataccatgggtttctccaaggaatttgttttcgggatcagggagggcatactatgttggaggtctgcgaaatcttggcaacaattgctttcttaatgtcatcctccagataatttgcttgcaactgatggcttgctacctgaagaaaaggctgtaagaatgcctcttcttcttgctttaagttctctcttggaagacttaatcatagttcgagatgaaaggactgtgttgaatccacatggagtaatgcatgctttgagtttgtatgttggtcacttcaatctgaccagacagcaggatgcttcagaagcttttctccatcttctgatctcattgagggatgaatttgcccattgttatgtaccacataggagttctctggcagacatcaccctttctgactccaaagtatacaagcaaagggaaggtaacctgcctgaatgcaagcgctggaaacaaaacctatttggcccctttgatgggacagttggcagcatattgtcttgcagaaactgttcttctgtgctgtcattggacttcgagaatttccactgcttgcctctttcgccagtccttaatgcaaatggagatattaccagtgggtgtagtttggtggattgcctaaagtacttcactgtggtggagcatcttgacaactatcgttgtgaccggtgttggcacatcattgctgccaaatatctttctcttagatcagaagttgatgaggaaaaggttagcaagcttcaatcctgtgtcgactatggcacttgcagttgcagggatatgttccccctggagtcactgccatgttcatcatcttcacgagcaacaaagcagctgattatcagtcagtgcccgaagattctgtgcattcattttctacgcgcttcagtcggtcttgacggcgagcccatcaaacatcagggacatatttctttccctttgcttctcaatctgtccccgtttacgggaggcgcgtcgagtgctggacctttagcaatgaatgcgcaaagagatggccagcaagctctccatctataccggcaactgaatatgcaggctaatgctgacgtgtccagtagttcatcatcaccaccgcagctatcaaggagcaagttatacggtctcgcggccgtcgtggagcactacgggaagtgtggaggagggcactacgcagtctacaggagagtcgcgtcgaatcctgaccctgatgatccaggcaaacctgttgcaggccttggcaagcggtggttttacatctcagacggctacgtgtcagaagttccagaggaggatgtactgcgcgcggaggccacgctccttttctacgagagattgtagccgcttgttgagtagctaacgtgtgcatcataacaaaatctaggacagttttgttgtgaggagtctgatgttcttagcggtaccgtgagcttccaagtagacgaggaaactagctgtggcacaaaaaacaaagcctctcggcatctcgacgtggactgcaggcgtgtcttaggcagtgtggcctactttttttttgggtccttgcaaacgttaaaataattcttcatgcaatacgtcagtgaggtcttcctcttgagaataaatcagatcaccattgttttgcgacattgtaagcagcagatggtggatcgtgtgagttttgttctgctg

SEQ ID NO: 25508 - DNA, 2054 bp, Zea Mays
tgataccccgcgggtcacgtttccgcaaagggaaagcctcaaaaggcgacgcgcaagggccgaggagagaaaggaacctgaggaaggcacaccagtttcaagcaatccctaggccgtggcgacgtgctgggaaggattcaaatcaggggcgaagcctaggtgacggcgctgttagtcgcctctagtagctgcgcgacgcgggctggcttgtccgatcggtttgcctcggccatgtcgactaagaaagttctttgcaagttcttcatgcatggagcttgcttgaaaggagagtactgtgaattctcccacgactggagtgatcaagcaaataatgtttgcacattctaccaaaaaggtgcatgctcgtatggtagccgttgcagatatgaccatgtcaaagtttctcgtaaccccacagtgccaccaccacgcccaacgtcaagtacttcaagacgtgcatctacttctcttcaactttcaagttacaatcatccacctcatatggtgcaccaaacagattcaagcaaccaaagacatcagatatctgtggatgtgttggcacattctgccagtaagcctgcatggagaaatgattttcagcatgatattgtttcagatgatggaattgactggtcttctaatcaaaatttgataaaccagacatcattgaaacctgtggatctccctatttgttcttttgctgctgctggtaattgtccttatggggaagggtgccctcaaatgcatggagatctgtgtgcaacctgtggaaaactgtgcttgcatccttatcgtcctgatgagagggaggagcatatcaagttatgtgagaaaaatcacaaacgccttgtagctctgaaacgcagccaagaaatagaatgcagtgtatgtttggatcgtgtgctttcaaagcctactgctgctgaaaggaagtttggactcttatccgaatgtgatcatcctttctgtattgaatgcattagaaattggcgtagcaattctcctgcatctggtatggatgtgaactcagcattgagggcttgtccaatatgtcggaaactttcatactatgtcattccaagtgttctttggtacttctcaaaggaagagaaagaggagatcactgaaagctacaaatccaagctcaagtctattgattgcaagtacttcgactttgggactggctcatgccccttcggaacaagttgtttctataagcatgcctacagagatggccgcttggaagaggtaatactgcggcatcttgatgctgatgatggaagtacagtaattgcaaaaagtatcaggttatcagacttccttggtaggatggatctttagggaccagcagctgtattgatatcaaatgcattctgggatatcgttatccaccaattatttacaatattctgaagatcagtttagcttgaggcatcttcggaaagtacagctttgtctccatttagtggttggttgctttgtcgccagttgaaacaagaaagtttgaagatctccatggtcctgtagatgctgggattaccttttcagagcactgttgacctgagggcgacggaaacaagtctgacaacaattgtgcttgaatatcaaaacagaagtaatactcgtatttatagacttcactaagtgtggctctatgtatcaattgctggtcttctaggccaccagataatagctgaacatttcctggccgacaagtgaaaggggcagccgtataaatttgcttccattccacctgaatgttctcttcatattgtggaagggtactgcaccaataggtccaataaggccatttgtttgctttacttaatatacaaaaaaagtatagcagatgaaatgcaatgacaactgtaatgcagcattgttgaatgtgagcgtgagcggtggttttttatcgatgacctgctgaggaaggtcctcttagtaggcaggtaaactgagaacatttttttgttatatatatacagcataattgtacgagaaaaatagcaaatgaaccgagaatgatcattaaatgcagtcgtcggttgtatggt

SEQ ID NO: 25509 - DNA, 285 bp, Zea Mays
cccgccagcgatcaagggccccagtccgactgtcgctgcgcgagataggggtggagataaaatcgaacaggatagggggtggttaccgcaagcaggagcgaaagcgagaccaccgacggcgcagtctagctccggattccaacaatggcggctcccagttctccattcgatgcgcactaccctgcccccaggcggcaatggcccccaggcgcgcgagagatggatgaggaaggggcgctcggcttgtataaataccccgagatggagcccagccaaggagagatc

SEQ ID NO: 25510 - DNA, 1509 bp, Zea Mays
tttttcttcttggtggcggcggcgggcgcagcctccctccatggctccagctggtgatcggagcgccgccgcccggaaccccacaaaataaaacagctcgtcggtgccccaccccacccaccatctcctcctcaccggctttatatatgcacgcgccgcgcaccccggcgccagctacccatgccatgtcacacgacacggcatcgcacgtccaccaccaccccgccgcagcagaagaccccggcggcagcgagtgccggttctgcgagatgacgcggcagcaccatcctcagtgcgcgcggcggctgccgaagcgcatcatcctggtgcggcacggcgagagccaggggaacctggacatgtcggcctacaccaccacgcccgactaccgcatcccgctgacagcgctgggagtcgagcaggcgcgcgccgcggggcaccgcatccgcgacgtggtggcggctggcggcggcaactggaaggtctacttctacgtgtccccctacgcgcgcacccgggccacgctgcgcgaggtgggccgcgccttcccgcgggaccgcgtcatcggcgcccgcgaggagtgccgcgtccgggagcaggacttcggcaacttccaggtggaggagcgcatgcgcgccgtcaaggagacgcgccagcgcttcggccgcttcttcttcagattccccgagggcgagtccgccgccgacgtcttcgaccgcgtcgccagcttcctggagtcgctgtggcgggacatcgacatggggcggctggaccaggaccccagctgcgagaccaacctggtgatcgtctcccacggcctcacctcgcgggtgttcctcatgaagtggttcaagtggacggtggcccagttcgaccgcctcaacaacttcgacaactgcgagttcagggtcatgcagctgggccccggcggggagtactccctcctcgtgcaccacaccaaggaggagctgcagcagtggggcatgtcgccggagatgatcgccgaccagcagtggcgagccacagccagccgccgcaactgggccgaggagttctcctccttcgtcgacaccttcttccaggaccccaacgactcgtcggacgaggaacaagaagcacaagacaaggagacgaacctgctgctggacctggagtaactacaactattcatccgcccacaccctgtttatttctttctttcaatgcctctttgaaattgtttccattggatttggatgacgctttctgttgctgctagtaggggggaagagcagagcagggaggtatggtgtattcatcagtcattgctgatctctttcttcctcagcagagtcattgctagctggaaaactgacaaagctcgcagtgcttggctgtctttaacagttaactagtagaataaagatgacttttttttaatttgcggctttcttcattaattatttatataatcaagatcctttcatacttcatacagcacagggtacgttggcattctaataacaacat

SEQ ID NO: 25511 - DNA, 843 bp, Zea Mays
aaagcgccaagagaaattgaaacgacagtttggtctgtttttttcgcacattcaagcagcaaactgagaagaggtggaagcataaaggatacctcctgtaagtgccacagtcagacgatggccaaccaaacaagtttcaatgtgatatctatagaagtagcggatgaccagtttcatcacacttatattctgaattatacaaaggatgtttgtcaagcaactaaaaggaagaacacatgctaccttatagaatgtattgaaaaggttgcagattaactgcagcgaatgaatgctagtatcacgaagccaatcatccccagaagaagaaagcccatcccttccagcatgccttacatgatcaaaaattggaaatagtacacgatgaaaaatactctcccagaagggagaagagaacttatgtcctctttcattcaacaaatcaaacaacacttccagtgcacagtgtctgacttctggtctggagtctaaagtcaaatcagacaaaccagctagcataggaaaccaataatgctcagtcacatcaaaattggcctctggaacaacatcaataggtttaatagcgccgcctggaatgaatccctgtatggtagagataaatgagagttgagacacgcaaaaagggccctactctcatgaatatgtaggtgaaggttacagataatcaaaacctctgccaaacgatcttcacatatacgcaggagagcaatagccttcaaactaatccgaggagtgcacttgttatttgcaaaaccaataagacagttgacgcaatccatgaagcaatcaccaacaacttggtcaaaatgttccaagataactgta

SEQ ID NO: 25512 - DNA, 1069 bp, Zea Mays
tgttatctatatatgtgtgtgtaatgtgcgagatgtgaggaattccatatttgtgtggcgaggcaagccgtgcgacaagtgccagatgtacgatgaaatgattgaatcggagagcgtcaccgtttgtgtggattatcaagtcaggcaaataacggtcacttggtcgtggaagggcttcttattgcagtcatagtgttccagctctccaggaagagttacaaaccaccaaagaagccactcactgaaaaggagattgatgagctatgtgatgagtgggagccattgtggttgttgttgcatgatgccgctggaccacatacgattgttgatggtaaagaagttgtgaactttgcatcagcaaactacctcagtttaattggcaacgaaaagattattgattcttgcatcagttcattggagaaatatggtgttggttcttgtggtccatgtggcttttatggaacaactgatgtccatcttgactgtgagtcaaagatagctaaatttttggggactccagactccattctttattcatatgggatttctacaatattcaatgtgatacctgccttctgtaagaaaggagatatcatagtcgctgatgagggtgttcactgggcagtgaaaatggtctccatctatcaagaagcactgtggtgtacttcaagcacaatgatatggcttcacttgcaagcactttggaaaaacttactcgtggaaataaacgtgctgaaaagattagacgctacattgttgtagaatccatttaccagaattctggccaaattgcccccttggatgagattgtcaggttgaaggagaaatatcgattccgtgttattctggaggagagtcattcttttggggtgcttggcaagtctgggcgtggccttgctgaacattatggagttcctctcccaaacgaggcctaactgtttggtgaaatgcttgggacaaagtggccatcaagaatggagtcatggaacatcagcaggacactacaagaaactgataaatgttcgtgggttttgttaagaacgtgggtaccgacgttcttatggtagtt

SEQ ID NO: 25513 - DNA, 2691 bp, Zea Mays
aaacattcctaattgccaattggagccagagcgcagagcgcgaaaggcgagcggcgactccctggcgttgaccagagccccaccccactcgccgtctcgccctaaaccaaatcctccccaaaggcaaatacgaaggtacagtgccccagccccgcgccccctagaccaaagcagaccagaatccgccctaccaatcgcctccccagatcggcggtccacccggaggcggcgatggcgtcgtcgcaggcgaacctcgacaagatgcagctccgccagagctaccgcaacgtctggcacaccgacatgacgaacgccatccaggccgacttcccctactgctgcctcgcgctgtggtggtgagccatccatcgaccctgcctagcagatctcaccgtcaccgtcttctgcgggctttgagtctcgaacccctagccttccgtagatccgaggacacttaatttgtcgctgtggctagggtttttggggattttggtctccaagggttccgcgttgtgcattgccgctttttcgaggagcatatcctgaactaaattgttgcagtataaaagctcattctacattatattatatacattttagattaggggaggctgtaggggctccatggtatccgaagcggtagggggggctcgagccccctgccccaccgctggatccgtccctgatcctgaatttgttattccatctgcgtttaaagtttattccgcggcagcaagacgactaatgaaagtacaaatgaatggatgatgatagcggaatccgctgggcctgccagattgtctctaggattttgacaagtgcacgtagcccatgtagtagctgccgcaaacccacaagaggatagatgtgagatgtcagtttcatcttcctccctggagccagttaatgtataaaccataaacaggaacatggaaatgatcccccacccctacatccctctgttagatgcaccaggttaattgggctaatgagcattgaaagagtgcatcatttttgtttctgatgggtcctgaccaataatgtcggctccctgccttcaagttcattccagagtatgcatagccaaaccatgtaaggatttcatttctgttccaaaaagaagggaccaagtctaataaaaaagatcactgtatttccattgtttctatgataggtctaatttggttccaccgttaccatgtggcgctagtctatcatgcgtgacaaagcttttaatgtgcttgcattggtagacatcgacataggtcaccatttggaaatgtgaacaattttacccgttcgttaatctgctgcattctcctgtttctgttcagtggaccttgcgtgtcgtacatgcttcgcaaaagggctctctacaatgacatgtcaagatatgtctgttgcgctggctacatgccatgcagtggaaagtgtggcgagagccggtgcccagagttctgtcttgcaactgaggtgttcctttgctttggcaattcagttgcatcaacccgcttcttgctgcaagatgaatttaacatacagaccactcagtgtgacaactgcatcattggcttcatgttatgccttcaacaagttgcttgcatcttctctatagttgcagctattgttggtagcgaggagctttcagaggcttcccagatccttaattgtctgtctgatttggtctactggacggtttgtgcatgtatgcagacgcagcacaaagtcgaaatggacaagagggatggaaagttcagcccacagcctatggcagtgcccccggtgcaacaaatgtcacgcatcgatcagcctatgccgcctcctgctggatatgcaccgcaaccagcatatgggcagccttatggtggctatccatctcctcctggccaaggttatccgcctcctcctggccaaggttatccgccagctggatactcgcagggcggtgcataccctccacccgctcaaggttacccacatggtggtggatatcctccacctggtcaaggttacccccagggtcagggtggtgcatatcctccgcctggttcttaccctccacaaggttcctaccccccagcagagggctcctacccagcacaaggttcctaccacccagcacagggctcctacccagcacaaggttcctattccccagcacagggctcctacccagcacaaggttcatatcccccacccccagcacaaggttcatatcccccagcacagggctcgtacccagcacaaggttcctaccccccacaggcttaccctggcaagtaaagatgacacgacaggtgaaccaaatatcgtgaacatgtaaacagtaggaccgctttagcgctataggttattttgataaaattcttgttactgttcagggtggcattcggtgaacaatatttctattttatacggtcaacatcttgtgttgatcatgtcgtgttgagtctatcctcttttttcttttcctgaataaggaatggcattcaactggaatgtatttgaatttggtgacaactcacgtggatattgttttggttcagagttgtcactttgctgtgtatgatagtcgcaacttttgatgacgtttgataatggagtgaaggaatggaatgcttatgacttgtgagcacgagcagtccctttcacacacgttactattatcataggacgagatgaatagacaga

SEQ ID NO: 25514 - DNA, 2635 bp, Zea Mays
ctcagcatacggaggcagccgccggtaagccgcgcgcgcgtgcagtcacccatccgtccgtccgtccgtccgtcgtccgccgtccaccgccagcgcgcgctcgccaccgcacccagctagcagcacaagaaaagtctggtggcgtcggcggcggcggcggcggccggcttgccacagtccaatccttgtaccggaccaaaaagcagttgaagggcgcgagcgagcaagctagcgcgcccctacgcctacgcgcgatcgagccgcgcattgctgacctcgagttattaagttgggcgaggagaggtggttcattccagcagggatccttctcgtgagcccagtcgatctgaccgtccttggtatctggggggggttgttctgtactctctctttaattttgctgggatgtatcgcctttgggattttctgggtgatggccgtcttccccaccgtcccgttcatgcctgttgggcggacggctgggtccctccttggtgctatgctaatggtcctgttccgcgtcatctccccggaggacgcgtacgccgcgattgacctcccgatcatcggcctgctcttcgggacaatggtcgtcagcatcttccttgagagggctgacatgtttaagtacctcgggaacctgctctcgtggaagagcagaggcagcaaggacctgctcttccgagtctgcatcgtgtccgcgtttgccagcgcgcttttcaccaatgacacatgctgtgttgtcctcaccgagttcatcctcaaggttgctaggcaaaacaacctgccaccacagcctttccttctggcccttgccactagttcgaacatcggctctgctgccacgccgatcggcaaccctcagaaccttgtcatagctgtcgagagtgggatctcatttggccagttcttgctgggagttttcccagctatgatcgttggggttctcacaaacgctgctatcctccttttgtacttctggaaatacttgtcggtggagaaggatcaggagggtgggcagcccacaggaccagaggtggttgccgacgatgaggttacttcccatcggttcacaccggctagaatgtcacatgtttcttctctgaatccagatgacatggattgcgtaagcgaaccgatcatcaggagcaacagtgtcagtactactgggaatgagaacctgagaagcagaagcatcaattctgaggctgacattcagcttgcgatcaagtctctgcgggcatcaagcatgtcgcatgagatggtagaggtctcgacggttcctgatcggagagatgaaggtgcatcctcaaggaagttcacaaggactgctagccagcaaaggagcgtgataatagaggatttagcaccctccccagagattaatggggaaaaggagaaagaaactgaagttgcagagaagagatggaaagtacttgtgtggaagactgctgtttatcttatcactctcggtatgctcattgcacttctaatgggactgaacatgtcctggactgcaatcactgcagctcttgttcttctggcactcgattttacggacgcacaagcttgtcttgagaaggtgtcatattcactgctgatctttttctgcgggatgtttatcactgttgatggcttcaacaaaacgggcataccgaacacactatgggagttagtggaaccatattcacgaatcgatagtgcgaaaggtgttgcacttcttgccgtggtgattcttatcctttcaaacgtggcctctaatgttcctacagtcctattgctcggtacaagagtggctgcatcagcggcttcgatttctcatggttcagagaggaaagcctggctcatccttgcatgggtcagcaccgtggctgggaacctcaccctcctaggctctgcggcgaatctgattgtctgcgagcaggccaggcgggcccagttcttcggctacaacctcaccttctggagccacctccgattcggggtcccgtcgaccatcatcgtcacggcgattggtttgctcatcgtcatcagttactgaaacagctgaaggcagaagagcgtagtgtaagagaagcagaatggataaaaatccttccaataagaagtacatgtaaattaggcttgccctataactcaagtgtgtatcggtacgttatgtctccgtctgtgctcttgctcgtgagcaagcagcacatggctgaccgtgtagcttgcatttccattgcataataggcttatgaagaatgctttggtaatatgattttacagtctgacaaggattgtgaagcagaggcagtgtaccatcaagataatacttctggaagcatataaaaaaatttcgtatatttggatttcaaatccagtctgcttcagactggaaattcatattatcttctggaatcgtgctttattgtcagaaacatgggctaaaattggaaagtccgtcatttattgggcttgcaatgggacaaccttttgggtctgttatatatcactataaccagtgacaactttggttcgcaaactcaaaccagtttctaatctttattttatgatttttatataaagttcttaataggtcctcttgctattttcaatctaaattctaaatactaaaaaaagtttctgtgaa

SEQ ID NO: 25515 - DNA, 2094 bp, Zea Mays
atacaaatgcctgcgcattagcgatcctcctcgctctccttccccttccgctgagccgtgctgccgcggccccggcacgccatggcgtccacggcgtactcgcggtcgtcgtccaacaagctgccgggcggcgagcggcggctgcccccgcgcctcatgcggggcctcacgtccaaattcgagcccaagaagctgggcgtcggcctcgtcgccggctgctgcctggcgctcctcacctacgtctccctcgccaagctcttcgcggtctactcccctgtattcgcacggccaacacgtccgcgctgatgcagcagaacgcgccgctggcctcgtccaagccgtccgtgccggagacggagaccatccctccggaagagacgctggacgacggcgacggcgcggataccggcgatctgcgtgggacggagcccggcttgccggaagctgccgtcatgaggaacgacatggcagcggggtccgacgagcccggcttgcccaccaggaaggacggcggcgggaatgcggaggccgagcccaccaacaagccatctgaggatggcaacggcggccaacaaggaggcaagatgacgtgcgacgagaacagcgtggacgagcggttcccgtacgcccggccgaccgtgtgcgagctgtccggcgacgtgcgcgtgagcccgaagcagaggacggtgtacctggtgaacccgtccggcggcggcggcggggggttcgacgagagcgtcgagaagcggctccgaccgtacgcccgcaaggacgactcctcaatgccacacataacggtgaagtcggtggcttcgggcgcggcggcgcccgagtgcacgaagcggcacgcggtgcccgcggtggtgttctccgtgggcgggtacaacacggacaacaacctgttcgacgacgacatgacggacgcgctggtcccgctgttcctgacgacggcgcacctggacggcgaggtgcagctggtggtggccgactacaagccgcggtgggtgcgcaagtacgcgccgctgctgcggaagctgtcccgccacggcgtggtcagcctggacggcgacgccgagggggaggaggaggggccgctggacggcgtgcactgcttccccgcgggcgcgttcgtggtggggctgctgtaccgcgaccgcgaccgggatctggacctgtcgcctcacccggcccggaaccggaacccgcgcaacgtgacgatggcggacttcgcgcggttcctgcgcggcgcgctggcgctgccgcgggaccgccccgccgtcctcggcggggcgcccggcatgcgtccccggttgctcgtcgtctcgccgcggaggctgctgaacctggaggaggtggcggcggcggcggacgcgctcgggttcgacgtggcgtccgccgaggccggcgcggacgacgtggcggagttcgccgcgcgggtgaacgcggcggacgtgctggtgggcgtgcgcggcgccgggctgacgaaccaggtgttcctgccgacggaggcggtgctggtgcagatcgtgccgtggggcaagaagatagagtgggtgaccaccagctcctacgggcgggcggcggccgggatggggctccggtacctggagtactacgtcggggaggaggagacgaggctgagggacaagtacccgcgggagaccgtcatggagcaggacgtcgtcgtcaacctcacaaggttccggcccgtgctgctgcaggcgctcgacaagctgcagcagtgacgaggaatggattcaccatagccggccggcaggaggaagctcgctcaggtcgtcgggcatgggattggtaatttggttggttcatctgccggttttgttttgtttgtcgtaagaaaagaagagaagagaacatacatacactacacacgaacgaacgagaattctgttcattcttcattcgcttggcatcattcattcctccgattaccatcccattatgttccttccaagaactagaagaaagatcgattgtgcgtgcagcgtgcatgcatgcatgcggcccacccatgaattatctatcgcaaaagaaaacgaaaatgatgtttcagtgcaagcgtttggaagcaaa

SEQ ID NO: 25516 - DNA, 1270 bp, Zea Mays
tatgaagctggcccccctgggcgcaaaggtgaatggctgcactggtaacatggggttatctgtcgctgaggctgctgctctgaggggccttcacctagtccctgtttcattcagtagtagagagaaggttgaaaaaacaatacaagttggacaaacagacattcaaatatatggtccttctaaaagagaagatgttgtttcatctattgctgatgaattcccagatgtcattgttgtggactacacaggacccaattctgtgaactctaatgctgagctctattgcaagcttggcttgccatttgtgatgggcacaactggtgggaacaagcatttgctctacaagtcagtgcaagattcaaaaaattatgcactaatatctccacagatgggcaaacaagtggttgcatttgttgctgctatgaaaatcatggctgagcagtttccaggggccttttcaggttatcatttagaggttttagaatcccatcaagctggcaagctggatacatctggtacagctaaagacgtgattgcttgttttgagaaactaggtgtgtcatatgatatgaaccggatggttaagattagagatccagaacagcagcttgagatggtgggtgtccctgaagaacacatccaagggcatgcattccatctgtatcatctcacttctcctgatgacaggtaataactattctcctgaaaattgatgatactgccaataaagtaattatattcaagcatggatatttttgtagtgttgctaatacatcagagcaatttcaagcatgctatgttttcgtttttgttgatttaaatgtgttcttttagtgtttcatttgagttccagcacaatgtttgtggccgttcaatctatgccgaaggaactattgacgcggcaatgtttctgcataggaaggtgcaatcaaaggattctaagagaatatataatatggatgatgtcctgcgagaagaaacttgccataaagcctactgattagctgctgataaataatactccctccgttcttttttatttttcgctgtttagttcaaaaataaactagcgagcgacaaatattcaaggatggaggcaatattaagcacagcgctgttgtttttaccgttttttgttagaataatgcactgcgcaccttcacccattttagacttttgtgtaattgggttgaatatgagaggttcaataggaaaaaaatgacatgcttctagtgatggcaatcataatttaatattctcgacttcttgc

SEQ ID NO: 25517 - DNA, 2650 bp, Zea Mays
ctgtgtgagactattgttttcgagattgctagcgaaaagcatctcaatccctgaatcgcacacccagccagaacgaacgccagaaggcccagaaccgctacctcctccaatacactttcgtggctccgccgcagcacgaaaccctagcttctgcatctccgccccctccacctcccctccgcgaagcaggcgagatgtcgtcgggcggcggtggggggcagcagttccgctacacgcagacgccgtccaaggtgctgcacctgcggaaccttccgtgggagtgcgcggaagaggagctcgttgagctctgcaagcccttcggccgcatcatcaacacaaagagcggcgtcggcgccaaccgcaaccaggccttcgtcgagttcactgacgttaatcaggcaatctcgatggtttcttactttgcatcatcttcagaaccagcacaaatacgaggcaagactgtttacattcagtattcaaacaggcaagaaataattaacaacaagagtcctggagagactgctggaaatgtcttgcttgttactatagagggtgttcaagctagtgacgtcaccattgatgtgatccatatggtgagttctaaaatcctttcttttgaagtacttagatggctgtagtagtatggttaacctcaagtacgcctgttactttcttgattgccattgactgaaggaatccaagggagtctacctgacctgatccttgtaaatcaaagattttacatagatgttcatctcgtagtaacatattctgcatgaatcagcaggcccatgttaactggagaaaatgtcgttatcaacacctgcaatgggagagataccatgtttgttttgccgcctctgtcttctaactagtacattcaaagttcttatgaactcttatgtctcatcttgaggatgcaactttctaagtatcccccatcaacgcgcttatctccggtgtagggcacctcctgtttattcaagttattcatgaaaggttaaattccaaacctttagaccattagtatctctatggtgcttattttagatcattgtttggtgatattatacatttcagcctttttattttaacagtatgttgaatttcatccattgcttctctctcgctgacccttcccttttttctgtttgggtgagggataagcttcaagagtttatatccattgtttggaaatggtgtttatttttattatcaaatatctatcattgtgtgtttaactgcaggattttttttacatgtgccatgagattggtatgcacctaaaacaatctcccctttatctcctatgtatgatccttttttgtattcctttcaggttttctcggcctttgggtatgttcataaaatagccacctttgaaaaggctgcaggttttcaggcattgatccagtacactgatgcagatactgcttcagctgctagagaagccttagatggaaggagcatcccaagttacttgcttccagagcacgtgacatcctgctgcctgcggatttctttttctgcacataaggatttaaacatcaagtttcagtcaaaccgcagcagggattataataatccatatcttccaattaattattctgccatggatggtacattgcagcctgctgttggatctgacggaaggaaagtggaggctcaaggcaatgttcttcttgcatcaattgagaatatgcaatatgctgtttctgtagacgtgcttcatactgtgttctcatcatttggtacagtccagaaaattgctatttttgagaagaatgggggaacacaagctttgattcagtaccctgatgtaaatactgccgctgtagcgaaggaagcattggaagggcattgcatctacgatggcggctactgcacatggtgacaagagcagagattatacaattccagctggcgtaatccaaggggcgccacaaccacctggtatacaagccacgtcccctgggtggcaaggtaaccttcaagcagcagggccatatgccccacccggtgcccctcctcaaaatcacagtgccaatggacaagtgccgaactggactcctggcaattcagggtattccccagccccaggaacatatccaggccagatgtactcatctccggcacagtatgtagcatcagggagcttccttaatacctcagcggccactccgcctcagtatgcaacctcagggggcttccctaataccccatccaccgctccgtcacagtatgcagcatcaaggggcttccctaacaccacacctgccgcccctcctggtgctccatcacaaacgccgcacgcttcccagcagatgccgcatcagcatggaaatcattcaggaggaggcacgcccggaactagccaaccgccactgccagcatcatattaccgttaagttggatcttcttttgctattgtacttgacctgtgttttgaactgagtaatcatgtaatactgcaataacctgcggtctgtaactgtgtttagatgtgatagcagatggatacgagtgaggaatacatgaatatgtttggggttttcattcattttaaaaaacggatcagtgttggctcatggcgattactggcaagatcatgattgatgttggattggtggtaatgttctgaacagccgac

SEQ ID NO: 25518 - DNA, 7683 bp, Zea Mays
cctgaccgcccacccctgatcggggcccctcgccggagctctccacctgccagcgccggtgctcgagcgtgcgggcgagagagagagatagacggcgctcactcgttctgggggattttcccttcgagacagggccaaagggtaccggttaccaaacgaaaccgctccgtcctgtccgtcgcccctcggtccctctcccttcggttcgaccaaagtcaccaaacgtatcgcaaacaagctcctcgacccgagttcgagctcaactcggcggagatctccactcttcagcaaggcgcgggatgccggcgatggcaccggaggacgatgaagcactgtacgagatccaccggcacgcgtcgggatcccaccaagaagaataccaaggtgctgcgacaagttgtggtagctcagatgctggaggaggaggtgtcctctcctatctctccttgcaaggtgtgagcaaacttaaggaaaagtgggataggtacagggtgctggggaagagtaggcagaggaagaagggggatggcgtcgcactgtttgtctcaccaaatgcagaatatgtgtctgtaactgttgggaatcacatcatcatcttgaggaaagccgatggctatgcatcaccttgtggtgtttacacaaataatgaccgaatagcatttttcacaaatggggcttggctggaggctcaaggcgtttttggtgtggtggatgacctaagcacactttacttgatcaaagaaaatggggagttactagcaaggaggacatgtgatcagttgaagctatcttcttccattattgatctggttttgcaggatggtacaagcttacttaggccaggtttctacatttttacaagtgactgcttggttcatagatttgattacactgaagaacctgaggcatgtttatgcgaagttcccatatcaactaaagatgcaatgtcagctaggactatccagttacctcgaagtttatcgtgcattgattaccatcaacgtcactcgctatttgtcctagttggagattccaatgtttcatttagctccaatagttattctgcatgcagttggaaggggtattttgtcccctgaaggatcaaagaacctttgtttcatccccgaaaatcaggatctcgcctcagggaaagtatattgctacgttggatttgactggttttgtaaactttttttcacttgatggtgacttgcgcactgttccacttcaaactcttggaaaggctagacacctaattgatgttaaggacatcagttggtggacagataatgttcttatgttggtaagaaaagatggtagcattagcatgtacagcatcactgaagacaagatagtttccaatgatgacccggttttatctacaccaatattggagaaggcaaaggctactgaaggacatgcttttgttttgcaatctaggagatatggaacaaacactccagttaataagcggatggatagtgactcggaaccttgtctgctgagtggttctggggagcaccaacaaacagaaggggatgaaatgtcctggagtctgatatcattctccaaagttacagtagcagaaatgtactctgttctgataagagagaaacgatacaaggacgctttagattttgcttctagatacaatctagataaggatgaagttcttaaagcatgctggttgcactctgatgccaatactcatgagatagactcgtacttagcaaaaattaaagaccaagtatttgtattatcagaatgtgtaaacaaagttgggcctacagaagcagatttaagggctctactttcttttggactttgtataactgattgttacagattttctgagttagataacagcagtaagggctcaacatgggacagtcgcaccattaggcttcgtttattgcggcacatagacatgttagagacattcttgggcattaatatgggaaggtatgcagcaggagaatatagcaaattccgttcaatgccattggtggaaacagccatagcattagccgaaagtggcaaaattggggctttaaatcttatattcaagcgtcatccatatactgtctcttcagatattttacgtgttttgtctgctatcccagaaacccttgctgttcagacttatagtcagttgctgccagggaaatcccttcccagtgttgtcatattaagagctggtgattgggttgaatgtgaacagatggcttcatatataaacaattgccctgccgagttggacaaggtcgaagagatcaaaacggaaatacttgtaaagcactcaaaaggcttttcatggccttcagttgctgaactttgtgagtggtataagaacagagcaagggacattgactgcttaagtggacagctggaaaactctctggccatgatagagcttgcatgtcagaagggcattgtagagttgcagccattctttgatgatattaaatgcctctaccaggttgtatattctaatgaattgaatgagtttacaatgaatcttttgacatgggaagatctgcctgattatgaaaagttcaaaatcattctcaaaggagtcaaagaagatacagttgttcaacggctagaagaaaatgctatccgttttatgaagaaattatatgaacacaaacaagaatcctaccttgttagttggctgaaagaggtagctgctaaaaatgagcttttgatttgcttagctgtcattgaaaatggttgtggggaatcaccaatatatggtctcttcaaggatcttgctgagatgatagaaacctctgttcactgcatttatatgtgcagtgcaactaaccagtggaataccatgtcatcaatattatcaaagtcactctataaaacaaagagggagaaatcgttagtggctagtgaagaagactgcaatctgaaagatgctaagcatgctcttggttcttctatggtttcttatgaggagatgcaatgtgtctgtgctgatatcttatctggtctgggcaatgctccagaagatttttatcactatgattcagtacctgacaaacctaatgatgtcaaatatcttgatatattggagaagaggctaaaagttgctgaaggccatgtagaagtaggacggctctttgcttattatcaggtcccaaaatcaatgcatttcttccttagtgctcacttagatgagaagaatgtaaggcaaattatacggctgcttttatcgaaatttggcagacgtcaacctgttcgatcagacaatgagtgggctaacatgtggcgtgatttaaaactcttccaagaaaaggcatttccttttcttgattcagaatatatgctggccgaatttatcagagggctattgaaagctggtaaattttcgctagccaggaattatcttggaggaaccagtgcagtttctttatccacagagaaggctgaaaatcttgtgatacaagctgcaagggagtatttcttctcggcttcaactttatctgggaatgaaatttggaaagccagggaatgcctaaatttgttacctaatagcaaaaatgttcaagcagaaactgatataattgatgctcttactgttagacttccttatctaggggtgactatccttcctcttcagttcaggcaggtaaaggatcctatggatatcatccgcatggtgataacatgtcaagcaggtgcataccttcattttgaagagatcattgatgtcgctaaacttctgggattaagaagtgaagaggaagtagcggatgtggaggaggctattgccagagaagctgtggtaaatggtgatcttcaacttgcccttgatatctgtttaaatttaacaaaaaagagtcatggtgcagtgtgggatttatgtgctgcaattgctagaggccctccacttgacaatttggatactggtacccgtgaaaagctattgggtttcgctctcagccattgtgatgacgattctgttggggaattgttgaatgcttggaaggagcttcatgctcagggtacttttgagaaattaatgattacaaccgcaacaaatcctcccaatttcttgattgatggatcttcaatcacaccacttcctgtacaaagtgtgcaagacatacttgacctgagagatgacaatggccatgatagacgtagcgaccttgtgggaattgttaaagacatgctgtcaaaagtttgcttggacttttctaatggagacacacataattgggagtctatgttggaagaaaaccggaaattgttgtgctttggagcactggtattaccatggcttttgaaattgttcagtaatgaagcatgtgatggtgaaataatggatcatctcactaggagatgtcgattttcaacaaaagtaaaagcagcaaccagtatcatatattggttagttataaatggtttggcccccaatgataatataatcatgattcttgcaaagtctataatggagcctcccattgatgaagagtttgatgtacttggctgctcggttcttttgaatctcatggaccctttcaatggagtgaaaataatagaggaagagctaaaaagacgagaatcttatcaagaaattagcagcataatgagtgtaggaatgttatatagttccctcaataattctaagaaagagtgctccactcctgaacagaggagaaacctgttgcttcacaaatttcatgagaagttcacctcagccgataccgatgatttagaccaggttgatatggcaaatacaaccttctggagagaatggaaatcaaagttagaagaggataaacaactggctgatcaagcgcggatgctcaagcagatattacctgatatagacacatctcgattcttgtctggtgatgttaattatatcaaaatagtagtttactcctttgttaattctgtaaagatggagaaaaaacacatactcaaggaagcagtgcggatagctgaggcatatgggttgcaacgaactgaggtgcttttacgatttctcgcctgcagtcttgtgtctgaatactgggataacaatgatattctgaacgaaatttctgaattccgggaggatattgtcagctcagctaagggtgtgatcgatatgatatattcagatgtctatctggagatagatgggtataataaacaacgtctttcttacatttacggcattctttcagcatgtcattcatatctgaagaggaccaatgagatagaattgagatacccagtgcatgtgcatacccataagcttgaaccatttcagtactataaggtacttgaggaagagtgcaagaaagtctgcttcattgatggcttgaactttaaaaacattgctggactggataatctgaactttgagcatttcaatgacgaagtatgcaagaatatccatgcctccaccgtcactgctatagccgatatggtacagtctcttgtgagtatgtatgttgatgtactggccaagggactcatatcacaacaaggtgtttacaagcactatgttctggggttgctggcatcacttgaaggccgcagtgaagcacaatcgaacaacacagattatgaaaagttgcaggcttccctatgcgaatttgagttgaactatgatagttgcagggagtacatccaagctcttccagccacagatatttcatatattgtaagaaggtattgcaccctttgctttccatctaacttagcacgaagccatccacaggaaccttcatggaggaaacctcttgccacgctactagaattttggtctaaagttgttgatgacataccgggggattcaattgatgcttgctcatatggaagaacagactacttaaattcaaataggttatctctgtgcatgagagctttcaggcagctattaataattgatgagatagcactgcaccaaggttgggatgccatttccatgtatgtaaaagattgccttagaaatggaaagatgatggaaacaccatgcttttgtcgagctatgattctatcaggctgcagttttgaatctgtagttgaagtatactttggaggacaaggacagttagggagtgagaatgcagatccaagcaattatttggacctcttagaactttataatgctgctacagaaaagtgtttgtcggatttgagtgaggaatcttgcgaatatcgaatattgcttcataatttgctgtcatctttgagccggtcaacgggaaaacatgctggtgctctagaaatggtcagatctggtgtttgggggaagttaatccgctattcggaagacatgcagctagagagccaattacgagtctatgcactacagctgatgcaatgtatcacaggaagaaaccttaaatctcttccaaatgaaatggtgtgtcaggttgagccatgggaatcatggtatgagcatggagcgggtgctgccatagctgatgagagtatcaactcctctagcagcatcacagggactcttgtcgcacttagatctactcagatggtcgctgcagttctgcctgacgctaatatcactccagaaaacctagcaactcttgactctgcagtatcttgttttttaaaattgtcagaacgtgcttctggtgtgagcgttgctgtttttgaagcagtgctagaagagtgggagcaattgttctcccccaaagaagagcatgttgcacctcatgaatcaccaaaagaaacaagtgactggagtgatggatgggatgatggctgggaggcgctaccggaagagttggagagtccaaagaataaacaagagggtgtgttgttatctgtgcatcccctccacagttgctggatggagattatcagaaaacgtgttgaacttggtgagctgcacaaggtacttgaacttctagaccgagcatctttgaaacacagcgtgttcctagaggaagaagaagcacacagcttggttgaacttgtatctgctctggactgcttcatggcccttaaaactgtgttgctactcccatatgaatctctgagactgcagtgcctgcagatggtggaggtgaaaatgagggaaggaatcgtgtccacctcatcaaatgctgatgatcaggagctccttgccttggttctttcctctggaactatgcagaagatcatcacagaagaggcatactctaaatttttctcttacatatgccatcttgtcgggcaccttgcaaggtcattccagactgatctcctcgtacaatggaacgaagcaacatctaagatcaacagatctttactgttcgctagagttctgtttccatgttttgtatctgaactggtcctcggagggcagtatcttctggctgggttcgtcatctcgagatggatgcacacacatccatctctgggcctgatggatatcaccgagaccagtgtgcgatgcttccttcaaggccaggttgcccaacttgatgaggtgggagggagcgatgctgctctcactgacggtgaagtttgtgtaaggcacacaatctccaccctacagccgaaacttgtttctcttctgcagtctgcattagctctttcgaacaaagagttgtaggcaaagtcctgtgtagttaacttttacactcttgctgtactaccggtgtacctgtaacataaaatgtttttttagataatggtaaaagtgaatggtggaagatttcatattgttat

SEQ ID NO: 25519 - DNA, 2780 bp, Zea Mays
atgtccatatccattccacttccacccatccccgtggcttctgtctgctgcgaccctgctccactccgtctgcatcacctgtcacgatgtgtgttgttatctttattggaacaaatggccagacgtatttcatcacggcttcacttgttacaagcatccagaatttcccaaagagcaggggcccaacagtgggcatcctcaaaggatttatgggcctaactagcgccattctgacacaagtttatacagtgatgcacacaccagaccatgctgcgcttatcttcatggttgctgttggtccgtcgctggttgccattggcttgatgtttgttattaggcctgttggtggtcacaggcagatacggccatctgacaagaacagcttcatgttcatctacactgtatgcttgctcctcgcctcataccttgtcggtgctatgcttgtccaagatttcctgcaaccaagctatgatgtggttgtttttctgactgtgattctgttcgtcctccttatttcaccaatcgcaatccctgtgattgtgtcgttcatgccggaaaaagctcaacatctcatggaagatgctctcctatctgaaccattgacaggagaggcaagcagttcacgacaaaaggaggatcaaccagaggtcattttaagtgaggtagaagaggagaagtctaaggaaactgattcattgccgccatctgaaaggagaaagaggattgcggaattgcaggccaagctagtggaagcagcggcaagaggtggggttagaatcaaaagaaggccacaccgaggggataacttcaccctgatgcaggcattggtgaaggctgatttttggcttatttggctatcacttttgcttgggtcgggatcagggctgacagtgattgataacctgggtcagatgagccaggctattggttataaaaatgcacatatctttgtgtcactggtgagcatatggaactttcttggtcgtgttggaggtggctacttctctgagatcattgtcagggaacgtacatacccaaggcacatagcattggcagttgctcagatcgtgatggctgctgggcatttcctctttgctatggcttggcctggaactatgtacattgcgagcttgctggttggacttggatatggagctcactgggctattgtgccagctgctgtctccgagctttttggtgtaaaacactttggtgcgatgtacaattttctcatactagcgaaccccgcaggatccctcatcttctcagagctaattgtcagcaacctctatgaacatgaagctgagaaacaagctagccaacaccagatgtcagcattgctgtctccacgattgcttcgtgatactggctttcttgcagatgatgcactcaagtgtgaagggcctgcttgtttctttttcagctctctgattatgtcggtgttctgtgctgttgccgctgggttgagcctcctcgtcgttcaaaggaccagacaagtttatcctcgcctctacagttctgtccggacttgagattctccaattctgcatggatgggaagctcaaatcctcgtattctatgtccgtttattcttgcatacatatgcacaaagataagtatgtgaataaattctcaaatcttttcctaagctggtattgtaaaaacagatattcttgaatggattgtcccttgtgacttgcgtatggattctggcacttgctgtcctgaaaagaaactatccctctccttttttttgaagcaattactgtatggagttcctacaatatttttctattaaatatgggtatgtacaagtgtaagtattcaaattacaaggaaatcaactataaacatgatttaattttggctgctatttggggttttactctatgacaaagaatcatttcttttacaaacatttctttgcatattgtcgccatgggggtttattctcaaagatccatccatttctgcattttcatatgcaccaaaccatgatgatgataatctccatcctccaagttttcgttagttgcgcaggcatatgttgcacagctagaaattgattggaagtgcgcggtggtacaaccctatcagttgccagcatctttctgtataattgcatttcaggaagagatgcgagatagtttcttccttctggcgaatgcagttttcacatgtatacgagtcaagttccatgttcctccttttgagcatagatcttatgttcaatctatttttcaggaaaagccagaagaataccttgtgtttcggttgacattttgttttctacaaccagacataggcggggtggactgcctcgttcccagtttataagctttcggcgctgagtattggactgtcccccaatgtatacccatttgtcatgatggtcagatagttgttgtctttataaggattcaaacaggatttagtattgctcataagctatttctgacattggggtgtgaaacaaattgtgagggtattccacatcttttgcatgtattattgtaatatccttattcctgacaaaagaaaaaagctcagggaaagcatattcaggcactcggttgtctcactagtccaaccatagttgtttagtcctgtcgtcctctatcatcaccctatagaaccccttgaaagtgttcattgtctttaatacatatttccaccagaaagatcacacctcccttgagaaaggtattgttccacccaagtaatgcttgcttgttccaaacgatgtttacccacggtatattgatctgttgaagaatttg

SEQ ID NO: 25520 - DNA, 1862 bp, Zea Mays
atgaataaagacatccttgtagcagccgatgaccacgaaggtggtctctgcctgcccaaatcaagcgctcgcctgactcaggagtcaggagtcgggtacaacaaggcgtcatcactatccttttctgctgaatccagaagacaaatacactactgccgtgcccccctcccttctctctctcttcgccgcagcgtcagccgacggcaaaaccctagatctctctccctcttaaaccctctcaacaagtgcgggaggatgtcagagccgtccaaggtaatccacatccgcaacgtcgggcacgagattgccgagtctgatctccttcagctgctgcagccgttcggcatggtctccaagatcgtcatgttgcgtgccaagaaccaagctcttctgcagatggaagacctccatgcttccgtgagcgcgctgcaatattacacttctgttcaacctagcataaggggaaggaatgtatacatgcagttctcatctcaccaagagcttaccactgaccagagctctcatggaaggaattctgatcaggttttcaagctcttattcagtatcactcgcgccaagaagctgtggaagcatttggttctttgcatggaaggaacatatacgatggttgctgccaactagatattcaatattcaaatctcagtgaactgcaagtccactacaacaacgaccgatctagagatttcacaaatccatcgttgcctacagaacaacgtcctagggcctctcagcaaggttatcttgacccagctaatctctatgccttccaacaagctggagcttcatatgcacagatggggagggttgcaatgattgcggctgcatttggtggaactttacctcatggagtgactggtaccaatgaacggtgcacactcatcgtcagtaatctgaatactgataaaattgatgaggataagcttttcaatctgttttccttgtatggaaacatagtacgaatcaagatactgcgtaacaaaccagatcatgcacttgttgagatggctgatgggttgcaggcagagctagctgtgcattatttgaaggggtctatactatttgggaagaaactggaagttaactactcaaagtatcctaacatcacacctgctcctgacgcccacgactacttaaactcaagcataaaccggttcaacagcaacgtggtcaagaactaccgacattgctgctctccaacgaagatgatccacatttctgccctccctcaagatatctctgaggaagcaatcctgaaccatgtgtctgagcacggcactgttctcaacacgaagctattcgaggtgaatggcaagaggcaggctctcattttgttcaagagcgaagaggaggctaccgaggccctcgtgtcaaagcatgccagcacgctcgagggtaacacgatccggatctctttctcccagatgcagagtatataagccacctcaagggaaagcccctgccgtcctcactcgccccacttcgagctctatttaggaagcatttcagactaagatgtgaatcctgtgcaccattctccaagactgatgctgtctgagctgtacctcccctgaccttgttttttttttcacgcaacactggactttcaccaaaaggtttgtgtttctttccaaatcctgttggttaggatatcatttactccttaatcttcatgtcctgacattctaagttggaaggcctgttaattgcgtgtgaattatattatccttttgcctgtttggcatgtttaatgtaccctctagtgcagctgaaacttacctgcaactgcgattgcgattgacttattatgagcaattgcgatggtaggctaggtgttacaagag

SEQ ID NO: 25521 - DNA, 4788 bp, Zea Mays
tttctcttctcctttggggctctgaatgaagactgaagaaatcgaaagagaggaaagctacgcctgagtcggggaacgcctacgaagcagacaagctaggttttactgcttcattgagcacaaagatccgctgacctcttgctcttggtaaaaatccaacctttcttgtattgttttcttcctgggaaaacctccttgtggtgcataaacttcgtagtacactctgccatttctggagaggaagctgagaactactatccatatctggcacgacccttgtcaagaaccatggctgttcacatgccatgaagctgcttgaactggaggcacctaaatgctgtggattgttcctatgcagatgattggatcagtggtttcaggcttcggggggttcgatcagatgttgtatgaataatagcaggattgcttgagagactatagtttgggtactgtttgcttctgtatttactggtacggtttcctactgatctgcggctgcgcaggaaggcattctcttttttgccgtaccatggatgcaccggatgttcaacagagcatgggatataaggagtccaggggtggtatgcctaagtttttccatgcccttggaccagcactcctgatttcaatgggttacattgatctcgggaagtgggtggcagccgttgaagctggttcttgttttggattcgacctggtgttgctggctctccttttcaatttcactgccattgtatgtcagtaccttgctgcttgcattggcactgtcacagggaagaatcttgcagagatatgccaccaagagtacaaccagccaacatgtatattccttggtgttcaagctggattgtctttgttgacgtcagagctgactatgatttttggcatagcactcggattcaacctcctgtttgaatatgatgatctcatcacagggatatgctttgcaacagtgatggaagggacaataaatgcctgcatagcaggatttgcacttcttagttatgtgcttggcttattggttagccagccacaaattcctctcacgatgaatgtaatattccccaagatcagtggtgagagtgcttactctctgatggcgcttcttggtgcaaacataatggcacacaacttctacattcattcatcagttgtccagggtcagaaaaagtcatctgcagttggtcttggagccttatttcacgaccaccttttttcaatattgttcatttttactggaatctttatggtgaactatgttctaatgaactctgcagcagcggaatctactaatactcttctcattaccttccaagatgttgtagagctaatgaatcagatatttgtaaaccctctggcaccaactatatttttagtggttcttctcttctccagccacatcatctcgctgacatctgctatcggtagccaagtgatttcacaccatttattcggtataaaccttcctctttctggacatcgtctcctactgaaggtttttgccatagttcctactctgtactgggcgaaagttgcaggagctgaagggatataccaattattaattatatgccagattattcaagccatgcttcttccatcttcagtcgtcccactttttcgtgttgcttcatcaagatcaataatgggagcccatagagtgtctttgcatctggagatactggtttttcttgcatttctccttatgctattttcaaatatcatatttgtggcagaaatgctatttggcgacagtgggtggatgaacaatctgaaaggatatactggaagccctgtggtgctcccatataccgttttagttttagttgcacttatatctgtggctttttcactgtacctggctgttacaccattgagatctggaagtcatgaagctgaatcccatgaatggtctgtgcattctcagagagaactcttgaatacttctcaagaaagggaagatgttaaggtggacaatgttacatatgaggaagatcaaagatcagatgttgtcccttctcccagggatgtgcctgacagccatccggaactggccttggactatattgatacttctgacactgctgtagaatctgatcacgactctcaacaatctactgcttatgcatccactgctcctgaaacctgctcctccccgtcgtttactcgcgaggagtcaaaatcagttgttgcagtcaactggccggagcctttggagaaggttcctacttctactgtgatggaggaaagcacagtagaaaatgtggtctctaggatcacgactgaaagagatgttttagtagaaacagatgttgtctcgggcaaggataaggaagatatccgtactttggagtctgagaagtcaattgttgatagcaccccatatgtgtctgatgacggtccgccatcccttactttcagcaggggaaagggctcagatgcaggaaatggcagtggtagtctctcaaggttatctggtttgggccgtgcagcaaggagacagctagctgctactcttgatgagttctgggggcatctgtttgattaccatggtaagctcactcaagaagctagcaccaaaaagtttggtatcttgcttgggatagaccttagaacacctagcacatctgtaagaacggataaacaagctgctgaaatacttaagagcccactggtgagagactcaatgcggggggcagcttttttgtcaagctcagtggacatgatgtcccctaagaatgaaacgtcgaatttggaacttgcatatgggcttcagaggggacctggcatgggattgtcaagctggtctcagggtatgcagctaccaaatacacagctgcagagctcaagcaatagcctacttgagcagagtgcaagattaaactcaaattttagttcatcttattcagacaacaatcagttctaccaacctgcaacaattcatggataccagctcacatcttacctgaaacagatgaatgccagcccaagcctttactctagcatgccgctggacccacaacggcttccaaaatcatctgtgtctgctgtgccaaactatgctgattccatgatgcatgctcgtaatcataacctgcttgcttcactgggtggtactactacacagcttcctgcaacatcccgcgtaggctcaatgatgcctgaaagatcgtattatgatccttccagcgttgatgggaatgaaaacgctggttcacctgcttactcaaaaaagtaccacagctcacctgatatgtctggaataatcgctgcaagtagagctgcactcttgaatgaagcaaagttgggtgctgccattggaccacagtcatacctcagcaggctggcggcagaaagatctcaatatgcaagctcaacagccaggcccgcggctccattagcatttgacgagctttcacctcctaagctccagagtgatatcttctcggcgcagtcaagcatgagaccaagtgctagatccctttgggctaagcaaccatttgagcaattgttcggcatgtcaagtgcagagctcagtaaaggtgacttcaatcttccaggcagatcaggtggcgtggccaaggatgatttctcttataaggaatctgagacgaagcttcttcagtccctcaggctctgcatcatgaagctccttaagctagagggatcagggtggctgttcaagcaaaatggtggttgtgatgaagatctaatcgaccgagtcgctgcagccgagaagctattgatgcaagggactgccgagaatcaactgctgcttcatggtggtgatctccagcaacattcttccgaccaggccggcatccagtacatgcgcacgcttcccaactgcggggaggactgtgtttggcgcgcgtcactcgtcgttagtttcggtgtctggtgtgtccgccgagtgctggacatgtctctggtggaaagcaggccagaactttggggcaagtatacctatgtccttaaccgtcttcaggggatcttggaccctgcgttctccaagcctcggggtgctctgacaatatgcacctgccttcagaaagacaccagagtgcgcaatagcccaccccacagtgggctaacagccatgggcccggtccccacaccgatccggggcgccttcacgaccgcaggcgtggttctggagatgatcaaggacgtggaggctgcggtctcaggccgcaagggcaggagcggcacggcggcgggcgacgtcgccttccccaaggggaaggagaacctggcctccgtgctgaagcggtacaagcggcggctcgccagcaagggccagtagcgcgcgggtgtcagacaggcaggcgatcgcaagcaatgttaggaggagcctgactattgttctccaggggggctgccactggcgccggcctccctgagccctggattttttcgttgcacgacgttcctagggaccggtggttgcccgatggtcgtcttggtcccttccagcaggttttttttttccttccctctttctgttggtttctttttgttggctttgtgatgttttgtaaggggcaactagggtatgtgctcagaaggactcaagatgtacacgcgaagatgtactagtctgctgatgcagcgttgtaaagtccacactctgcaggttaaccctttttggggccgtcaagtgttagtgcgtgccctatgtatgttaatcacccctgcagagaggttgcgaatactgaactactcacagacctgcacctgtcgagatcgtttgtaatatccgacgtcttgttcagaattgaaaaacaa

SEQ ID NO: 25522 - DNA, 2651 bp, Zea Mays
atagaaatataatgtagctttagagaagaccaccggcccaccgccatgcagaatttatgttctctatatatgttacgaatacagcaactggacgctgcatacgtgagctccctctcagggaacagttagaaaggctaagatcagagcatctccgtgtctccacaacacatcctggattcgcaattattgaggtgcctccactataaaaggccaaccatcctcaaggaatgaacacagccagccagcaagcaagcagagaacaaggataacacagcaactgaaaaccttattaccaagaacaaacaactacaagaggctttgcaagttcacagaggcagctgttcactgcgaatgaacaaccagaggaagcctggagactggaactgcaagaactgccagcatctcaacttcagccgccgtgactactgccagcgttgccgtgatccacgccctgacttgcagttcggcgacggctatagcacggttggtgtgctgacctccctggacatccgcccaggtgactggtactgcagctgcggctaccacaacttcgccagccgcagcagctgcttcaagtgcggcacgatcgtcagagacttcccagcggggcaaggcgcagccggtgctgagggtgactttgctggtggacgcgacagcgccgcagtccgtgctgggtggaaagctggcgactggatctgcacgaggcctggttgcaacgtacacaactttgcgagcaggatggagtgctataggtgcaatgcaccaagggaggcagtttcagtttttaacaaatgggctggtaattccggaggcccatgtacaattggcccatgggtggcgcgtatagcccactaccacacaagtccacagcccgtcgttctggagtctggacccacatggcatggacacacgccgcctccgtccaatgatccaattcaatccaactacctaccttcactgcactgcactgcacctacccggctacccctgcggccttgccggggagtcggggacggggaaggaaacggcaacgagcctgcagctccagctaccccgaaaccccgtccaacgtccatggctatccacctccgggcccacgccttcgcggccaacccgctgcgtggcgtctccgccgccaccacctccatgtccccctccgcggccgccgaggcactccgctacctcctcgaccccagctccgccgccgccgccgccaatcccagccagtacctctccaagatccttcctttccgccggggccgcccgctcgcgcgctccacggaccctcccgcggtgccggcctggcgcctcgcgtggctcccgccgtcccgcgtccccggggtggccctggatgccttcgtcttcctgggcgcgctcgtcgagggggacggcaaggaagcctccgcgtactgggcggtcgacgtcagcgagggcgagggagccagggttggtgggccggcggacggggatgggccgtcggcgtttgtggacttgaggacgctcatggtggccacggactggagcgacaaggacgccatggcggagctcgccatcgcaggacatgctcgagcactgctagaatggcacagcacggcaaaattttgtggagcttgtggagcaaaggctgtacctactgaagccgggaggcgtaagcagtgcagcaacgattcctgcaagaagaggatataccctagaattgatccggttgtgatcatgttggtcattgataaagaaaatgatcgggcactcttaagccgccagtcaagatttgtgcctcgtatgtggagttgtcttgctggtttcatagagccaggagaaagcctggaagaggcagtgagacgagaaacatgggaggaaactggtatcgaagttgggcaagtcgtttatcacagttctcaaccatggcctgttgggccaaatactatgccgtgtcaactgatggtgggcttctttgcttatgctaaatcattggagataaacgtggacaagcaggagcttgaagatgcccagtggcacaaccgcgaagacgtcaagaaagcgttgacgtttgctgaatacgagaaagcccagagaacaagcgctgccaaggtcgatcagatctgcaagggcgctgagaaagggcagaacccctctgccgacttcaaagttggaagcggcgagcctgctccaatgtttgtcccaggaccctacgccattgctcaccaccttatctcgtcgtgggctttcgagggagcaccgaagctgcctagttcattctcaaacctataagcctggaccctggtgttcagacagacgatgacaggaactggacccctgtgctgcgggctcatggatcacctgtgttgccgtgagtgtaattctgatagtgtgtgtccgttgccggttgtgataaaataaaatagcaatagagtactgggtacagaagacttgccggaggatttggcatcaatggacatgtatatccattgcctttttacatgttgatcctctttgtatcacacgtaatgttgcatacttgcatagatacaacaatgatatacatcacacagtgtactcatgcatttatacatgtattcagataactggattcaatagtagagtctttgtctgtctctctctctttttctcacatgtggtttgataattgctac

SEQ ID NO: 25523 - DNA, 2456 bp, Zea Mays
cgtcgatgtcgaaaactccttccagaccaagcttcgtctgctgtcggcttgcaccagtcctcacggcccacgtcgagggagacgaagggataggaggcggaggcggaggttgcaaaaaatggccgggagcatgcaggcggtggacccagcgggccggataagcgcgttgctcgcattgcgccagctcctcgccatgctctagccgctggccctgctccgccctttcattggcgcgcgtggccggggcgtccgatgttgcggcctccgtgttggggctagcgggaaaaggggaaggcggcggcgtcagcggttctacgggtgccggccgtctcgcccatggtcgccacacgaaggaagatagccacgcgccggacgcaggaggccaggcgggtgtacgatctgatccccaggatgcagacctggacatgccatgcgcccatgccttcttggtggttggtttgttcttcagatgtagaaagctacccgaaatccattgaactttggcagtctttttcatggtttcctgctcctatttctatggcggcctcgtcttgtttgtcagtcaagcaacaaccatgtggcacagattaataattcaattcaaggaaatataagtactgttgtatgccattctccagtcaattctatagcacggagggtgcttggttcgtttatccgaaatttgtcaggctcagctcaggctccgctcgaagcactgatgacctacatgatgattggtgccacacgccatgccacaacctttgtgtctccacggattgttggattggtcttggcctcttcagtattcttgcagcatgcatgtgggtagtatcatggaactgctgttgacgccagagtccgatcttggttatatggtcactcacatatcacttaacactgatggttcatcactgctgcttgttggatcacataacttaaatatcatgtatgtacatgagaggatatctgaagatggggatacaatcatatgcagatcctacccagtgacagtgatggcataaaagttctccaggcatcttggcatccctttagcaataaccattttgcagttttgacatcagatgctgttttcaggttatttgatctttcatccgatttagaacagccagagcagggattttatttgcagccaattgtacctgggaaatgtcaaaatgcttcagcgatttgtccagtgggtttctcttatgggagcgatcatctatgggatagattttcggttttcatcttattcagtgatggttcaatttttgtcctctgcccagttgttccatttggaagtgactatagcaagaagcatattcaggaaatatatgaagatgttaatgcatttggattgaaatcttcaaatccaaatgttgtcactaattcacatttggccatagcttggttggaggcaacatttcctgacctgttacatcaatcaacagataccagttttctgatgtcaaaagctcatgcatatgcgccattagatgattctctaacattacagtttgtgaggaaagtaatgaatctgaaagcaagagcagcagttgtgaaggaaaagctgtaggttttatgtacagttctgctggcaaagattcagttcttgtgactgcctggggtagtgggctgcttcaggttgatgctcttgcagatgaaattcaaccgcggtggaacattggggttccttcgcgtcttaatgtcgattcacatggacaaataaataatgttgccatgatatgtgactccaattcgcaagatccattggcgttgagatcgcatcgaccatctagtacaggatcaaacgtgaagagcaacatagaagctgtttggatgggacactctcctcctttgctaaggctcgcaattgtggatttggcattaccaaaaactcctaatgataactctctgtcattgtttgctgatccccttgttccagagagattttattgtgcgcatggtggggggcttgacatggtcacactgcacttcctaccattttcataccctgaaatgtcttcgacaccaccctctgtgcatcctgtcctcactacagggaacagcgaaacaagctcaccttttctttctggatttgttaccatagctgatgcatatggtcatgtacagttagctggcatcacatgcttgggtgagtgctttgtggtggagatgaagggttggaaggaaccggcacctcttcagcttgacttagaaagcaaaatcgtcaaggatgtggagcctcctgcaactggaatgatcagcaaagaacttattgctggtccagacccacccatacttccatcatcttcaagcctgaaatcgttgaccccagactctattgaaggaaaatctacacttcaccactatattaaggtcttccatgagtactatgtggagtacggacacaagggatgaaaggaaacacgctgaccaagaggtcaatttaatga

SEQ ID NO: 25524 - DNA, 3217 bp, Zea Mays
ctgtatcaccccacctcgtctcgtcgcctaccctcccaacccgcattcgcggcgcgggcgccttggaaccctagtcacccgcgccccccctccactgtccactcaacccccgtcccctccctcggcggcggcggcatcggcgtcaaccaagatgtcgggcggcttcttccgggggacgtccgctgaccaggacacgcgcttctcgaataagcaagccaagctgctcaagacgcaaaagttcgcgcccgagcttgaccatctggtggatacgtcaaaggtaaagatggacgtgatgaagccctggattgctaagcgggtcactgagctccttgggttcgaggacgaagttctcatcaacttcatttatggcctcctcgaggagaaggaagccgatggaaagaagattcagatccagctgacagggttcatggagaagaacacagtgaagttcatgagggagctctggaccctccttctcagtgcacagcagaatgccagtggggtgcctcaacagtttctggatgaaaaagaggctgagatacagcagaaaaaggcagaggatgataggattgcacaggagattcaaaagaagcgagagatggaggaaaatgattcagaactggtaaagaacaaagtgatggatggggatgctggtaactcaagatcctatggcgatccagttggctctgctttaaatagtacaaatttcaataccgaggaagaaaagaacaatgatttcaagcgtagcttaagagcaaagaacaggggaagtcgcagatccaggagcatatctttgtcgccacgtgctaggcaaagatccatctctcctagaaataattctcgttctcctcctaggcgttcccactctattgatagacaccatagatcatcatggcgttcaacttcacctagacgttctatttctccccgaaggcattctccaagaagtaccccttcaatttctagaaggagatcaccttactcaaggagagggtcgccttccttgtcaagatatccatccccatttacacgccggagatctcctcttcgcagaaaatcaccatcatctgggccactaaggtcactttctcctcgccatcgccgctcaccagctcgtgtaccaaggaggtcaccatctcctgcaagtcgaaggtctcctgttcgacgcagattctcaccaggtagacgtacatctccatctccagtaaggcgcaggccaaggtctccatcacctgggaggcgtaggccaaggtctccatcacctgggaggcgtaggccaaggtccccatccccaagaaggcgtaggccaaggtccccatccccaggaaggcgcaggccacggtccccatccccaggaaggcgcaggctacggtccccatctccaggaaggcgcaggccacggtccccatccccaggaaggcgcaggccacggtccccatccccaggaaggcgcaggccacggtccccatccccaggaagacgcagaccacgatccccatcgcctggaaggcgcaggccatggtctcggtctccaataagacgtcagtccccatctccaaaacgccagaggacatcaccaagttcaccgaagactcgttctgcaaatcgacctttatcgccagagggaaggaggagtaccagtccgtacaatagcaggagtcctaatcgctctcgccagagtttaagtaaagatactgagaaagaaacaaatggcaccccttccgttaaggacagagttgtgcactcaagggggcaagaacaaaaatcagatgataataatagggatggtgcaaggattgttggcaataattccccagattctgagcatagattgtcaaagtccttgaggcctcctaactatgaagaaaggaattccacacgtgacagttcttacaagaactcagacaaacctatacctagtcagggcagcacagatacaagtggagatgaggaacacagtcgtgctagagaaaatgcccggaaagcaaattcatgtcgtaggaaaacaaaggatctctcggcaggtctgcaacctaagaaaatcagtgctggtgactcaagccccagagacaaatctccattcattttacaacagagtggcaaggtcgtccaaaagaaacaccccgatcaattgtcagaatcatcagaagatgagcttgctggtagaagaacaaagcatcaaactgattcacctgatgattctcgtcgaaaacagcattccccgactagaattgaaaatgatgagtcttattcaaagggtggtagaaacagtgagcatgtcatgagaggtttgcgtgatgattctgatgatgctattgatacaaagaaatatttgtctaaagtcaatgaggactcccaatcggacgatggaagtcctttgaaaaaaactaagaaaaaaacagatggtaataggcacattgattctggtagttcagggtctgaagagcctgacaaacatagaacccactcggagaagcgaaggcacaagaaaactcataagcataagaaacagtatgatgatagttccgagtctgattctgagccagatggcaaagacgcaaagaggaggaggaggaaggaagagaagaggctaagaaaagaggaaagacgtcgaagacgtgaagaacgacaccgcagaagggcagaacgccatgccagcaaacgaaaattaaagaacaccgatactgttacaatgccttcagactctgagaaggatcgggattctgattcagatggtgatgttaggaaaagagtttcaaacgctggaagagaagagtctgatcagaagaaactagaaattgaactccgtgagaaggcccttgaatctcttagagcaaagaaagccatcaacaactagactgagaatttttttgtgacacatttgagtttctattttcaagtggaagtgtccttatatgatactatttaatgttctgtgtgtttatgtggcagttgatctgatgattcctgagctgtttacttgatgcagctgaattcaggcttagcagccagttatctgattagctccatgtgcacaagctttttatgttcctcaggatgatatgatcaacgcctcaacaaaaacaagttggtaacatattgattggaaaatctgctaaagcattccttcttagtttcaggcgctggaaatttctggtgtgatgtcacgttaactcgctgggtggtgttctaaccagaatttggaactgagtctgaa

SEQ ID NO: 25525 - DNA, 750 bp, Zea Mays
cttttcatttcagagctgtggtagactggtaggttggtagctgttactgaaaaactaagagaaggcaggacggggaaaggagatggagctcaacagcatcccctatattgcgtcgtggtcttcctcctcgagctgcttctactacagctacagtcgctgcgcctgcagaggtacaagagatgggaagctggtaacaaaagcttctgcagctggtcgtaagcgtgctgctgattcagtatgttcacaactctctgagcagggaactgaagattccatttcaggtcctagatcttcctggcgtataaggaggagagaccttgcttctgccattttactcccttttctgattcctcgtgttaacatctctatcgcggctgagatatacgacgcatcaattattcgaagtggtgtgaggagtgttttaaccaagggcaaggctgctggtgtgcttcggttggttttccatgatgcagggacttttgaaattggggacggatcaggtggcatgaatggctctataatttatgaagttgacaggcctgaaaacattggcctaaatagatccataaagatactaagaaaagcaaaagaaggaatcgacaacgttcagaaagtgtcgtgggcggatctgattgccgtggctggcgctgaggcagttgcgctctgtggcgggcctgagattccagtaaggctaggaagagtagattctagtgctgaccctagtggaaaagttcctgaagaaacattgga

SEQ ID NO: 25526 - DNA, 464 bp, Zea Mays
cggtcaccacacaacacaacacaccatctgtcgactggtagcagagagaagagatagaccgagagagggagggagagagagaacctgacactgagactgaagcatcggcgctagctagcttgggcagcaacatcacgatgtcgtccaactgcggcgaggatgagaaggagctggtgtgcgtgaccggcgccggcggcttcatcggctcgtgggtggtgaatgagctgctccagcggggttaccgcgtcaggggaaccgcgagggaccctgcggacagcaagaacgcgcacctgctggctctggagggagccaaggagcgcctcaccctgtgccgcgccgacgtcctcgaccgcgcctccctgcgcgccgccttcgccggctgccacggcgtcttccacgtcgcctccccggtgtccaacgacccgactcagtgctcacgcctcaccacgccgcttgcgtccgcg

SEQ ID NO: 25527 - DNA, 2004 bp, Zea Mays
agcgcggcctcgaggcggacccgctgggtctggttcagcgagaggccgcgcttcaagagctccagtccgttgcgcccgccgctgccgtcaccgtcgcggacaccattcccgtcaatcaagaggacaacatcctcaaggggcatgggacgtcggaccaggacggggaggtggttgcgacgctctgcggggtggtggagcgggtcaacaagctggtctacgtccgcactcttcgcgcgagctgcagattctcgatggagatgaatggggttctgcaagccgcggatgccaagtactgggtttacaagggtgagggcgccgcgaatctcatcctcagctacaccggctcatcccctactatgcttggcaaggtattgcgggtcaagaagcttctaaatgacaagtcacagctgccaccaagttgtatggtcttctcaagtcatgagcaactcctgtggggccatattccagaactggttgagtctgtcaaacaagattgcttggctcaagcctatgctgtacatgttatgagccaacatctgggtgccaatcatgtcgatggtggggttcatgtacgtgtttctagggattttctagagcttgttgaaaagaatgttcttagcagccgtcctccttggagagtaaatgcaagttcaattgatatcactgctgatgccgctcttctaatagcagaccactctttattctctggtactccaaagggtagcagctgcatagctgtagagataaaggccaaatgtgggtttgtgccatcatcagaatatatatcaaaagataattctatcaagaaacaagtaacgagatataaaatgcatcagcacctcaaatttcatcagggtgagatatcgaagactagtgaatacaatcctcttgatctattttctgagtcgaaagaaagaataagcatggccatcaagtcatttttctcaactcctcagaacaacttcaggatttttgtcaatggatctttagcttttggtggcatgggaggtggtgcagatagtgttcatcctgctgacactgataagtgcattaaagatctcagcaaggtcagtggcctggaactccctgacttcactgagctcctgtcagagacaattttcaaatctggggtattgggcaaactgttgaccactcaaaagctggatgatcatgacattgaaggggcaattcatctgtactacaacataatttctcagccttgtttagtctgcaaaaacctaactgatgtagagctattgcggaagtacacactcttgcattctcttccgttggacaagagcttgaagattgtcagaaacttcctcatttctgctactgcaaaggactgtagcctgatgatcagctttcggccaagagagaatggaagtacagattctgagtatgattcagtgtttcttgaatcagcgaagcgaacctatgagtacaagacatatttcgttgatctggatgtgaaacctctggacaagatggtacattattttaaactggatcagaggatagtcaattcctacacaagatatggggaggtcttgccacctccaaagggcaagtaataccaaagacacttcggcgattcagctccaacaatgaggagcctctcttcttactatatacgtctggactatggagaagggtgcatcagagagctccagcccactacgcccttaggttctgtgcatatattgttgtatctcttaactgtttgatgatatggaatattcttttcccaatatggtaccgagcctttcttgagcctcctcctcgctgccgctcttcttcggaatgccgcggcatttgccctcccctcatgtttggcgagccggctgcacgtacagcacgacagtgagtgccagggacatgcacatcatggcgacggtttaagcttgtggacactcagcagatagggtgatgaccgccattccctgtatgacagacacgatgtgcatgcaacatgatcagccattcgatgcatttgatttgatg

SEQ ID NO: 25528 - DNA, 623 bp, Zea Mays
atttaaaacattggtatatacagtgcggatagcgtgacagcgtcaacgccagccatggcggcggctcagtcctccaccgattcgttggctccgcacctccgccgccgtccgcgccgcctcgtattcgaccgccgctacggctggatctttgacgaatggacgcaccccgccgaccaagccctctccggcggccgcggaatgttctgtgcgctgacgatggcgcggtcgctggtgagcgctgcggcgtgctcgagttctggaacgccccaaaagactccacaagaagcagcaagcctggttccgtgaacttgaatgctcgggagttgtagctgatcttaagttaatacagacttgaagccattctgaactagaatgcaccacaactggttgcatgtgttccgtaaagaagcatgatcatctgtaagcacggtatcagaaaattatgagacacttatccttagcaaaaagctatttgtcctgtttctactctaatgtggcaatgatggcacatttattttactggggcactaaccatgaactcatggcagtactgaatgacaagggccattctatttttaaacctgaattaacgtagcgaatgaaaaggatagcgcccatctcat

SEQ ID NO: 25529 - DNA, 2241 bp, Zea Mays
ccccgcgcgcgtcttcctccggcatgcgccagcccccccgagctcgcccgcgcaccaatctcgccgtcgggtatcccgcccgcgagcccgcgcaccaagctccttccccgcgacaagctccctcccccgcgacgcgtcttcctcctcgccctagatcgccgccccagctctctcctcaccccgcaatccccgccgcccatgctccgctctctactcgccccagatcgtcgcccctgttcgcgtggattgggtaccggtcccaactatctccatggattgcgcgtccgcgacaacccaatctcctcccggtctccatggaaggcgcgtcctccccccgtgattctcgattccccgcgtccgcgccccagatccactctcctctctcccacaatccccacggactctgccccgtatcaccaccccggctccttagaacgtgatccactctcctctctcctgcaatccccgctacctcaacccagatcgccgccctcgctctcgatcctcgcccacgctctccatggaaggcgaggccgcgatgctcgcgtggatctatgtagaggctgcgacgctctcccaggaagactactgccagtgctccgtgctccatgcgccgcgctggaacgccaccgtgcggtccatgtcctcgtagtatcgcccagactcgcccatgtagtcccacctgcatccaccgaccaccaagcacactctcactgcagaccagagaggattgccacgaataggtgtgtgcagttctactctacccctgcatcgagccggtgtgcgtccaccagaggccggagttgaaggagagcacgtcggcgtcgcgccatgactcggcgttctcgtagatgtcgtccagcatcagcacctgcttcccctggaccacgtcgatgtccaccagggtccacggagacgagctgcgtcggcgactgcagcgcggcggcgtgcagcaggcagacgagcgactcccactggttgcgccccagcgagtcgcccacgaacatcaccgtcttccccttcatccgtgtcaggaagaccgtggcacaacgcctgatgtcacgttgtcccagcggcgccgcggccggcgtcacgccacgcggatggtcacccacgccacgtccctagaccggtgtggtacgccggcgcccacagcgtcgatgaggaggaggtcggagcagcagtagctgtcatgggcagtgccgcagatgtggagcagtcgaatgagaggctagacgggctggagcaccacagcaggctggtgtcgctgttggccggtagccgctcctcccccaccggcaccgagagggacttgtgacccaaggatctgttcccgggggatgtggtgtttgcgctcgtcgatgatctcaggctcaaccactccaaggacccataggccatggggttatgcaatccaaagaaggaaattcctgcttgagccaattacagaaggccctgatatttgtcaaattgatggttgtagtgttaaattggaatacaagaggaggtaccaaacggcgcagcagcagttgatgtgcaacccgagtgtactgccgctcgaggaggccagtaagtgccaacaacatgaatagccaaagcagggaaatagggctggcgggggcacatgggtaacttggtcctggagcattggagaaggagcataccacaaggaaaccaacacgattactgggttaacgaacaactcatactttgatggagcacatgaggttcgacattatgtcaggaagcattcgaatcttggtcgtattgtgcttgaagttgctaaggactcgcaaatcccccgccaagcaaactgctagaaatcttttcagaggtggagatgatgaagatgatagtgctgatgccgacacaaatgatcctgttgtaccttggtcattaggtagagtaggagttgggcatatggtgtacatctccggtttgacttgtgccttgagttcaacaaatatgaaagtgctgagagaggtggcatctagaggacgtcatgtcgaacgtgtgaagaatttttttagaaatatgtatatttgtgcgaaactttttagaaacttgactccattttattttctatgttactctcggctttgtttcctatcctttccaatgacttgctatgcatttgcactgtatttggcatgtttaaaactgctacacaaaacttgctatatattttgtccaaaaatactatatccttgttatgattgattgatctttattttgtctgct

SEQ ID NO: 25530 - DNA, 3086 bp, Zea Mays
cccgtctctccaggccgccaccaacaccacaccaccacccgttgccacgctgccggccgcccacgcctcgcgccagccgatcctttcattccatcctccctccctccgcccccgcctcccaattttagccgcacggccgccgccgccgccggccggccggagagcaggagcagctaggccgccatggaggcgaagagcgtggtcatgtcggcgctcgggatcgggatcggcgtcggcgtcggcctgggcctcgcgtccgcgccctgggccgccggcgcctcggcctcctccagggccgcgggggtcaccgtcgaccgggtggagcaggacctccgccgcctcctcgtcgacggcgccgacaccaaggtcaccttcgacgagttcccgtactacctcagtgagcaaacacgtgttgtgctgacgagcgctgcgtacgtccacttgaagcaagcagatatttctaagtacaccaggaaccttgctccagccagccgtacaatcctgctgtcaggtcctgcagagctctaccagcagatgcttgccagggcgcttgcccactattttcaagcaaagttgctcttgctagatcctactgatttccttataaagatccatagcaaatatggcacaggtggcagcacagagaagacggttaaaagatcaatctccgagacgacgcttgaacgtgtgtcgggattgcttggatctctttctattcttccacaaaaggaacagcccaaaggaactatacgtagacaaagcagcatgatggatgtcaaattaaggagttctgagagtatgagcaacttaacaaagctcagaagaaatgcatctacttcctctgatatgagtagcatggcttcgcaaggaccttcaactagtacagctcctcttaggcggtcaagcagttggacttttgatgagaaaattttagtgcaagcattgtacaaggttctgctttcagtgtcaaagaagtacccagttgtactctatataagagatgttgagaagttccttcacaagtccccaaaaatgtatctcctgtttgagaaactactaaacaagcttgaaggtccagtgttaatcctcggatcaaggattgtagatatgaacagtgatgaggaatcggatgacagattgactgttctgttcccatataatatagaaatcaagccacctgaaaatgaaaaccaccttgtaagttggaactcccaattagaagaagacatgaagatgattcagtttcaagataaccgaaatcatattatggaagtgcttgcagaaaatgatcttgaatgtgatgatttaggttcgatttgcctatctgatactatgtgccttagcaagtatatagaggaaattgtggtgtctgcagtttcgtatcacttgatgaataacaaagatccagagtatcgaaatgggaaattagttctatccacaaagaggcaacaagataagtgataaggacagcatgaaattggaagcgacagatgacgccttaaaggctgctgaaaaggcaactgctccaaccactgcaaaatcagaaacaaaatcagcaacatcactgccacctgctcgggctccggctgctgctgctgctgctcccgctagtgcccctgctcctagaattgagagcaaaacagaacttgaaaagaaggataatccacctccagttgcaaaagcaccggaagtaacacccgataatgagtttgaaaagcgtattagaccagaagtgatacctgctaatgaaattggagtttcatttgatgatattggtgccttggatgatatcaaagaatcccttcaagagcttgtcatgcttcctctaagacggcctgacctcttcaaaggcggtcttcttaaaccctgcagaggtatattactttttggtcctccaggaacaggcaagactatgcttgccaaggctatagcaaatgaagctcaagcaagttttataaatgtctctatgtcaactatcacatcgaagtggtttggtgaagacgaaaagaatgtccgagcattgttcacgttagcggctaaagtatcaccaaccatcattttcgtcgatgaagttgatagcatgcttgggcagcggaacagagctggagagcatgaggcaatgaggaagatcaagaatgaatttatgacacactgggatggcctcttgtcaagaccggatcagagaattcttgttcttgctgcaaccaaccggcctttcgatcttgatgaggctataatccgtaggttcgagcgaagaatcatggtaggtctgccatcgatgggaagtcgggaactcataatgcggcgacttctgtcaaaggagaaagttgatgaagggctggacttcaaggagctagcaaccatgacagaaggatatagtggaagtgatctcaagaacctgtgcacgacggcagcgtatcgccctgtgagagagctaatccagaaggaaagaaagaaggagctggagaagctgaagtgtgagaaaggagaaactccgtcggatcctccgaagaaggaaaaggaggagaccatcattctaaggccgctgaacatgacagatctgaaagaagcaaagaaccaggtggctgcaagtttcgctgctgaaggcgccataatgagcgagctgaggcaatggaacgagttgtacggtgaaggcggctccagaaagaagcagcagttgacatacttcctctgagcaatatgaaaatcaggcgcaaaaatgtatgaacataatttgagaagtagagtagagcacaaagcagccatgaggaaatagaccgaacatgtaatcgtgtataagaagaacatgagaaaagggtgcgtgttagggggacaaggacaagaaatcaggccgtaaaagccagtatctggtgtaggacaaggaaggacagttttcatctccaccaaaattccagtttgcctgtgctggttgttgttgtattacactaataatggatctgcggtgtagatcgctcttctcttcatcttttcctggtcgcatcatccttctgtatatgtacaaactggtaggttgtggcaacgaaaggtttttaaagcagcttatatatatcttctccaagactcca

SEQ ID NO: 25531 - DNA, 2157 bp, Zea Mays
cagccggccgccgccctcatctacaccagcgtcgccgctctaccccctccagcggaccagcgccgccgtcggtcggcctccagcggaccagcaccgccgccctgactccctctcctccagcgtcgccacccacatcctccctccacaatcctctaacagccagtgccccacctctcctcccctctgcccccctcctccctccaccatcctccagcagccagcgtccatcccaggtttaggtttccagcagccagcgcccagcccaggttcaggttttcagtgacactgaagcaccccaagttcaaattcagacatagtaagtcaccatgtcttcgtccatgcaatcttcataccttcctgctaccactgagtccgtagccaaggctcaggaggccaaggacgcttctgagtccatctcaatcctctaccgcgtgcttgaggatccctcttcatctgcggatgcactgagagtaaaagagcttgccatcacgaatctcacaaactacctcacaaaagagaacagagctgaagacctcaggaaccttttgacccagctcaggcccttttttgcattgatccccaaggcgaagactgcgaagattgtgcgtggcatcattgatgccgttgccaaggtgcctggaacatctcagcttcagatctcactgtgcaaggagatggtagaatggacccgtgcagagaagcgaaccttcctcaggcagcgtgtggaagcaaggctggcagcccttctgttggagaatcaggagtatactgaggctcttacactcctttctggactcatcaaggaagttaggaggctggatgacaagttgcttcttgtggacatcgaccttttggagagcaagctccatttctctctgagaaaccttccaaaggccaaagcttctctgactgctgccagaactgcagccaatgccatttatgtgccgccatctcagcagggcacaattgatctgcagagtgggatccttcatgctgaagagaaggattacaagactgcttacagctacttcttcgaagcatttgaagctttcagttcactggaagatcccaaggctatcttcagcttgaagtacatgcttctgtgcaagataatggtcaaccaagctgatgatgttgcaggaatcatctcatcgaaggctggcctcaagtatctgggtcctgatgttgatgctatgaaagctgtggccgatgcctactccaaaaggtctctgaagtttcgaaactgctctccgtgattacaaagctcagctggaagaagatcctattgtccacaggcacctttcctcgctgtatgacactctcttggagcagaacctctgcaggctgattgagccctactcaagggtggagattgctcacatagcagagatgattgagctgccaatgaaccatgttgagaagaagctgtcccagatgatcctcgacaagaaattcgcagggacacttgatcaaggcgctggctgcctcatcatcttcgaggacagcaagactgaggagatcttccctgccacacttgaaacgatcacgaatgttggcaaggttgtggacagcctgtacatgagatcggccaagatcatggcctgaaagatgcagtgggaggcctaggtgtcgtcagcttcttttcttggtctattgtcagttcagttaaccaaactttagctgtccaagagacatcttattgtggattttttttttatttgtggttttgggtggcagactgtttgcgttacaatttgctcatgttgctcatgaatactcatgtttctgtttgatggaagtactgttaaggctatgatgtttttatactttatgttatttctgctgtcatggaaatccaggtgttagctagctacctacctgttgccatactttataatgaatttctgtgtggctctttctttcacatatcaaggggcgaaacgtattcctcttgcatgtatgtaaagtgcggaagaaagcagccgatgccacaattcatgcaaggatatggggagtatttcacaccaaattgcatactttctttaaactgaaattttgattggtaaatctatcatccactttgttgtgctgacaggtagagcaagatcttcatttcaggagatgctggtttgtcaaataaaacttacttcctccgtc

SEQ ID NO: 25532 - DNA, 3249 bp, Zea Mays
gcaggggcaaaatatctcggcctcccactccggcttccatttcatccacgatgatgatctcgttctcgtctcccagccccgtcgccgctgacgtggcgcccaccgcgcggaaaaaaatattgcagatattttcctcaccgctccttcccccctctctgctcgtccttgcctcccaccgcaccgccggctcttgctctgctcggttcctcctggcagcaaccgaatgtctcccgacgccgacgccgccgccgggggaggaggaggtggagaggcgagcgccggcgccggcgccggcgcgtcgtcgcctcccgcgtccgcgtccgcggcggcgaacggccgggcgctggtgcggtgggaccagatcctgccgcgccgctccctgcgggtgcttctcgtcgagcacgacgactccacgcgccagatcgtcaccgcgctcctccgcaagtgcggctaccgcgtggccgcggtcgcggacgggatgaaggcgtgggaggtcatgcgggagcgtgcctacgacttcgacctcgtcctcaccgaggtcgccatgccctccctctccggcatccagctgctctccaggatcgccgccgccgccgagtgcaagaacatccccgtcatcatgatgtcatcccaagattctattggcacggtgctcaagtgtatgcagaagggtgcggtggacttccttgtgaaaccagtaagaaagaatgagctgggtaacctgtggcaacatgtgtggaggaggcatgcaatgaattgccagacaaatggatcagaaaataatgcagccagcaatcatgtaagtaccaatgttgctaatgggtcaaagacaggagaaaacaatgatgaggaaagtgatgcccaagtaagtatctaaccttgcttacagcgtacctgttcaactggcattaatgcatgtgttaagtttcacatttgcatccctgcttagcttgacaacaccagtttaatagaaagtaatgaagtttggcagtatagcactatagcatttatagacatgtccttttctatgatggttctttttcttgactttaacatagtgagtgtaactggcactgtttaatggaatcagttagagttcatcatttcatcctttatgcggttctgatataacattcatattggatttctttgccatgttacgttatggagactgttttgtcttgactagagctttggtaacaaaagggagactgaaattaagagtgctgagacgttaccagatattcgtagagatgaaatggctggctcatccaaaaaaattgaactacaaaataagtctaatgatggagtaaacacaaaagtggatgcgtcaaaagatagcgatggtgctccaagtgaaagtgagaagaatgtgcgttccaaatgccttaatggtattacttctgcaaaggtggctgagcaaataatggataatgccttgaggatcacggatgcaagttcacgtcgtccaaccaatcttggcaaagatttggctatgactgaaccagcagctgatagaaaatgccaatctttagtgatggaaaataatgctgtcaaagaaaagaaccctggtgaaaagtcgaagagtgctgtaataggtcatgctgattcttacccctcccaatttctcgagaccaacttgggaaaacaacagtatcgtaatggttacaagaatcaagaattcagggaaaaagatatctttaatcactcgaattcttctgccttctcgagatatggcaatagaaggatagaatcatcaggtgagatacagtttcttccttctcgttgcattgttgggcaagagcagcatgttcatggcaaggacccagttttccaacccaatggggtcttgctgcctcccaatgaccataatacaggtgagagtacaaggcaagctcgaattactctggacagtagcatggagggtgctgacatcatttgctccagtagtgctagggaagatgctggtgcaagtagttcttcccatagaaaggacagtatgagccatccctcatatgggtttgtacctgttccaattcctgtcggtgccatgatgccctatcattgtggtgcaattctgcagccagtatactacccacagggtccacttatgcactgtaattcatctgcaatcaacaaggcaacaattcatcaaacctctggccaatctaactaccgtgaagattgtggtagtggtagaccatctcaggttgatgaacacaaacagtcagaggaaaagcaccagttgcatcattcaagacaaattcatcgggaatcaggacaaccagttgacatggttagagctcacatggatcatgctaaccagagtgcaagctgcagccgggatatctgtaaaggaagcggatgcacgggtagcggtgaagccgataccaatgcgaacacgacggttgccctagagagtggcaacgagagtggcatccaaaatagtgacaggtctcaccgagaagctgctttgatgaagttccgcatgaaaaggaaagacagatgcttcgataaaaaggtcaggtatcatagcaggaagaagcttgcggagcagaggccaagagttaaggggcagtttgtaagccagaagctgaaagcagctatggcaacggaagccgaaactgactcgtgacgggcgctagtccagaactgtaattttggttcttcccttcgcgccaggtgtgggcgattggactggtaagtctgaaggctggcaaaagtttttttttcttccttccatggttagcctttctgtacaaaggtgaactccacgtcgggtgtttgttggcatccaagccttattttttgcgaggtacatcaagttgacaaaatgttcggagggatagggtgaaaacggtgcaagcgccatatttcgtccatacgcttaggtgtttgtggagtgtgaaagcagagcctgtacagcatattcaccacccattctgttgccattacaattgtagtaacttgtaattactactatgacaaaagtagacactgttgtagaacttacagccagcaggtcttttccatatgggacagtagcattttatttattaattggttgatcatatgaggacagtcccgaatgcaggacagttaagatttgtttgatccaatccaatcatccagcattttgcttgccttaaactggacaaggaatcagcagggtgcacaccttgtccttgtcagctattggtacacagcagcatatatcctttgcctgtgtttgctgtactactactctgg

SEQ ID NO: 25533 - DNA, 1378 bp, Zea Mays
caagtgtttcatatgcttatccatggataaggtcctcttctttcaagtttgacagagaatggtctttcctatgaacctaccaagaatagaatcagcggttcaattttatggaagttggatgttcctgatgatattgctcaggcgttttccgaccttaacaatagctgtgatatgaaccaaaatccattgtcacaagtgaaatatgtagcaattgtgcttgaagctgaggaattttgtaaccttataagcaatggatcgttctttgatcatgtccaaagagtttgtgatggatacccaggattcaccatttgctacatcattaataaattgatgaactacatcaacaaatgtgagcaaagtcaatacaagaacccttcaaatacttggagacgtccgccagtggaagaggttttatgcaaactggcaacacactatattaacgttcactcaaggcaatgcatagatgaagctgaagtagtagagcaccttgttggcctgacgtctagtcttgcaaaatgcaaattcaggaaaccactgacatggttatctgtgcaagctaacggtgcagttatcccgaaaggttttgttcataaggacctggcgaagaaagacacctggttaaaagctttaatagcgatccctgacatccagccaagatatgcttttgcaatctggaagaagtatccctgcatgagatcccttctaaatgaatatatggatggcagtaaaaccgttgccgagaaggaacttctgcttagcgacttgaagtgggaagatcgactgggtgacgaaggcaaaaggctggggaacaaatgctctagaagggtgtacagaatgctcatggcacagaatggagacctggatgcagatgaccccgaagctggcggtagatcttagtgcctaatcatctggaccttgggccatcaatatatgcatgcccgccctcttgctgaccggtttgtgtacatatcgtccttttgaccatgcttgcactgtcagtgtcatggtgaaagagtcgcgcattagctcgtgcgatgtttggtgccgaaagcatggcctgcaatgctacacacgatggcacatggtgtgtgtgttttatttattaggtacctgtgaaaagcatttggtcgaagtcgaatgctaggaaactgggcattcgttgtgcgtagctagcttactgcctctatagagccccccaacaggctactccaacttttgagaacctataatatattatactagtagttcagaaaggcacgaggaaatgtttgtattgaatccatgctgccgtgctgtgtacggtaacccgcattgatccactgaaagatcccatgtatcgccgtttgtggaggacagctaccagtgaagtgacccttgc

SEQ ID NO: 25534 - DNA, 1017 bp, Zea Mays
catgcctctgacttctgttttaagtaatatgctgaacctgagaagccaagcagcccttctgtaaagaaggcagaagagaagggggtagttgtcgttcatgaaaccaaatgcaaggtgtatgtcaagcatgatgatgccactaagggttggaaagacattggtgttggtcagctctctatcagaagtaaagaaggcacagagaaagcttccaaagaatccactcctaccattgttataagaaacgatgttggtaaaatcctcctgaatgctctgatctacaaggggataaaaatgaaccttcagaagaatacggttgcttcgatatttcatacttcagatgcacaatcaagtgaatcagctggtgacacagttgtagctcgaacatacctgttccgattgaaaaatgtagaggaggctacaaaactatcgacagcaatcaaggagaatgcgccctcagactagttcttacggcatggattatcatctcgaatctccgcttttggcacgagctgtaagatctgaaggggacaccaccgatggccactgcggcaggctaaaagatgccttgcagagtttctttatttttttttgttctcctagctgcatcaagatatcttgcttgtaacttgtaaggctgactggctggttatgtattagtactttcatgtaccatcttttgcattgacaagattattgagcatgcttgcagcccatcatgtcaccgcaggcagcaaagcaagtggcaatggttcaagtctgggatgcaaccgagtttccgtcttcggatatcctgtacagctttcaccacaagaactagaaatcgaggatctttcggccatcgagttgaccataatcgtcgtaagctgctggcctattgtaaactttatcaattccgttctacggaacggctggtgtaccttgtgccggcgtgcagaccggaacagggaatgccgcgtccggccaggctaccgggtgattccgagtttcccgacctaaggccttgttcggttaatctcg

SEQ ID NO: 25535 - DNA, 2383 bp, Zea Mays
gttgcagacagctacagccgtatgtccgtgtgacattctgctcagtcggccaatcctcaccaaattctccatcaaatccaaccaacccctcaccgcctatgccgccgcgggccgcctagggttccggcggccgccgctccctcgccggcgcgatggggaacacctgcatcggtcccagcgccccctcggaccgccacagcttcttcaacaccgtctccctggccgtgctctggcgacccccggccgccgctgaccgcgccgagccttccccgaccgctgaacccagctcatccactccctgctctcccccctccagggcccctaaccctgtcaccatctccgactccgagcacccgccacactccacctccaccgccttaggccccgccgcgccgcccaatcctaacggcaagcccaagcccaagcccaaggtgaagcgcgtgcagagcgccggcctcctcgccggctccgtgctgaagcgcgactccgagcggctcaaggacgtctacaccctgggcaagaagctcgggcaggggcagttcggcaccacctaccagtgcgtcgagaaggcaaccgggaagcacttcgcctgcaagtcaatcgccaagcggaagctcgtcaccgatgaggacgtcgaggacgtgcgccgcgagatccagatcatgcaccacctggccggccaccccaacgtcgtatccatcgtgggagcctacgaggacgctgtagccgtgcacctcgtcatggagctgtgcgctggaggggagctgttcgataggatcatacagcgggggcactactctgagaaagccgccgcacagttggcccgggtgatcatcggggttgtcgaagcatgccattcacttggggtgatgcacagagacctcaagcctgagaatttcttgtttgtgaaccaaaaggaggatgcacccttaaaggctattgatttcgggctctccatcttcttcaaaccaggtgaaatattttctgatgtcgttggaagtccttactatgttgcccctgaggttctgaaaaaacgctatggctgtgaggttgatgtgtggagtgccggtgtaataatttatatcttattgagtggggttcctccgttttgggctgaatctgaacaagggatatttaaacaagttctaaaaggtggtcttgatttttcatccgatccctggcccagcatttcggagagtgcaaaggatttggttaggaagatgctaaatcgtgatcccagaaagagattgactgcacatgatgctctatgtcatccttgggtttgtgtagatggagttgctcctgacaaacctctggattctgctgtcttaaccagattgaaacagttttctgcaatgaataaactaaagaagatggcccttagggtcattgctgaaaatttgtctgaagatgaaattgcaggattgaaagagatgttcaaaatgctggacactgacaatagtgggcagatcacgttggaggaactaaaaattggtttgaagagagttggtgctaacttaaaggactcagaaattacaacactaatggaagcgatattgataacagtggttccatcgactatggagagttcctagctgcaactttacatctgaacaaagtcgagcgagaagacaacctcttcgcagcattctcatactttgataaagacggcagcggttatattactcatgatgagctacaaaaagcatgtgaggaattcggtatagaagatgcacacctagaagatatcatccatgacgttgatcaggacaatgatggtcggatcgactacaacgagtttgtaacaatgatgcagaagggaaataacccactagggaaaaaggggcactgccagatgagctttggtcttagagaagcattgaagcttggctaagtggcatgatcaatcctgtgtgaagtgccattcggcttcatatgccaactttagctgatgaaactaagtccgtgaatttgggacgccggtaccaaaggtggagcaagtgcgcgatacgattagctttgggataccaactaagcagtgagcatgcaggaacacattggtgatctttcgtcgttaaccccccatgtacatggcttttttgaggtgggataggaatggcggttgtgtttcccatggccattctttgcacgttatgaagctcagctgcaggatgctcttatatagagagaaatgttagtcacatcacatcgcgtgtccatactgtatagcgaaacttaacatgttgtaatatcggtcggacaatgtgtgcgtgttgtatgttatctttcttagatagaggcacaggcttagcgttgtcatatatgtattgcaagaatatgcaggctgtatattaaccaaatgatttttttgtgtacatttcag

SEQ ID NO: 25536 - DNA, 5170 bp, Zea Mays
ccgctgccatgggacccacggaatccaacctcacccgccggctgccgctcggctgccctccggcctccgggcatcgccatcggagtgtgcaggaaccaggaggaggccggtagagtccgtgcacccgggtcccactcccctgaggccgtccgtggctccgtgcaagatggggattgcgcaagggtgcgaggtcaccatccccgcgcctggtcatcagtgtgagttgagattctgcgtctcctcgctcgatttacttgcagccacatgcttgcgagttgcggtacccagcttagctttttcgagtccttgctaatcttggtggggacgacggagacctgatgctatgcttccttccctccctgtgctgttgagttccgcttccacagctcgtgtatggccgacacggtaatcgctgcgaaacgaggtcatgcgcgtcttccttgtgctttcggatgcaccgaggcttgccatccaaaattcgctgcaatgcttagctagatcgaaggcctacttacgctcagaggtgtcagcttggggatccccatcttttatctcttgtcgtggttaaaacagcggcctgatatgtcaggtgtttgttccgcaaaagggttggacttcccacgttttgggatgagagtttgttcggaatagcatgctcaaagtcatggaatttggtcgcagggagtgatcaagtaggtactaggacagtcctctccctttggtggtgctgttgattccttgcaagacctgtacctctgtgctcagataatccagcatgtgctgcattcagatgggagattgaatgaaagtgtgtaataccagtagcttcctcaaatactgcagattgaatgcacgacaggaacattccaactttgttgtcggtatccattcttcatgaagacgtcagtatagccggctccactgaattcttcaaatggaataccttgttaattatctgcaaaattttgtaaccaataatggagcacttggaggctcatagaagctacatttactagctggatttttaaattggtttctctttggagaagtaggtgcaatcttttttgtaagcatagtcaaatttttaccctttcagaaagttcttgtgccgaaagcttgtggaatgtggtactgaggaccacttaattcaaaactaaagtggctaggtgatcatatttcaaggcctaaatatttagaatgcctcccctaatcaagacttttttccccttgtcaatctacatcagttgcactgtttcatagctggaaggttggtaatccaggctgtcaatcagtgaattagtctgacgggatgtagcgatacccagcccattctcttttagtggcatctcctaaagttagtcttcgtaatgtgagcagtagtcatgttcatggaagattcaggaataccaagtctgattcaggaatacaagtcttttgctaggatgttgcactatactgtggttttatacttttatctgtcagtaactgcctaactggtggtgaatttctagtttcttctgcgtgttttgtccatttcattgatcagcttgatcattggtgaatcacaattgaacttggaatgataggctaatactttcaagtagggaatttggtagtttgattcatctggtagggttacatagaaattgaaacttaaatggtttggtaaaaagtaaatctgggacaaaattttaccattaagaacctatatgagacgatatcgcttgtttgattcatcttgatgtaattaacaaccatctattgatgaattctaaggggtaaaggatacaaacagaagttaggatttaggattgacacacttctccccttgcctttttctctactcaactgaattgcaatgtgaaactgaaaattcgtatgatggtagatccttgagtactacctttacagttgttttagaagttttcatattatcttttaggaacaaaatgatagtatttgtcatgatagctagtgtgtgatctgctcatctgcattatgtctcatggaaatgtacatcacaaattatagcttattgataaatattggaaggctggatggatgatacctatgacctaggaaattattgttttcatctgccacttctcttcaaaaagcaaacttctgtttactgcttttacttttcaacacagaaacacacatcgctacctgggatagcaacagtgcacagactctgagagtaacaattaaacagttgcaatttttatggtgtgggcattttgtttgcatggacattttttctcttattttttatacaagatgcatgcagaagaatgagttagcattgtgtatcagaagattgatgctgttctatcagcagttgctaacattttccttggattggattgtgtttatgtagaaataataatctgttaaactttctgtcttgtgttatatttgtctatataaataataagatgctctagttttagtgcacagtctttcacagattggagcttcttgcatatgcagattcagcagaagaatgagttggtgtctttccgatctcaatgcatttcaccgctccaccagaaattccctctgcccctaccgtactccagtttatctgttatagtgcaacacaatgataaaatggttggtgagatatagttgcttaagatggcaacaggggcggcacacatatatgcttttgtggggaatggaggcttcaatacttagagataatcatactttagttcctgttgcatcatctgcaaacaaattcccgtgtttagaaaaggatagctaactagaaatttgagctaatttatctgcaaatagggtgttgttcatttcagtatgctagttaattaagatcacaccatccttttgtaccatattgtaatattgaagtaaataatcagcttggtcaaagatgctgacacatctcatttgaatgaacatgattatcaaccctagtagtagtaccctatgatgctgccgcacgatttgtaactgtttttttagcaagggcttgacatggtacaatttattataggtcagacttaaactcttgcttccagtttactctaaagtaaccaaatcaccatcactttctacatcagcaaatagaaaagcatggaatgcacaggacattttttttagtgaaattgcacggagctatacatacatgtgggcagacatccactgcagttgcaatggagctttcacagctcttttatatgatgtttgtctgcagagtttggtggctcacagcatatataaaatgcaatataagcataccgatagccttgttaactcagtggttaatctagtacaagttgccagctgatagtaaattgatcaatggggagacagccgtgctgtgacaaggagggggtgaagcgagggccatggacagcggaggaggacaagaagctcattagcttcatcctgacacatggccggtgctgctggcgggcagtgcctaaacttgcagggctgcttcgttgtggcaagagctgccgtctgcggtggactaactatcttcgccctgacctcaagcgtggcctcctcagcactgccgaggagcagcttgtcattgacctccatgccaagctcggaaatagatggtcccagatcgctgccaagttacctggaagaacagacaatgagatcaagaaccactggaacacgcacatcaagaagaagcttatcaagatgggcatcaacccggccacgcaccagcctctagccaactccaaggcagctccctcacactccacaggtacagacgaatccgctaaatccagcgacaccagagaggagctgagcctgaaggatgacaaccatcatagggaggttccgctgtccaccgattcatcggagcagtccagctggccagagccaggcagcaacgtcggcgaccaagaccctgaactgctggtgaattggccgtcggagaccgacttgtcagtggacgagtcttggctgggttttatgagcaacggcaatgagcttggcgatgtcgaggggacgtcgccgtgggacggaacaacagactggctgctggactaccaagattttggcatgtgcagctccaacttggtggacgattcaatgttccgcgcctcaaatggattgaacttctaaatgtcggagaaaggctgtccaatttcaagaaatagggaggaagacagactgcaagtttgagcgcactgcacagctcccagtatagaaaatagatacaacactttcaagaataagattgtgaaaagagagagagagaggcatggggcatatcttgaccatagaatagtgataccttgcccttaaaagtaaggggtttgtattgttagaaacctaatgtttctcggtacgagaagctgaagaactagacccaaatgttcgaaccatgcaaggcatcctatcctatgaacaaagttagggtgttgcagcttttctgtgcaagctaaggctgtgctctgagcagtacaacagcgaggttttatcttgatatctccctgttgctgtccctggcaactgtggagcaattacagagttcaggacatgttgtgttagagactcacactcaccatccttgttccaacatcagactcatcacacaggcttgtggactttgatgtgcgtaatgttaagcagttgcacggcagagacgaaaggaacacgactgtacgtggatcagcaagagccttcctggattctgcacgttggtcagtccagttgcggcggttggtcagtccagttttcatgagggcaaaggtgtgttcccttctctgttccgttgccgtccatgtctgtccctgacaaagatgcaggaccttaaaaggagccagtgaaccaaccatcttccaaatcctgacgtgtttcttccaactccgatgactgaaataaaatgaagtgccagcagaaaccaaagccttgttcgagagctaacttccttccaagctcaccaggtggctttgttgcgtcgtaagcactgttgaacttctccactgcactgatggtgatggcaataacttggctgacagggagggattcatggggactaatctccatgctattcaaaattgaatagcaaactgatttctctctatagatactctctattttcctgtccaccaaaccagccctgaaagattcggaaacccctgtcgtggaaagcttgagcgcgagcctgtttgtgtgg

SEQ ID NO: 25537 - DNA, 3520 bp, Zea Mays
gcttaaaatctagctaggctcggatgaaaaacaacacacacctctagtagcgagaggcaagggacgtaagaagtcgtctaattcttggatcgaattagacgacttcttcgtccctctcttcattagcacgctaacttgtaatctgcaggatctaagcaaagacttgattcagttatggacggattggtaggcctcttgaaagttcgtgtggtccggggtatcaaccttgcctaccgcgacgcaagaggcagcgatccgtatgtcgtcctacggcttggcaagaagaaactgaagacaagcgtgaagaagagatccgtgaaccccatatggcaagaggagctaactctgaccgtcacagatcccagccaaccactgaagctggtgagtgagcagcaagcagaacgatcctgtttgtgattcattattctagactgtttgcatacaggaggtgttcgacaaggacaccttcagcagagacgaccccatgggagacgcggaggtggacgtggcgccactgatggaggcggtgagcatgaacccgcgggaggagagtctgaggaacggcgccatcatcaggtccgagcggccgagcgccaggaactgcctcgccgacgagagccacgtgtgctggaggaacggcaagttcgcgcaggacatgatcctccggctcaggaacgtcgagagcggggagatacagctgcagctgcagtgggtgaacttccctcctggtcctggtcctgctgctgcaacaaccaggtgacctgatcgatggtagctgctgttcctgtcgccattgcctcctgctggcaggaacaggaactctctgaagcacggggtcagggtagttcatgttgcttcgattcgatcgtaggggagataatgccggatggcgctgctcatgctttgtaaagtttgggaggacatgcatcataattgaagtcaagtgataggatcctgttttttaagtacacgatacatccctttttttatttgtcgctctcatcagtggacgactgttgatggggtagttgagtgctgtgaatcgtggtgcagcgatcgcagttgcaaaagttgcagggtcaggctgccgcggcaacgggtcgtcgtctcctcacctcgccggggctttacttatccaccgcagggccaccgagcgaggcgataacccaaccagtatcagccagctcgcagtccctccgccaccaattttttttttctcattctcgtttccaaattatccgccgctgaaacaatctgcacccccacgcacaagcacgaagcagtcagcagtagagtacaaatcctcgcctgcatcctggttttcgtccccattctctccccgccactccagcggaacggcggcgggggagtgagtgacggcaacgaggcaagatggcgaggaggaggccgatggactacgaggagctgaacgagaaagtcaagaaggcgcagtacgcggtgcgcggggagctgtacctccgcgcctcccagctccagaaggagggcaagaagatcatcttcaccaacgtcggcaacccgcacgccctcggccagaagccgctcaccttcccgcgccaggtggtggcgctgtgccaggctccgttcctcctcgatgaccccaatgtcggcctcatgttcccgcccgatgccatcgtgcgggccaagcgctatctcgccatggcgccgggaggtctaggtgcgtacagtgatgcccgtggtatccccggaatcaggaaggaagttgctgacttcatccacaagcgtgatggatatccgagtgacccagaactcatttacctgacagacggcgccagcaaaggtgtgatgcaaatgctgaatgccatcattagaaacgagagggatgggatcttggttcctgttcctcagtacccactttattctgctatcatttccctctttggtgggtctctggtcccatactacttggaagaagaggctaactggaaccttgactttgcaaacatccgacaagcagtggccgaggcacgttcgaagggaatcactgttcgagcgacggtgattataaatccaggaaatcccactggccagtgccttagtgaagcaaatataagggaacttgtgcgatattgctaccatgaaaacttagttctgcttgcagacgaagtgtatcagcagaacgtttatcaagatgagcgcccatttataagcgcaagaaaggttatgttcgacatgggtccgccaataagcagggaggttcagcttgtttctttccacactgtgtccaaagggtactggggagagtgtggacaacgtggtggatacttcgaaatgacaaatcttcctccaaagacagtagatgagatctacaaggttgcatcaatagtactgagtccgaatgttcccgggcaaatctttcaagtccatcctcgaatctttgaggaggagagcgcgcatgatgacagacggtttcaacagctgccgaaacgtggtgtgcaatttcacagaaggagctatgtactctttcccccaaatacagctgccagcaagagccatcgaggcggcaaagagagccggcaaagcagcagacgttttctactgcctcaagctcctggaggcaacggggatttccactgttccgggatctggttttgggcagaaggaaggggtgttccaccttcggacaactatccttccagccgaggaagacttccctaccatcatgtcgagcttcaagaagttcaacgactcatttcatggagcaatacgagggctactccaggatgtgatgtcaacatgaaaagaagcgaccgcgccaccattttgcttctactgcccatactagtagaaacagtgatcggtgcactatgtgatattttgctgctgcaactgcggccttagtctgctatgtatgtgttgcctgttctgaaagagtaaagaagcgaccgataatgtatatcctgagccgcgcggcggggagaaagcatttcgcttttaagggaaagggaagcatcagcagcgccgccgccgctagagccctagacagacttaatcgctatctgggtcagtccaaaacagtcggaaacaaacccgacagaggatattttactcttgaatttacctggagccactggcactttgctgctgcctgtatccgtggtgaggactccgaacggtccgcgcgctcagattcagttactatctaattggttgcccgcatcgctttattctggatctctacgtgcattgactttgattaagtgtgtgtttggttgcccgcacgtggaaggcgtggattgtacgagccgatgcaaaacaagccatttagaggccaaaatgccggtatctgaccaaccaggctcaggctagactgcaaccacggacacacttaaccaatcagcaggttaggttttcgagtttcttgttatgattattaactaaatttgtaaaattagtccggtagattgctttgtaacgggtccaatcccctcctctataaatatagaggaatacggccgattaatcatcaattatcgaatca

SEQ ID NO: 25538 - DNA, 1936 bp, Zea Mays
gtcgtgtctcgtgcccgtgcctgtgaacctctcacgtgccgtgccggaatctcgcagccatcgatcgatccagcagatgtgccagccgccgcggccgcgccaagcccaagccgagctgacgatcctgatgcggttgaaaatttccacgaacatatagatcctcatcgtcgaccccatccgtggtgctcccggtgcgccaggctaccagagtccgacgcagacgtagctcccggccacagcagagcccacgccttgagcccttgacgcgctccgtgtgagtggagcgtacgggcgccggccggcggccagagaggaaacggatctaggaggctcagctgagtcgaggagatggaccgcaaagatgtcgggatcctcgccatggacatctacttcccgccctcctgcgtgcagcagtttgacggttgtcaattctctgctgaaaaaatacaagattgatcccaagttaatcggtcgcttggaggttggaagtgaaacagttatagacaaaagtaaatccatcaaaacttggctgatgcagatctttgaggaaagtggtaacagtgacattgaaggtgttgactccagcaatgcatgttatggcgggacagcagccctactgaattgtgtgaattgggtcgaaagtaattcctgggatggccgttatggtcttgtcgtttgcacggatagcgcggtttatgccgaagggccagctcgtccaacaggaggtgctgctgctatagcaatgctcattggtcctaatgctccaatttccttcgagagcaaatatagagcttctcacatggctcatgtctatgatttctacaaacctgatcttgcaagtgaatatccggttgttgatggtaaactatcccaaacatgctacctaatggctctagactcatgctacagacagttctgcaacaagtatgagaagattgcgggtaaacaattctcaatttgtgatgcagaatattttgtgttccattctccatacaacaagctcgtgcagaagagtttcgctcgactttattacaatgactttttgcgcaactgcagctctgttgatgatgatgctaaagagaagctccagtctttttcaaatttgactggtgaagagagctaccagagtcgcgacttggaaaaggcctcacaacaggtcgcgaagcacctccatgacatcaaagttcagccatcgactctgcttccgaaacaaattggtaacatgtatactgcatccctttatgctgcattagcatctgtgctatataacaagcatgatagtctgaatgggcaaagaattgtgatgttctcttacggcagtggtttgacatccactatgttttcattgaggctaaacaatggccagcatcccttcagcctatcaaacattgcttcagttcttgatgtcaccgagaagcttcagtcaagacatgagactttgcctgagaaattcgttgagacactgaagctgatggaacaccgatacggcgcaaaggacttcgagacgagcagagacacgagcctactgcagccgggcacattctacctcaccaaggtcgactccatgtaccggaggttctattcccagaagctgtccgaggaaacaggcggcgggaaaaccaagtgctgcaacggcctcgcaaatggccactagtggtcgcccagcactgttgctcatcattctcagtattttgataatgctcatggttagcgtttagtctagcgtgtttctgaaataatataattgttctttgaagctgtcccaccccacctagatcagctagttttttattttaatattttattcttctgaacattgaaattcatcagtctctacattgtttctctttgtttcttcttttagtactctcttcgttccaaattctaaattacgtacataatgtttgctatgtctaatagtaaaaaaaaagtcaac

SEQ ID NO: 25539 - DNA, 1099 bp, Zea Mays
  misc_feature (1098)..(1099): n is a, c, g, or t
tcaactaagctaatagtatgaaagagcagaaaatttaattcttgcatctgatcctgaccgtgaaggtgaagcgattgcttggcacatcaaagaaatgcttgaacaacaaggtgtactgggttttgatgtgactgttgcaagagttgttttccatgaaatatctgaggatgcaataaagaaggctttaatgtccccgaggtatattgacatggacttagtcaatgcttatcttgcacgccgttcccttgattatctaattgggtttggcatatcaccacttctgtggaggaagttgcctggttgccaatcagctggacgggtccaatctgctgctttggcccttgtgtgcgatcgagaagctgaaatagaacagtttaaggcacatgagtactggacagtacagacagacttcaaaatacaatcagcagatccttcaaatgccacatgtattccattctgtataaagcatttgaattcaaaaaagctggatcaactttccataccctctcaagaagaagcgcaagctatagaaaagatgattcattcttctacatttgaagttttaggtgttaaaagaagtaaaattcacaagaatcctccattgccatatattacatccagccttcagcaggatgcagcaaacaaactccattttactgcaggatataccatgaagattgcccaaaacctttatgagggtatcaacctttcctcagaagaaacaactgggttaataacgtacataagaactgatgggttccatatttctgatggagctgtggaggacattcgttcactagttaaagaaagatatggtcagaagtacgtttcggaggacattaggaagtatttaaagaaggtgaaaaatgctcaagaagcccatgaagccattaggcccaccagtataaggaggccgccatcatcattggttggaatacttgatgatgattctctaaaactgtacactctaatatggaaaaggacaatggcttgccaaatggaagcttccagaactgagatgattcaagtggatgttggcattcctgaaggagagatgaattttcattccactgcatcaaaactggacttcaagggatnn

SEQ ID NO: 25540 - DNA, 4195 bp, Zea Mays
agaaaccgatgccaaaaagctttccacggttccaccacgaccccacagccgaggcggtccaacgcaacaaggagaagcaacaaactgaaatgcgaaagcggaaaaatttctggctcctgtcctccgccctctccccctcgaagcgatagatagaataggggcgggcgccgggcggcttcctccgtccacagccacagccatcgccacctccaccaccacctccttctcctcctcctcccgcatctcctcattgcaaaacctcggttcattttcctgtcgcgatctagggtttccggtcgctgcggcgccaatggcggactcgcgccgcacctggtcctgggacgtgtcggggttcgagccgccgcagccggcgacgacgcaggcagcgtcggcaccgaccgctatgccgcgggctccgccgacggccatgatgccccgcccctccgctggggctccccgcgcctcggccggcgcagtgcccgttgccgaccagctggaccagctcgtggacagcgtccagcttgctagagaggactgcttggagcttagacaggaagctagcgacctccttgagtattctaatgcaaaattgggccgtgtcacccgttatcttggatttcttgccgacagaactcgaaaattagatcaagctgcccttgagactgaagctagaatcacccctttgattcatgagaagaaaaggcttttcaatgacctattgaccttgaaaggcaatgtcaaagtgttttgtcgttgtagaccactatttgaagatgagggtccatcagtactagagtttccggatgattttagtatccgtgtaaacacaggagatgaatctttaaccaatcctaagaaggattatgagtttgatagggtatatggaccccacatcgggcaaggtgaacttttccttgatgttcaaccatttgtgcaatctgccctggatgggtacaatatttctatatttgcgtatggtcaaagccgttctggcaaaacacatacactggaaggatctagtcacgatcgtggtttatatctgcggagctttgaagaactgtttgatctttcaaactcggatactacttctacagcacattttaacttttattttactgcctgtgagctctacaatgatcaggttagggatttgctatcagaatctagtagcactgtcccaaaagttcgaatgggggtccaagaatcctttgtggagcttgttcaagagaaggttgaaaatccactagagttttctgcggcactaaagatagcacttcaaaaccgatcagtaaattcgccaaaggccatggtttctcacctgatcattaccattcatatacactacagaaactatgtaacaggggagcatctatacagtaagctttctctagtggatttgccagcaagtgaatgcttgcttgaagaagatgccaacagggacaatgtaacagatttcttgcatgtctcaaagtcactttctgtgttgggtgatgcatttgcctctttaagcgcaaagaaggagcctgttctatatgggaattcaagaatcacacaaatcttagctgactctctaggaagtagctcaaagatcttgctgatcgtgcatgtaagtccaagtgcttcaaatttgtcaagaactttatccacactcagtttttctgcaagagcaagaaatgctgagctgagccttgggaatcgtgacacaataaagaaatggaaagacgtggcaaatgattcacgcaaacaattgcatgacaaagaaaaggaggttctagacctgcggcaagaagttattgggttaaaacattctctaaaagaggctaacgaccagtgcatacttctgttcaatgaagttcaaaaagcctggagagtttcatcttcactccaagctgatctcaagtctgaaaatttaatgcttgccgagaagcacaagactgagaaagagcagaataaccagctaagggatcagatttctcatcttttgaaagttgaacaagagcaaaacctaaagatgcaggaacgggatttaacaattcagtcactacagactaaactcaagtccattgagtctcagcttaatgaagccctcaatgctagcgatgctagatcaactattgggtctgaatctgcttcagtaatttcttccccaaagataacagaatcaactgctgactcatcttcagtgacgaaaaggcttgaggaggaattggcaaaaagggatgcccttattgagaaattacatgaagagaatgagaagctttttgacagacttacagagaagtcaggattaggaagtgctccacaggtcttggctgcagttatcaaagctggtgcagctagggagcatgagatacttgccgagatccgtgatgctgtgttttcattcattcgaaagatggaaccgaaaaaagttatggatactatgttagtttcaagagtcaagatattatacatcagatctttgcttgctaaatcacctgaactacagtccatcaaggtctctccagttgagcgtttcttggagaaatcaaatactggtcgaagtagaagttctagtaggggaagtagtcctggcagatctcctgttcaccaccatggtcatggttcccgaactgcgcttgttgatgaacatgtgcatggtttcaaggtgaacattaaacaggaaaagaaatcaaaattctcctcaattgttctgaagcttcgtggtatcgaggaggagacatggagacagcatgttactggagggaagctccgggaaattactgaggaagctaaggccttttcaattggaaacaaggctttagctgctctctttgttcacacgccagctggtgaattacagcgccaaattcgtgcatggcttgctgaaaactttgagtttctatctgtaactggtgcggatgctgctggaggagccgcaggacagcttgaactgctgtcaaccgctattatggatggctggatggctggtcttggtacagcgcagccccctaccactgatgctttaggccagcttttatcagaatacacaaagcgtgtttacacatctcaactacaacacttgaaggacatagctggcacattggcaacggaggaggctgatgatcctgcacatgtcagtaaactccgctctgctctggagtctgtggatcacaaaaggagaaagatcatgcaacaaatgcgaactgacactgccttgttaacaaaagaagaaggtggctcaccaattcgcaatcctcttactgctgcggaggatgcacgattagcatctctcatatctctagataacatcttgaagcaagtcaaggaagtaattagacaaagctctacaggacctatgagaaaatcaaagaggaaagctttgctagagttattggatgacctcttgacacagatgccctctcttcttgatatagatcatccatgtgctcagaagcagatcatggaggcacggaaagttgtcgagtcactgcaagaagaccctgatgatcctgccccacagtctaatgcattgggagagggcgaggtttcacagtggaatgtactgcagttcaacacgggaacgactgcgcctttcatcataaagtgcggagcaaattccagtggtgaactggtgattaaggctgatctgcgagtccaggagcctaaaggtggcgaggtgatccgtgttgttccaagaccaacagttcttgcggacttgagttttgaggaaataaaaggtgtgtttgagcaattgccagaggcagttagcttgcttgccttggcacgaacagcagatggtacaagggccaggtattcaagattgtacagaaccttagccagcaaagtgacggccttgaaagagactgttgcagagatggagagaggtggtgttttcaaagatgtacgataaatgctgtgttattgtagagttatttatgatattgatgttgtatatggatgccatttgtcggcatcccttgtaactgtatttgtttttactatgtggaaacctatgttgtaacactattctttggcaagagatgagccttgcctgccccaacccgtaatactatggttgtgcaaggcattaatgtaaattgtagctgcagctgataaatgtctgcagtgctgcaagtctgaactttccaggttatggaactattcaatgtttatttgtattaagcttttaagatgttaaaattgtgctagtttt

SEQ ID NO: 25541 - DNA, 2911 bp, Zea Mays
aaaaaatcacttcaggtaagggcgaagaagagcattccctctcccggtctccccatctcccgaaccgcgtgagccaaaccctcccagctcgcgcgccctcgatggatgcctccgccgccacccccgcccccgggccttccttctctggcgccgagtcctccgcggccgccgcccagccgccggcggaggctccgcagttgcgcgtccacggcgccggcagcggcagcggcgtcgcgcgagcctgccgccaccacgcgtacagccgcaagcagaagtcgctcggccttctctgctccaacttcgtggcgctgtacgaccgggaggacgtggaggtgattgggctggacgacgcggccaagcgtctcggcgtcgagcgacgccggatctacgacatagtcaacgttctcgagagcgtcgggattcttgtgcggagggccaagaatcggtatacatggctcggattcgggggagtccctgctgcgctgaaagaactcaaggagagggcgctaaggaagatgtccggatcaccggtgttactgtcaatggaggactcctctactgccaacttatcagatgatgaggatgatgaaaaattgggcgatgctgatgaagatgctgagagcgagaagctcagccaacctgttgacaatacgtctgataagcctgacgcacccagctgccgccttagatctgatcatcggaaggagaagtcccttgggctcctcactcagaattttgtcaagctcttcctcaacatggaggttgggacaatctcacttgacgaagctgcaaggcttctccttggagagggacatgcagacagcaacatgagaaccaaagttcgtcgattgtatgacattgccaatgtgctgtcttctttgaacctcattgagaagacgcagcaagcagacacaagaaaacctgcattccggtggctaggccaggcaaagcgaaagcaagataacaatgtcatggtttctgtacctccatcgatgaaggcaatgcccaataagagagcatttggtactgatcttacaaacattgacaataagcgaggcaagttagactcagcagcggagaacaaagtcaagctcatgcagggtgctggtaacatagtgaagacttttgagaggcagctggtgcaagggaaaaggagtgactttgtttatgggcccttccaccctgctggtgcaaagaaacacgaaactgatgatcaaactgttaagcagcaggagaggaagaacattcaggactgggaaaaccttgctgtgtccttccgtccacaatatcagaatcaagcactgaatgatctttttggtcattatgtggaagcatggaaatcatggtacgtggatcttacccaggaaacggcatcatgaagcagaatgttggcaggatcagagaaaatatcataagctagtcatcgaccttggttcatctaacaaaaacagaaatcagtaaattttgacgtattctggcgcctgggctgggattagcatcatatcgaggagatgcaagacatgcagatgcccaatcaaactcagtcatagttcacacactgcagaaggagcgaacttcacaagacggtaccattaccagtatccaaatgacaattttatcactgaagtgcggcaaatccagatgacagatgaatatgaacatcaagcatggacgatcaaactcatccaccatcatacatataccaagtcatcaccaagcgctcaaagtacttttagaggtcatggatgtccccaacatattgagttgccagcaaagtgtaaaatccccagtagcaagtagtagtagtagtatgccaatcaacatgcttcacttagggtcagtgaagaacttgttaactgcaggcatgatctcaggagtcttgtcgtgcacaaagcttcttaggccatgcatggcgtaacgtctcccctcctcatggttctcaagcacaccagctgccctccctgccttgtttaccctgtaaaattcaaggcattcgtgttgatagtgttacaggattaatgtatatgtaaacatggatgcatgtaactaggtaagcacaaacaaacagctacaattgtgacatcctcgtgttgtcaaatagtggacaatcagactgaagatgtgaacagcgtgcctacatgcatatgccgttttaaactcagaaaaaaaaatactgtaattggcaccatgcatgtaaacaaactattaagatgtcatgtaaagaacagaagcatatgcatacattttatgcttatagccacgaattagcactcccaaaccttacacttcggttcctacaatctgaccgaacagctacaaatggtctagtcgttttcaaccttgcccagcaaaaggaactagttttccaaccgggaaaactaccaagacaaatttcacctgatggatacaatacaactctggttctggcaagtcaacggctcaacgccgaaccatggttcagcctttcagacaagacaaagaaataaagcgactactgaactagtgaacttgaactacatatagactaaaacttcaacagcacccaaaccaagcagatctaccctgatccagcaggagcagcacatttcttgcaagaataaaacaggcaggagttaagagcacggagcggacctgacttccgggttgccagtgatgttccggaagagctgaaacccgcagatgccgacggccacgcccgtcgccgcgaacagcgggtacacctgcgctgcaccaccatgagagagagagagagagagagagagagagagagagagagagagagagagtgcaatcgaagagatcgaggaagctgacctcgggccggacccagcggctggccatctgagtcggagtctcttcgcactgggacgcggcctcgacggcggagaagcacggggaaagtggacaggcg

SEQ ID NO: 25542 - DNA, 2421 bp, Zea Mays
cgaggcctacatagcgaggcacgcctcctgcagtcctcctcctcgtctagtcatctctcctccccctctcatcagacatcagagcccttcttcctccgcctccccttcacccccatctcgccatacgcttatcgcccatcccctgatcaccagccgccgccgccaccgcctcgatcccgtccgatccaatccggttttttccttgataatgcgcgtggcaaccttgtcagttcaatccgtccgtgaagaacttatccttattttcgtttgcatcgcatcgcttctgcgtttgggggaaaaagggccgcgtccttgatgtctactatcgcgaccccgccgccgccatcggcggcgcaagagaaggccgccagccggaataagcgaaagtaccgtgccgagacaccatccacggagttgggcccattcgggctggagtacccactgacgacggactgcgtgggattcgagtttatgtcgcccgagaaggttgccatggcagccgcggtagccgccgctgagggtgtcagccttgacctcctccagaactcgtgcgaaaactgcaaggatctccaccctactgcggaggacttgttggagtgccagcgatatgtgaattggggtgacccaaatgagatgcagctggaggagatccttctcaagagtctggacaccacctttgacaatagtgtgagtctgatcaccacaatgggctactctgaggcggccgcacgtgctgctattatgcggacagctgcgcaatacgactggagggagagccttgctgggtttggagaggcggcggttgaggttctcaagacggaaggggacatgttgccaagggagggtgcctctgttgaagacatgaggaagattgaggaggctgtgcttggcagtatggttacgttggtaactgaggctcagccattcaacaccccaggcgatgtaatgtattgcttgcttatgtcggatatgaatgtggcaaatgcatgtgccatggactataacagtttctccctcccagctgtgtctgctcaagttattgcccaaccagtcgcgggaaactacgaacccggttcaggttcaaatttgtcagtttctattaccaacccgcagactggcgttactttccgtggaaaacttaccccagtgccacctggctcgtatggtgctataaaagctgattcatcaacggcacaagcaagcccgaatgtatcaaataccgaaccctcggtatcggacaagactcagtgtgtcatcccgaatattgagccaaaaaaacaccatgttcctatatgtgatcattcagaggaccaaccatttgttgctgctgcgacacaatctgtgaaaaatgacaagtcgtccccaagcaagagggggggctctaagagggactcctttcatcggcagaagttgacgaactatgataaaagttcccgagcattgggttccaaaggctctcttaggtctggcaagcaaagctcttcagccagtgcagtattggagaggaagtgcaggtcattttccgattctactactagcaacttgaagggctcatcaagagttgctaaagggtttgctgcaagcatatctggatcagaagtatcagttgacctttcctttactggtaccctttccccttctccatcatttgatgccaaggtagttagtaactcaaactcagcacctgctgctagcacagatctttcattggcattgtcctcaagtgatagtttaacaccatctttgagtcatgattccaatactgaggtagtggactctagtagcaaaattaatttttcatatgatgaagaacagaaggtctggatcccacaagataaaaaggatgaaattgtcttgattcttgtccagaggcagaaagaactgcaagcacatacacgtgactggacagactgggctcaacagaaagtgatgcaggtcgcacaccgacttgcaaaggagaaggatgaacttcagtcactcaggaaagagaaggaagaggcagaccgtctgcaagaagagaggcatcatttggaagagagtactcggaaaaagcttctagagatggagtctgcaatttctagggcaaatgctcagttggagaaggcagaagcttctgctcgcagacgtgaggttgagaatgcacaacttacgttacagatggaagctgcaaagcgacatgcagcagagtcagcaacaaacatttcagagcttgtaaagaaggatgagaacagtcgcaaaaggtctcagcgttggcaatctgacagagccctgttacaagaggatcttgcagcacaaaagagcaggttatctcgggtccaagaacaccttcagcatgctaaagagctaaaggatcaagtgcaggccattgtctccattccatagcacctttatggtttctctgaccatctgttgagtttggca

SEQ ID NO: 25543 - DNA, 1683 bp, Zea Mays
tgcagtagattgacgaatagagcgcgtgcgcaggagtataaaagctagctccggtccccgggggccgcggcctcgggctgccgctggttccgaacgcgtggtgcgacccgggattccctcgcgcttctctgtgtccccttcctccggcctgaggggaggaccccgcagatcccatcgaaattcacggccggcctaacccaagccggtcctccccgactcccggcgacgaccaatttctccttggaccgaggttgactggatgtacttgtgggatcttgcactgaggaaaggccatttaggatatatcaagtacatacttaagagcagcttgatgaagttgcctatttttagctgggcatttcacatttttgagtttatcccggtagaacggaaatgggagattgatgaagcaattattcagaacaagctatcaaaatttaagaacccgagagatcctatctggttggcggtttttcctgaaggcacggattatacgtaaggcataattgtctttgaaattcattgtttgtatattcgtataatccacattcatgactgtgtactcaatcacataagtttgatttctcaaatttttattgttactgattaccgacctaaacattaaatgtggtactttatgaaattgatcctatgtattactttagtaattgtttgtcgctctatttaatgtgcatgattcttcctcttttcctatattttgttgctgattgctgattcaatcttagtgagaagaaatgcatcatgagtcaagagtatgcttcagaacatggcttgcctatgctagaacatgtcctccttccaaagacaaagggcttcatttgttgtttgcaagagctgaggagttccttagatgcagtttatgatgtcacaatagcatacaagcatcgactcccagattttctggacaatgtgtatggcgttgatccttctgaagtccacatccacgtcagaatggttcagctccatcacatccccacaacagaagacaagataacagaatggatggtagagaggtttaggcagaaggaccagctcctggcagatttcttcatgaaggggcactttcctgatgaaggaactgaaggagatctgtcgacgccgaagtgcctggcaaacttcttaacagtagtatgcttgacggccatctgtttgtacctaactcttttctcatttgtgtggttcaaggtctatgttgtagcaagctgcgcttacctctcatttgttacctattactccatactaccaccccaactgataggttcaccagagggtgatgtcaaggccaaaaaggttgtgtagatgttgatgtaacttgccatgaaaactgtacatccgcaaacgatttttactgctggagtttctgccttgtgacatttaaggttccctttctgcagtaggaggtatgaatgtatgatagtgcgtatgtaggaattttctgtgattcatcagtgtgtgagggccctatctgaaggcagtaaactgattttagatatatgttcttaacatttttataaacaaaactagaccacatttgttacaaatattgaagatttatttatttattttatttgatctttgttctgatgcaaacaatcaaacattagctatatccaacttgaatatattaatacaaacaaccaaacaaaaacaaccaaacaaacg

SEQ ID NO: 25544 - DNA, 2979 bp, Zea Mays
ggcgattctatgtggagtcatcggtgtcggctgacaccaacgattttggcaaaatcacttataccccatgttttttcaccatggttgaccccaataaaaaaatgcattgaccccggcggctggtgctaatcactctatagactatagttaatcagcccagcagatagcaagcgcgagcgccgagcgccgagcggcccagcttgcccagttgattagtccttgcgtgtcttgcgatagcccacagcccagcagtagtccaccaacgaagcgtcgatctgtcttcatttctgacggctcgcggacggcgcggcgccaccaccaaagcgtcgatccatcttctcgtttctcagggctcgcggacggcgcagcacagttttatcttcctttcctcgccctcgccaggccggcaccggtaggctgcaaggtatcgcgccgccgcgttggacctcctccaagtctccaactcacgttatgccagggaaccaaagtttgatggaacggtttttgaaaagaaaattgcctccagctagtgactctaatgatcctggtgccgatggagagacatcaagaaggggagcaaatgcatcaaacactaaccttgaccgtacagcgagtcatcgtcctttgcgagtttcacgaaaccaggtaaactttgatgagcttccttacgatccagcagatagaagaagcatatctgattacataggacaaaagctccaagatgaaattagaaagaagtatttgatcagaggtccttttagaccacctgttggctttaaatatccacagaagatcatagcaggtcatgcacgtcggtttcaacctgaatggttcacaaaatatgattggttagagtacagtataaaagtagataaatgtttttgcctgcaatgctacttattcagagatagcaatgagggccaaggtggtaatgatgcatttgtaaaagatggttgggatggctttaacaaattgaaaaggctccaagatcatgtaggcaccggacctgacagttttcataacacggcagtaaaaagatgcgacaatttgatgaagcctaatcagtccattgatagtgctattggcaagcaacagaatatcactaaggagcagtatcttattagattaaatacttctattgatgccgtccgatacttgttgcatcaaggcttagccttccgtggtcacgatgaatcagaaaagtctaaaaatcaaggaaattttcgggagttggtgaagcttttggcaaagcaaaatgacaaaagaaataaggccctggggctggggaacgcccaaatgttggcctcagaaatccaaaaggatattgcaaattgttttgccgagataatagtgaagtctatcattgaagaaattggtggtgacgtcttttgtttattggtagatgagtcatctgatgtttctggtaaggaacaaatggctgttgttttgagatatgttagcaagcttgggttaataaaagagagacttattggtgtagttcatgtgaaagagacctcagcttcatgtcttaaatctaacattgatagtttgtttggcaagtatggattgagcataaaacaagttagaggacaaggttacgatggagctagcaatatgaggggtgaattcaatggtttaagagctttaatattgagggaaaatagctctgcatattacatccactgctttgctcaccaactccagttagttattgttgcggtagcaaaaaaaaatgatgatattagtgatttctttgatatggtatccttattaataaatgttgctggagcttcttgcaaaagaaaggatatgattcgagaatgtcagcaagaaagagttagcaaagccatatgtagtggacaacttagaagcggaacggggttaaatcaagaacaatcacttcaaagagccggtgacactcgttggtcgtctcattttaaaacccttcagaggttaagcagtttgttccctgatgtaattgaagttctccaatacgttgaaaaagaaggtccaaatgatgccaagagacgccaagcacgtggtctcatggactatttgatggattttgactttgtgtttcacttgcagttaatgttgcttattttgggccatgcaaatgctttgtcattgtcattacaaaggaaagataaagacattttagaggccatggtagaggtgaagttaacaaagcagagatttcagcaaattagggatgatggttgggattctctattagaggatgtgttatccttttgtgaaaaacatggtattccgaagttggacatggatcatgagtacattaatcgccacaagcctaggcaaagaaccaaccgaactaactatcaacactatagatatgattgcttgaaccctgttattgacttacagcttatagagttcaatgatcgtttcaatgaggtgaattctgaattgcttacccacatggctgcttttagtcccaataattcttttggtgcctttaaacatgagagtttgatggaattggctaaggcataccctgatgatttcagcccagtggaactagatgatctcagtagtgaacttcattgttacattgataatgtgagagctgatgcaagatttgctcaattgggtactatttctgagcacggtaaactaatggtggatacaaaaaaacatcttgctttttcattggtctatcggcttctcaaacttgtgctagttctccctattgcaactgcatcagtagagagatcattttcagcaatgaaaattgtgaagacggtcctacgaaaccggatcggtgatgactttatgaatgattgtgtcattagcttcatggaacaagaacttcttgatacaatttcaaataatgatgtgatagttcgattccagaagatggatggacacaatcgtagagtgaaattataaaagggtttgataattatgagtcgtaagtccgaccccggtggagatttatcctagattcgcccctgt

SEQ ID NO: 25545 - DNA, 1458 bp, Zea Mays
tctcccctcatcgcgctagccacctcctaactacccgcgctgatgcgcagcagcgcctcacccttcgactttctcctgtcgccggcgtcgttcacaccccttgccaggtccggcgcaggcccctgcctggctggacccgccccgccgcccaccccttcatcgccttcgttggatccatggctgccgcggccttctcggccggatccacgtagctgcgaccttcccggctcgatccgtcgttcctttggccggatcgcgtcttcccggctggatccgtcgctgtcgtggccttcccggtcggatccgtcgttccccttctattctgccgcgggcacggactctatgaccggtgcagacgcgtacgctgctgtcggcctccctggcggggctcctcgacgtctgtccttcactattctacagaagagaataacaaaaattaacccaaggattgtggacaattactatgcatggatttatagctagaggtcaatgaaagatatacctgccttagcctagaaaatcctcctgagccgaaagagggggagagcctgcttctacaactaacccaacaaaatgaacagtgggcaattgggcctccccatcgtcatcactggctcccacttcatctccatcctgtagtaactctttgatattaaattcatggtgaagaaattacccttctaggtgaatattgtccgggatgtaaaatgctacttctatatccatgtccacatgcagctgctgaacctcctcctcggaaacatgaccaaagcttccttcttcatcgaagatctaaatatcatcattatcttcaggaaaaggagggttataaaagacattatttactgcctgcactaagatttgttgcatcaaattttcttctggtagggggagagtttcttccaagagctcatttagatataaatatcttgtttgttagcttgagcaccatcaacattcccttggtttggtaacaccccttcttgttgttgggtcggggcaacattgttctggttctgaatgggtgcatttccagcctggcccaaaaaatgtaacaaaaaggaaccaccccattctcaggtatttttggtattgagtcttcatcttgggggatttagcccgacatggtatgttgaatgatctcgcattgcactgtccactatcgaccttgaaaacctttacactctgacaccaatatgaactaagggatcaagtttaggtccactactcgaacattcagtaagactactgatgatgtgttgatcaaactcccaactaatcaatctaccaaaaatctaaagggtaaccaagcaacataatctaggcttcttgattaaaataaatcgccctcatattgctatcttcattatgtttaataatcataaagaaaacatctctgtaggcatgaggatttgcaagtattagattatcaatatttctgggatgaacaaagcgaac

SEQ ID NO: 25546 - DNA, 2404 bp, Zea Mays
agcagacagaggatagcgtgcgtgaaagccgcccatggcgtccactgtccaccacaacagccaccaggcgctcctcctccggcctctccccactccgtctcgccacccccgcctctccttctcgccgcgcccagccggcctccgttccttcttcccggcttctggttgccgccttggcacgcatggcgttgcgcttgcagagccagagttcgttcccctacaggaggaggaggaggaggaggaggacgcccgattcgtcgtggtgaccttctacaaattcgtgcccctctttgacccccacgccgaggtcgccagacacctcaacttcctccagggacgcgacatacatggtcgcatttacttgaatgagaagggaatcaatgctcagtggccctcacaaagatgcagtggcatatgcagactgggttaagaaacatcatcagttttctgatatgcttgttcaaacctcaccagctgtaactgggcatgcctttcctagactgaaactacggtacaaaccatcacttgttcagttagaaggaggtagtttgcatcttccgttgctggaccctaacatgcgtgcgacaccattgactccatcagagtggaaggaaagacttgaagctaggacatgccttgatgtgtcctcaggcgaaacatctggaagggggcttttgctgcttgatgtgaggaatgattatgaatgggatgttgggcactttgaaggtgctcagcggcctaatgtggactgcttcagaagcacttcctttggactttcgggagagacagatcctctaaatggtgtagacaaagagaggacagatatactaatgtactgcaccggggggataagatgtgatgtgtattcaacaattcttaggaagaagggctttcggaatctgtatacactggagggaggagtgtcgaactatctcaaggtggaggggccagcagggtgggtgggaaatctctttgtctttgatggccggctctcgttgccaccagcgacattcaatgaggaagaagatgaggaggaacagcaggagaacaagaggtgggtggggtgctgctacgtgtgcggatcagaggtggtggagctgcggcaccgcaactgcgccaacatagactgcaaccgcctttatctgtgctgcggttggtgtgcggaggagctgtgcggctgctgctgctccgactgcaaggtcgcccctcggctgcggccgctgctgccaggccaccagagatacttgaaatggcatgtctaccgcgacggacggacggacgatgaaaacaaactttatggttttgttgacgatgacagcagtggcctgtgaggttgagatagttcacgactgaaaatccaacatcccaggagggaatactttgtcttgtcgtgtgcctacctacttttatacttggacagatgagtgagtgagagttcagagttgagccggctatgtttagagtcacatgaagcgttcagatgcaacaaactttatggttttgttgggtttcttacaaattccattccactttagacctcttgtttctaaaccatatggtatttttctcgaaaacaaaagagaactgcgcatcattgtattaagaagagaaaaaggtctaaaccgacaagtagaaaccagaaatttggagggattttatcaaacacatagcggttccgatgattccataggatccaaaaccctaaaataattagagaattgagaccctctttggctacaccttgcagctggtcacttaatctctcccaccactgcatactgctagattcacctggttgggggctgaatccctgcaaattaacctgaccgagcaaacgaaaccagaaatgcctagcaaagacacatccaacctgtcctcaggctcttgcggacaactttctggatggataagacctctcttttggagtcgatccgctgtccaacatctcttaaaagcagccaaccattgaaaaaaaaattgcatttgggaggggcccaagaatgccaaattctctcccagtgcccaaaattagtagaaccaatgaaaagactttcgtatgcagctttggcagaatactttccatctgttgcaaatctgaatatatgtttatcttcctgattctgcagcaggttaatggagcttaaaatgtcccaaaggtccaggaaatcaactagcactccaactgaaactgcacctctaatatctgtcaaccatcttctatctgtcaaagcctcctggactgatctagtgttcaaatttctcttgggcacagcagcaaatagtctaggagccaaatcctttttccttgcagccagcgatccttccagaaaagggttgaagaaccatttccaatttccgttataacagccacagaaaagaaagccttcactgttccagggatctg

SEQ ID NO: 25547 - DNA, 3329 bp, Zea Mays
atggccctggaattcaggtcagctgtttcggtccctttgcatgtgctgccattgttgcgtggttggcatcttgggttccctgttgctcgagttgaagggtgtgggcttggtggaactattggagaggaggaacatatggctaacaatgttgccagagctatgtaccttgatcatggtatcctggctcctgagtgttgcggtgttgccacggtttatctggatgtgtcttatgggtgtgcaacatttttcactgggcctatgcctgctactaaagaaattggatcacaacacagggttttgcacattaatgaagacttaaaagttccagaacaaagcactaagggtgctcgaaggaaaaatgctttagatcccagaaacattgctatgtctcgtccgcttgattttgctgtgcttaattacaaaaatcaaaggcttgcggaacaactggaagtccacaaatttgagttccgtgctcttgagagtagatttaatgatttaaaagagaaacagaggacacataatgagacacttatcctagtagaaaattattgggagcgagtgtttgtagttctctgctcctttcgaaattatatttatgatgacaagagatttacatgcatatctccagaactagctgtttaccaattgatgattgttaaagggcaggctttgtgccggatgctcccacacaagtgggatggtatatgctttcgcctaggagcaggctttttaaatggacttttagaggctggtgccagtgccacagaaagttcaggtttttccaattgtcaactaggaaatgacgtctcttcagaagaatcaacaacaattgatattctgcagaagatgttccttccatcaagtggtccatggcatgcgaataacgagttagcagggaactatcaaaaacaaagagattcgagtgcctggaacagagctgaacagaaacgtctgaaagaggagttgactagtgttgttgccaagttggaagaaagcaaacaaaaactggcagtactgaaagcacagggagacaataagcaagcaacaccgatccttgttcctatgctgggaaagaaaactgcagaaaaggtgggagataaacaaacagaactgcaagatcttgaagctacccacaaggagttaatggaatcgatttcaaagcgtctggaggaaattagaagactgcatacagagagaattggaattttgaacaatttagcgacttttcagaatatactgacggatttcaaaagcattcactcttccaaagcttttcaacttgtcaatgaccaacttcagaagtcacaagcagaactggatggtcaccaaacattgttagagaaattacaggttgacatggatacctttgtttggagagaaaggcaatttaatcaaaaagttgatttggctgaaatctcccagaaggtttctgcatactatgtatctagaattgctgatcttgaaaaggatgtccagaaactatgtaatgaaaagaatatgcttgtgctgaaacttgaaggggctttgagagaacctggtcggaatcaggttatctcagaatttaaagctctggtgtcatcgctaccgagggaaatgggtgctgtgcaaactgaactgtccaaacacaaggatgcttccttacagttgcattctttgcgagcagaagttcattcactttctagtatccgaaccagaaaggaacaagaaattgaagaaacatcaagatctgctcatgctggatctgatataagccaacttcaatctctggtccatgagctgagggaaaatacacaggagcttaaactatttgtggagttgtataagcatgactccgctgattccagacagctgatggaatcgagagacagggaacttgctgaattggctggagtccatgttctcagatattctcttaatgaaagtaaattagagcagcgtgtaattgcagccaatgaagctgaagcaatctctcagcagagactggcaactgccgaagctgaggttgctgaattagggcagaagctagaaacttctaggagaaatctagtgaaacaatctgatatactgaagtctaaacatgaagaatgtgaagcgtacatggtggagatcgagagcattggccatgcctatgaagacataatgtcacaaaatcaacaattgctacagcagattattgaaagagatgatcataataccaaggtatggcgacatggcgttgagattttcagtgggcttttaaaacttttcatggagggtgttaaagcaaaacagtcacacgatgctttgcatttggaagtgtgctcgttgcaaagaaatttgcagcatgcaagcactttgatggatctgtgcaaccagaaacttatccacctggaggacaagctaagaggttggtcagagcggttgaggagactgtcagaggatggaatgcagcaatctatttcattgggcatttctcaaacaaagcttaccggtatgcatggggaagctccaaagctcgggcaggcattgaatgttctacaagcgaaggttgggagcaatcggctggaagttgctgagctgcttatagaactagagacggagaggtttagtaaaaagagattagacgatgatttggatctaatgtcaagcaaagctagttctctaagagagaaggcggataattctcaagtccttcaaaaacttctccatgaggctaaggagtacaggggaatactgaagtgtggtatttgtcatgacaggcagaaagaggttgtgattgccaaatgctaccatctcttctgcaaccagtgcatacagaagtcgcttggtagccgtcagaagagaaggttggcgcctgtgtcgcacacaccagaactgcctggtgctctactgattcccggtatatggtaggccgccatggcggcggttcagttggtgatgtagcataagcttctctaggtacattgcacaccccccaaaaaaaaagtaagacgctgcatgtgattgctggtacccgctggcatatatgatgctggtgttacctcaagcgtctctcgcaaagtatgccttgcctttgcccagtctggtagaatagcctgacctcttcaaccattgcttattttttattcattgggagaaaaagacccaacaagtgaggatattgatgcttcccgcaatagtgagcaatgtttatatttgtagctttagttagttccattggtgtagccgacagtaaggatatagtttcatttcattttttatttttcctttttgaaatatactggttagccagtttgtatgtttcaggagattgacaatagtgagattccgttaataaaaaagaagtgaga

SEQ ID NO: 25548 - DNA, 4559 bp, Zea Mays
atggcgacgcagtcgcactcctcctccgctgccgcgatagacatgtatgagacggcctctcagccggacgcctccgttgccggcgacgcctacaccttccttgagttcaacactcagggtgacgaattcgactaccccgactttccggagctttctcaaccgccgccccgatcgacgccgctgacgtcttccatccccggcgctggcgcgtcgtcctcgtcgtggcctgccccgccgccgccgccctccgacgcggcctccgctgaacccgatctcacgtctctggacgtccccaccccgccggcctcctcctcctcgccgtcgccgcggtctgcctccaaggcgcgctcgttggctgcggcagatgggctcgcctccggggtagccgcactcagcttcgaggatcctgttggagccggcgccggagaggacgggtacgactacggcaagggagacttcgtggaacacgcctgccggtactgtgggatccacaatcctgcatgcgtggcgaggtgcaacgtgccctcctgccgcaagtggttctgtaactcgcgggggaacacctctggctcccacattgtcaaccacctggttagggcaaagcataaggaagtgtgccttcacaaggatagccctttgggagaaacaatccttgaatgctacaactgtggctgtcggaatgtatttcttcttgggtttatctcagcaaaattggagaatgttgtcgttcttttatgcagagagccgtgtttaagtgttaatgcactgaaggatatgaattgggatctcagccagtggtgccctcttattgatgacaggtgtttcttgtcatggcttgtaaaggtaccttcagagcaggagcagctaagagctcggcaaattagtgcacagcaaattaacaaagtggaagagctttggaagacaaatcctgatgcatctcttgaagatcttgaaaagcctggcgtagatgatgaacctcagccagttgttttgaagtatgaagatgcttaccagtaccaaaatgtttttgcgccactgataaaacttgaggctgattatgacaagatgacgaaagagtcacagagcaaggataatgtaactgtccggtgggatattgggttgaacaagaagcgtgtagcttactttgtctttccaaaggaagacaatgagttgaggcttgtgcctggagatgagctacgcttgagatatcctggtgatagctcacatcccacatggcaatctgtgggacatgtgattaagctcactgcacaagaggaggtggcacttgagcttcgtgcaagtcagggggtgcctactgagctaaacgttggattcagtgttgatttcgtttggaagagtaccagttttgataggatgcaaggagcaatgaaaacttttgctgtggacgagacaagtgtcagtggatacatataccaccaccttttgggacatgaagttgagcatcaaataatacgtaacaccctaccaagacgctttggtgcacctggacttccagaactaaatgcttcccaggttttagcagttaaaagtgtcctgcagaagccagttagtttgattcaaggtccacctggcactggaaaaactgtcacatctggtgcaattgtgtatcacatggccaaacaaggtcaaggacaggttcttgtatgtgccccaagtaatgttgctgttgatcagctggcagagaagataagctcaaccggtctcaaggttgttaggctgtgtgcaaaatctagagaagctgtttcgtctcctgttgagcatctcacacttcattatcaggttaggcaccttgatacctctgaaaagagtgaatttcacaagttacagcaactgaaagatgaacaaggtgaattgtccagcagtgatgagaagaagtacaaggcactaaagcgtgccactgaaagagagatactgcagagtgctgatgtcatttgttgcacctgtgtcggtgctggagatcctcgtctttcaaacttccgtttccgacaagttcttattgatgagtccacacaggcaacagagcctgaatgtcttattcctttggtgcttggtgtcaagcaggttgtccttgtcggagatcattgccaattgggtcctgtcatcatgtgcaaaaaagcagcccgtgcaggattagcacaatctctctttgaacgccttgttatccttggagtgaagccattcaggctacaggtccagtatagaatgcatccatgcctctcagagtttccatccaactgcttttatgaaggcacactgcaaaatggagtgactgttaatgagaggcattcgtctggaattgattttccttggcctgttccaaatcgcccaatgttcttctatgtgcagatgggacaagaagaaatcagtgctagtgggacatcgtatctcaatagaactgaagctgcaaatgttgaaaaaattgtaacaacttttttaagaagtggtgttgtaccaagccagatcggagttatcacaccttatgaagggcaaagggcatacattgtaaattacatgtcaaggaatggctctcttcgccaacaactttacaaggaaatcgaggtcgctagtgtagactcatttcagggtagagagaaagactacattattctatcttgtgttagaagcaatgagcaccagggaattgggtttctcaatgacccgcgcaggttaaacgttgcgttaactcgtgcacgttatggcatagttattcttggtaatccaaaagtactaagcaagcagccactttggaatagcttgttgacacattacaaggagcatgagtgcttggtagaaggacctctgaacaacttaaagcagagcatggtgcagtttcagaagcccaaaaagatatataatgatcggagattgttactgggcggtgctcaaggcatgcatggagctaacttcggggctggggcctcaagccaagcagcagataagagaagtggcagggggaaagcagggcaatcatttgtttcttatggccctccaaatggggtgcacaagcctggtgtgcacccagcaggttatgctgtacctcgtatgccttttcctccatttcctggggctccacattctcaaccatatgcaattccgactcggggtttgcatgggcccattggagctgttccaccggtgcatcaacctggaagtagaagttttggggcacctcgttcaaatactggtgggcctattggtggccaccttgctcatcaacagaattcccagcaagctatgggtggcattgggtcaaattttaactacgctggcatggagaattcgagtagtcagccttctggtgtagcccaaatgtcccaatcgggattaatgacacaggacttcattgtagatgattttaagagccaaggatcacatgtgccatacaacattgcagaattttctacccaggcttctcaaggtggttatggtgttgagtttactcaagcgccccaatctggatactctgggaattatatgaaccaaaacacacatcctggatactcccatattggtacaacaaatgacattgtatctcaggatcacatggcccatggatctcacggaatgtttacgcaagtggggtataatgatccgtcgcaagatgagtcatctcagattcattatggaatggctgctgctggtcccctacattcgcagagcatgatgaaccccttatactctcaatcctatgctcactacaacacccagccacattctcttcaacctcctccccagtgataattaaggcttgtgatatggtgaagccacattttggaagtttggtgggttgcatcttttggcccacatgttgtgcccttctctgctatttcagaatcgatggtgcatagacatcagatgcaagcaatgtgaacaagcatatgacacactttgtattggatgtttatcggggcaggcttgtacaagatggctatggctactgaccaacagccagcgccgaggagcacaaggattgcaatgtatcatgttcttgatcgttgtggttcactacccgtttagaccacaagaggggtcatattgtgcatcggaagaggttggcggcactatcctcatccctcacctgtatataaaggcaatctgggcctatagtggtacaatgtgaacatattccaggatttgctgccactcaagtcaagttgcagcaattgcatgcctccatggtgtagagtggctttgtataaaggtgctataggttgggtggccacaacccttttggatatcacacatgacaagatatttacctttacattttgtatgcatctgatatggttttgatatttatgccagagatgatttaggtgatggtaaaattagttagtgacgactggaaatttgggagtgttctgtgaaagtaaatttgaccctgaatcctgcgaggaatggctgatcatgaagtttattgtataatttggatagtccgttcagagatattcatgcataggtgcatcacatatttgttctttatctttctgcaagtggcacttttctgagtggtcaattctgcaatgaaatgtgcgtgt

SEQ ID NO: 25549 - DNA, 971 bp, Zea Mays
gtaagtattccgtgcccactgggggagaggtttatctaccctaccgtccaccactactattttaagccgtgtgccgccctgttcagaggtgatcatcagccttggcgaagggcttgagagatcaggaatttctttggccggtggcaaaaggccagcctggggctgggtcagagcgggtagatcttttgcgtttgggttggctggattactcgccgtccgcttagatgctcctgctggggatctcggctctgcttattttgttgcgccggtcgttcgacttgggtgcttcagccttttaacacttggaaagcatgcaatactgctgaatttcttggcttcttccgagtcacatgtcattgcttacgttctgcattagaactcgccagagatggagttcttcagcgagtacggcgatgccaacagatacaagatccaggagatcattggcaaagggagctatggggtcgtctgttcggctattgaccaacatacgggcgagaaggtagccatcaagaagatacagaacatcttcgagcacctgtcggacgctgccaggatcctccgcgagatcaagcttctccggctgctgaggcaccccgatatcgtcgagatcaaacatgttatgctgcccccgtcgaggagggactatagagatatttatgttgtgtttgagctgatggataccgaccttcaccaagttattaaggctaacgatgacttgacgaaggaacaccatcagttctttctctatcagatgctgcgtgcattgaaatatattcatactgctaatgtttatcatcgtgatttaaagccaaaaaatatattagcaaatgctaactgcaaactcaagatatgtgattttgggctagcaagggttgcatttaatgactctcataccacagttttctggacggtatgttatttttacagtgctactatggtcgatccacatcataacattttatcaaagc

SEQ ID NO: 25550 - DNA, 293 bp, Zea Mays
ttgtaatctgtgatgctagtgatagtgcaatgaaagtgcagctcctggagggaggggaagaggaaggggaaggggaaggggaagaggaggaagagggaggctagcaacattacttgggtttgagtggttatgggacttatatgctaggtgccttcttttgtatgaacatgaacatgtgatgattatggaccttctgtaatgattatgagaattatgttgtactcataatgagctcatgttggacttgctgtgttggttttgattgaacttgtttatgcttgtgtttgttgttg

SEQ ID NO: 25551 - DNA, 964 bp, Zea Mays
aacaaatttgtttcatacacgagtgcccatctaatctgtctcttcctgctgtcgcagtcgcaggacgcacctgcacgcgtccaccaagcccccgactccccgaggccccgacctgcgcacccacgggatccctacctatccggccgtcacccctccccctgcccctcccgagttggattgttcgcggaattggcggaggggcagccggatatgtcgtcgtcggttgggggcggcagcgcgggcggcggcggagtggacatggtcagcctgctggagaaggccaaggatttggaccagctaaagaaggaacaggacgaaatcgttgccgatatcaacaagattcacaagaagctcctcgcatccccagagatggttgataaaccagttgacaccattttgctcaagcttcgtggtttatatgcacgtgcaaaggagctctctgagaatgaaatcagtgcctcaaatgctttgattggattattagatggtttgttgcaatctggagcttcaactgcacaaaagaaaaagatagaagttggtgagcagaaaaagaagaggatcaagtctgatacagattctgcacgattttctgctgcatctatgaggaatcaacttgaccaagctgcaagccttaaaggagagcaggttgctgctagggtaaaatcagatgacgaaaaagatgagtggtttgtcgtgaaggtcatacatttcgataaggaaacaaaagagtatgaagtacttgatgaagaaccaggtgatgacgaagagagcactcaaaagaagtacaagttgcctatgtcttacattattccatttccgaagaaaggggatccttcgagtgccccggattttgggcagggtcgacaagttttagctgtttatcctggcacaacagcattatacagagctaccgtagcttctcatcgtaagatggcccaagctccaagtatgatcaaagaattca

SEQ ID NO: 25552 - DNA, 4383 bp, Zea Mays
cggcagcccccaacgccatccacacatcccccggcaaaatccttacccaccgaaaaaagggaaaaatggaggcaggcaggcggcactgcggcagtcacacatgcgcacgggcacggtaaaagtacgagccaccttttccctctcgatcgagcggccgaggaggaggagagcctctctgtctctggcgaggggcgactgggcgagcgcttcgtctagacagcccagctgcgcatttggatgcaaattacgtgtggaggatggagtaaaatactgagcaagggagagggaagaggagacggtcttttcttttcttgagccgaggagggggatcaggtggagtgagcgagggggaggttttgccgccggcaatggagatgaatctccgggcggagagcccactctgctcccggggccgccccgccctcgtcgtgcgcccggccgctgcagccactggcctcgcgctgtctgtcgtaaggtgcagcagatttacgagaggcgggctcgttcgatgcatggtatcaagttcagattatcccaagaggaatccgaggagggcatcgacttctaagagcaagggcgttgcctctggagggtatgcttcgagacctactgctgaatccagtacgaagaagatagaacagagcaggaacaatgaaggtgatttcagcagagccaatgggtcactctatggcgaggcagcagagcaggcaagtactgctgaagaatcgtctcaggtttacatgacaggagacattttaagtggcgcagaaagggacggagctggtaccgaagaagaggctgaccaaaatcaatcttcagcgttgccttccgcgtccatggatgatgactcaatcgaccggcaacttgatgagtaccgtggtaaaataagtgctctagtaagttccaaacctgaaccttcgtcacttgcaagtgttgctggacaaaacgaatcagttggcggttttcacggccagcacgaaccaataactggttctgaggaacatggcagttcaattgttgatgcaccaacaaaaggcaggctatttgctgaggccgttgtgggtcataaggattttactgaatcagcagcaggaaaggcaagcagcgagaatgaggaagggcaagctgtctcgttagaagatgatgtcgggataagtacagacgcagatgaagagcttccggtatctgaagatgatccagaagtgctactgaggaggcttcaagagcttgctgatgagaattattcgactgggaacaactgttttgttttccctgaagtagtgaaggctgattcgatgattgatctttacttaaaccgcagcatgtcggccttagctagtgagtccgacgtttttgtaaaaggagcattcaatggttggagatggaaccgtttcactgaaacaatgcatagaagcgaattaagaggggattggtggtgctgcaagctctacattcccaagcaggcatacagactagactttgtattctttaacggtgacactgtctatgaaaataacaatcacaacgattttttcctggaaatagaaagtgacatagatgaacactcatttgaggacttcttggttgaagaaaagcgaaaggaactcgagaggcttgctgcagaagaagctgaaaggaaaagacaagctgaggagcggcacaggagagaggaagaaagggccgcgatggaagctgacagggcacaagcaaggtctgaggtcgagatgaagaaagagaaattgcgccagatgttgagttcggctagcagatatgctgagaacttatggtacatagaacctaacacctacagaggaggagacagagttagattgtactataatagaagctcgagatcactaatgcataacactgagatttggatgcatggaggttataacaactggattgatggactctcaatagctgaaagacttgtcaaatctcatgaaaaggaaggcgattggtggtatgtagaagttacattacctgaaagggcattggtgttggattgggtttttgctgatggaccacctgggaatgcatggaattatgataacaatggaaggcaggattttcatgccatcgttcctaataacatatcggatgatatcttttgggtggaagaagaacataggatctttacaaggcttcaacaagagagaagagaaagggagagtgccgaaagaataaaggctgagagatctgcaaaaatgaaggctgagatgaaggaaaagactatgagagcgtttctgctctcacaaaaacatattgtgtatactgagccactcgaagtacgtgcaggaaccactgtggacgttctttataatccttctaacacagtgctgaatggaaagtcagaggtttggttcagaggttcctttaaccgttggactcatccaagtggtcccttaccaccacagaagatggtaaaggctgagaatagttcacacttacgaacaacagtcagtgttcccctggatgcatatatgatggactttgttttctctgagtcggaagaaggtggaagatatgacaataggaatgggatggattatcatattcctgtgtctgattcggttgcaagggaacctccaatgcatattgtgcacattgcagtggaaatggctcctatcgcaaaggttggaggccttggtgatgttgttacaagcctttcacgagctgttcaggatttaggccataaagttgaggttattctgccgaagtatgattgtttaatcctaagcagtgtgaaggatttacactaccaacaaagttttgcttcgggtggcacagaggtaaaagtatggtttggaaaggttgaagatctgccagtttacttcttggaaccacaaaatggcatgttttgggttggatgtgtctatgggaagaatgatgagagtagatttggcttcttctgtcattctgctctggagtttctgctccaaaaaggatcttctcctgatatcatacattgtcatgactggtcaagtgctcccgttgcttggctatacaaggaacagtatgctcttaatgggatgggaaatggtcggattgtatttaccatccacaatcttgagtttggagcgcatcacattggcaaggcaatggcacattgtgacaaggctacaactgtctctgatacatattcaaaggaagtggctggacacggagctattgcacctcactactataaattccatggaattcgaaatggaattgatcctgacatttgggatccatatactgacagatttattccggttcattatacatcagagaatgttcttgagggcaagagtgctgcaaaaaaggcattgcagcagatgcttggattacagcaaactgatagccctgttgttggaatcatcactcgtctaacagtgcagaagggaatccaccttatcaaacatgcaatgcatcgagctcttgaacgcaatgggtggttttactgggttctgcaccagatcatcgcatacaaggtgactttacaaatttagccagtaagctgcatggtgaataccatggccgggtgaagctatgtttaacctatgacgagccactgtcacatttgatatatgctggcgcagacttcattcttgttccttccatcttcgaaccttgtggtttaacacagcttattgctatgcgctacggatccatcccgattgttcggaaaactggaggcctgtacgacaccgtctttgacgtcgacgatgataaggatcgggctcaagcacaaggcctcgagccaaatggattcagtttcgaaggagctgatagcagtggcgtagattatgctctcgacaggcaagtataaacaacccatctgaagttgcgtaaactacagtgctgtaacacactaacgcttcttattccacctgcccgtcattttatctcagagctataaccgcgttttatgatgcccgcgactggttcaactcccttagcaagagggtaatggagcaagattggtcatggaatagacctgcactagactacatggagttgtaccattctgctcgcaaaaactgatacatattatcacaagagaaaacaggctcagtttgcccagtttatgagcatctcagcctctcaggcctctgtgcaaattcaatttgcacactgggaagaaaaagagtactgattggccttgtggttgtgcatgaccgccgtccaaggtccaacgatgcaacacagagtgtatagttagagaatgtcacccgttgtacgttactgccgttacatgcatgtgtatacacatcaggtagtttgcaaaacaacattacgcgtatcccggccggctaccctgccataggctctgtctctttcaatttcaattaagaagaatgtaattgacctagttttagaaaaattggctccaaa

SEQ ID NO: 25553 - DNA, 3380 bp, Zea Mays
tgacaactttactacccgtctcgcgcgagcggaacacattccgcttgtcctctctcgccgctgctccgacgagctcgccggcgccgactcccctcccgtcggaccagcccgccgaaagcggccggacgaacgagaggcttccctcccctcgcacttgcctgcctcgtcgccttcctgagcctctttctgcgcccggccacgggctcgcggccccacgcccgagcacgtgcagcaggcgccgaacccgcctcctgtgccaccccatcggagctcgccggccacgtggagggattccttttcctcgcagcattcctcgtcgccgacggcttcgtcgtgctccaggggttggattggcgtggagcggagagcagtgcaaacctgggattgaattctggtgtagatggattccacagctcttcaatatgaaaaccaaaaattggtgcaacaactggaggtacagaagtccgaaatgcatgcattggagcgcaagttcaaggagcttagtgatgatcaatgttcttatgacaagactctgatttctttgaataaactgtggaatcagctgattgatgatttggttctgcttggagtacgggctggtggggatttggataatttgcaagcacttgaccatgaagagttatcagaagaatctttggagtcgtgtccttccgaggagatatttctcttaaggctcttgaagacaaacaacatcagagataatagtgacactagcttgttgaaatttgttgaagaagctcttgcttttcggtcttcagcaactgttactttgatgaagtccctgcaagagactatttcttcgcagcaagctagaagtgagtctttgtctttagctttgaatggacaaaagtcaaatgaagatgttattgttgcccttcgaaatcataatgattgcttgaaagaggtggcagagaatgcgagtcaagccatctctattatcaacgagaagcacaaaaggtatcttgatgagattgaggcttttaaaagcaaccattcaagggagctacaggaaatcaagcgtatttcaggtgagctagaggaaagcattgcagagcttgaggaaagtcaaaggaagttggttgtgctccagttgcagaggcatggttctgtaatggatgcatctggggcaaatgctgtgaatggtggtatttctactcataaatcttcagataaaagtatgagctggcaagacctcaaagatgctgttgacgcagctaagaccctcgcaggaaaccgtctattagaactccatcagactcaagaggataatctgatactatccaaggagctgggagatcttgaggggcaattgaaagatgagaagtatgtcttggtatccaaaccgtacatgattcttaatgataaactacaacatttgaatgctgagatagagcgttatagagggttggttgaagttttacagaatgacaaggaccagctcatgcaaagggagaaagaaatttctgcaaaagcagaatcgctcgacagtgttaaacaaaccattatcacatatgagaaaaaaattgaagaactggaaactcaaattcagatactcttttctgaaaagaatgatctcgaaaccaaggttgaggagactttgcaagattcaggtaagaaagacttcaagaatgagattcatgttatggctgcagcactctccaatgaactgggtatgatggagaatcagttgagtcgatcaaaggatgcagcttctgaagcacttgcattgcgtgagcaagctgaatcattaagatcattggtagctaaaaagattgaggaacacaagaagatttcggataaatacaactcacaagtaattgagatcaagtccctcaaggcattggaaaagcaggagctggagtttattgcagatatgtacgtgaaagaaagttctgagtctaggacaattgctgatattgaagaatcagaaacccgagctcgcaatcaggctgaatatttgaggagcaatctagaggagcatagtcttgagcttcgggttaaagcagcaaatgaagctgaagctgcatgccagcaaaggctttcctttgctgaagtggaactagaagagttaaggaccaaagtagatgcatctgaaagagatgttgtggaacttaaggaggcaataagaattaaagaggctgaaggagacgcctatatttctgatatcgagacagttggtcaagcatatgaagacatgcaaacgcaaaatcagcatcttcttcaacagcttactgatagagatgactttaacataaagctagtatcagatagtgtgaagatgaaacaagcttgtagttcccttctctctgacaagcttatgctagagaagcaactccagcaagttaacacttcactggagtcatctaaactgaaaattgcccgtggcgaagagcagatgaagacttgtgtagcgcaagctataaaaacttcagctgaaaacagacatcttactattagcctggaaaggattgcgctggagttatccaacacagataaggaactcaagtggcttcggtcctccgttggatcctctgagaaagaatacgagcaaactcagcaaaagatatctgagctgagagcgttactggagcacgagaggagtgagaggcggcggcttgaagaacaatatgaagaggtgaaaaatgaagttatggagctgacctctgagactgaagagactactgtccggaaacttgaggatgaaataaaagaatgcaagggtattctcaagtgtggtgtatgctttgaccggcctaaagaggttgtgatcaccaaatgtttccacctattctgctcgctatgcatccagagaaacctcgagattcgccaccgaaaatgtcctggctgtggaaccccattcggacaaaacgacgttagggaggtgaagatatgaacctcaccaaagtgacagtgacaaaaccgacttgcgtgtgaacagcagcaacaaactcccttgtgaatatcgtctgttatgttggcgaacatctagatctaacttgctttattactgggattaaaattaggataagaactggaagaagtgaagttcctaatttatttgctatcgtgtgtgctatgtatgattacccttggcagcgagtggtgtatctgctgggtgtcaatatgctcgaattctagctcctccctgctagcgggtgcatgccagttttattaaggctattccatgtacatggtgtcacactctttaatacataccacataggatgaaaatctgatgtgacatgtgattgaaacatagggagacaccactcatgcaccagattatagacattgaaatctgaaccatctaaatgaactgtaactcatactcttatatatatctaacattttgtcttgtg

SEQ ID NO: 25554 - DNA, 2981 bp, Zea Mays
gtgaaaacggaagtgccctgccctgtcaccgaggatccctgcccggtgctgagcagagctgacttttgctccgcttgcccgctggccttgccccagcctcatattctcctcctccttcctgtagctgtagctttcaccccactcccatagtccctctccctccagggcgccgcgcctccctccctttccctaatcccccgctaccgcggcgcttccccctcccccgctccctccacaattaggccagtagcccgcttgcagctgcggcgtcggtcgggaagaggccttgctccagtcccgcagatcgggggaggcgctcccccccgcccccgcctcgtcagctcggccgcttccccgccgccggtccctcccggaggcgccagcgtcgccgatgagctgcttcgtctgcttcgggtcggcggcgcacgacggggagtccaggaagccccccgccgcgggcgccggcaaagacgtcccgccggatcgcgcggtggtccgcgtcggatcagacaaatcaagatcacagggtggaccagaatctaagaaggacctgattatacatagggatgggaatagtcaaaatattgcagcacatactttcacttttcgtgaacttgctgcagccactaagaatttcaggcaagattgccttttaggggagggaggttttggtcgtgtatataaaggacgcttggagaatggacaggtaagcatatctgaaacatgacgcattgacattttgattgtaaagctaaatcctctcaaatttggcttctgagttgaaacattaagtaaaatgttggtgggaaatgctaacataacgattatacttgcgccctggattagccctggatactaacagagttttacttcccaggctgttgctgtgaagcaacttgatcgtaatggcctccaaggaaatagggaatttctggttgaggttctcatgctcagtctcttacatcacactaacctggtcaatctaattggctactgtgctgacggtgaccaacgccttcttgtttatgagtttatgccattggggtcactagaagatcatctgcatgcatgactgtaactgcgcgcttaggttgatagatcgtaattgttggttcagcttaaaatgatcggcatgcatgttgtactactgttggatctatcgtataggtagggtgctatttttttgtattgtgtgcctggccatgtaaatttgcatgcactatctatattaaaaaaaacctcgaccagagggagagatgcccctatgattttgtttttaagaagtttgtgccacccttcaaacctgaactggtgatggggggtttcatcaacccccagacttcaacggctaactagtgtaactcgggagaagttggcttttcataggctaaaatgaatatgttgatgttttctctctcttccatttctttgcattcagttcacgggtcttgtaactgaaaagtatttatttgtgtagatctgccaccagataaagaacctctagactggaacacacggatgaagatagctgcaggtgcagctaagggcttagagtaccttcacgacaagacgagtcctcctgttatttaccgggattttaagtcgtcaaacattcttcttggagaaggatttcatccgaagctatcagactttggccttgcaaaacttggcccggttggtgacaagacccatgtttcaacacgtgtgatgggtacatatggctactgtgccccagaatatgcaatgactgggcagctcacagttaaatccgatgtgtatagctttggagtcgtgttccttgaacttatcacagggcgcaaagcaattgacaacaccaagacccaaggggagcaaaacctagtggcatgggctcgtccactgttcaaggaccgcaggaaattccctaaaatggctgatccaatgcttcagggccgcttccctatgaggggtctatatcaggccttagctgttgctgccatgtgcttgcaagagcaagctgctacacgccctcacatcggggatgttgtcactgctctctcatatctcgcttctcaggcttatgacccaaacgcccctgttcaacacagccggagcaacgcatctacccccaggtccagaaaccctgctgcatggaacggtgatcagcgcagtgtgcgctcgcctaatcatcaccattctccagacccgcggcggagggaccctgccagggcatccaagtatggagcagaggttagcaggactagctctgccagcgattctggccggcggtcaggtctggatgacatggacccgaccgggtcgcaagtgggaagcccagctcaaaccggaagaagaagagaagctccaagggccaccgacagacagcgcgctgtcggagaggccaggatgtggggggagaactcaagggagcgaacgaatggccatggtagcttcgacagcacgcatgagtgaagccgtcaggttccactccaggcatcatttcagacgaacgatgggtttgagcccactcatcggcaccggtcggatctgatcttgggacatggcgtggtgccgcccggtccgggtgtctgtgaataaggctctctctcttgccctcatgtggcgaatgcaattctcctcatgtccatcccttccgaaggcgatgcttccggcgacggggagcctgaggagcctcctgtaggattcagtcagaggtagacaggtcagtgaagaaaaaggatgcgcggagtcacattggcgagtgtgtgtttttggtggctagagctgagtattttcagctgcatgtatccttttttgtgtatgggtaagagcaaccgtgtcaggtttggctacctgagagacctttgaagctagccagctgctgttgctgctgcttctgcttcttcctccccccttttgggagttcagagctggaatgtaggtaggataggcgatgatgttgagtacagcaactgttttacacccttccatgttgaacagta

SEQ ID NO: 25555 - DNA, 2162 bp, Zea Mays
ctgaactgagctgtgcttcttcttcatttcttttggaattctagcaagtcttctggagaatataatccacatctgtttattttgctgcattttggtatggacgaatctgcctgtagatccactgccccagttgggtttcttagaagaggttcgggcatttccttgagaaatcaaagcaatgaggataggtcaaatcagtacaacaagcagccagggaagagttcaaatcccaatcctgtaaaattacggttcactgaaaataaagagaaaccaaggtattttcaagggacatttcattcatcaggctccagggcctcatctgtaagctcttcaaaagctcctgctagaaaatactgcgacgagagacagaaacagccctttttggcagagacagacattgctgaaagcagtaacagaagaactgaggttagacgcctacaaagtggcaagaaagcttctgtatttggtgatgggcatccatacacacagaagagtatctcagaagcttcatcatcctcaacaattactggaggcttgccagaagagcatgatcttggagctttatatgtttctggttcttcaggtagttctgcacatccagttaatcccaggaatgctgcattgaatgcttcggcacatatgcaaaaggataaagaagaaatgagttcaggtagacctcaaggtgctcccacttttgttcgtcggcatactttacctcaaagtttttccactggtgtcaagtcaccaactgcccctggcactggagcacagagacgtggcctcaaaaatcttggttgcacttcaatatctgatgttctgccttcaggatgctcttcatctgattctgctcgtgataggagaatcgaagttacaaagaagagaacttctggtgcaggaagttcttcaagatcaaggataagtgaacaatctaatttcagtcagccacgtgctagttatcctggcagtactggtcctagagctagagctgctgaacaatcagcttctcaacaaacagcaaggaccaatagccgaaatattccggatcatacagattcaataaggactagacgaccttttactctacgtgccagggagaggatgatgccaggtgaaagggaggacagtgtatttgctctgcatgagactgttgcaagcattcatccagaatgcggacattttcacatggatggtactcccccagagagattaggaagacccttttatgcagaactacctcatgcaatttattcatctaatcgtcaaggatcaagtagtcagacagcaaggagaagatctacgtctcgtactgaagaaagccctcaacggatgtttcatggtatgttttgggagagagatggctacagggggataaacatggaaggaattgcacaggcgttgctagcattggataggattgaacatgatgttgaattgacttatgagcaactgcttctgctagaaactaatctgctcttaagtggccttgatttgcacgatcaacatgaagatatgagattggatatcgacaatatgtcttatgaggaactgcttgctttggaagagcatattggctcagtgactactgcccttactgaagagcaatttaccaagtgtgtaaaccaaagtgtgtatgaagcaagaaattcttatagagatgtaagcaagatcgcagcagatgatgtgaaatgtagcgtatgtcaggaggaatacgttgatggtgaagagattggtacaatgcaatgtgaacatcagtaccatgtgcgctgcattcacgaatggcttaagcagaagaattggtgtccaatatgcaaagcttcagctataccttcagagatgaccaagggagacgcatgaatcttggcccaaacttgtaaatagcgtggatttattattagacattgtagatgctgacgcagttcaccccaatatgtggatacgatagtctctcccgaacggtcgaacgcctggaaccttttgttactgcatcttttatcttcttagcacacccttgctgcttgacagcagtacgggtcagaaactcgaaaataaccgtggttctcaagaaatttttccagattctaaatatgaaattgttctccttgattgaaatgttgggttacatggtttatctaaagaccatctccagcaatttacccatatat

SEQ ID NO: 25556 - DNA, 354 bp, Zea Mays
catttcaatactatggctgatttggtattgaacccaatttaattccatgtcctccaatatcgacatcgaaacagagcattggttgaatagcaaccagcatggaggaagggtaccttgtttcagcgcatgaattacgagattcagaaggctagaggtccccgctgggacaattatcgagcatctctcgctttggcgcttcgatctgcgagcatgcacaccacctagatccacagcggcgactgcgtcgcgccccctcccgacgcttcttggtcccggtccctctacctccaccgccaacgatggagacgtctacgccctcaagtagtattatgtatctcatcttctattttaaat

SEQ ID NO: 25557 - DNA, 5516 bp, Zea Mays
cttggtctagagatgagctacgtcttgtctatggtgtttctgagcgtacagaaagcgatggtgcagctaatttaattcagaagttgagagctataaactatgctctgggtgaactaggacagtggtgtgcttacaaggttgcactgtcattcttgacagcactacagaatgatgaaagggccaactatcaggttgatgttaagtttcaagagtcatacttgagaaaggtagttgatttgttacactgccagttgactgaaggggctgcaatgaaaagtgacagtaatgatgttgaaatgcataattctgaaaaccccaagccaaatgaacttgaggagggagagctacctgacagtcatggtgaacatgtagatgaagtcattggtgccgcagtggccgatggaaaagttaccccaagggtgcaagctttgataaaaatacttctcaagtatcagcacactgaggattttcgtgctatcatatttgtagagcgagtggttacagcattagtcctccctaaggtctttgcagaacttccatcgttgggctttatacggtgtgcaagcttgataggtcataacaataaccaggagatgcggtcgtgccaaatgcaggatacaatcacaaaatttcgtgatggccgtgttacactgttagttgcaactagtgttgcagaggaaggacttgatattaggcagtgcaatgttgtcattcgctttgaccttgcaaagactgttttggcctacattcagtctcggggtcgtgctagaaagcctggatctgactacatattgatgcttgaaagaggaaatatgtctcatgaagctttcttgagaaatgctcggaatagtgaagagacattgagaaaagaagctattgagagaactgatctcagtcatctcgatggcacttctatgctaagccctgttgatatatcacctgattctatgtatcaggttgaatcaacaggtgccgttgtcagtctgaactctgcagttggactcgtacatttttactgctcacagctgccgagtgacagatactctattcttcgaccggaatttattatgcaaaagcatgagaaaccagggggttcaacagaatattcttgcaaacttcaactcccttgtaatgccccattcgagaaacttgaaggtcctatatgcagttcaatacgcctggcccaacaagctgtttgtttagctgcttgtaagaagctacatgagatgggtgccttcacagatatgcttttacctgacagaggaagtggggaaggagaaaagactgaacaaaatgatgaaggtgatccactgcctggaacagcacgccatagagagttctttcctgaaggggttgctgaaattctacatggagaatggattttatctggaagagatggttaccaaagttcacagtttattaagttatatttgtattctgtgaactgtgtaaacattgggacttcaaaggaccctttcgttacacaactttcaaattttgctcttatttttggcaatgagctggatgcagaggttttatcgacgacgatggatctctttgttgctaggacaataataacaaaggcatctctcgtattccgtggaccaattgaaattacagaaagtcagctgatcctgcttaagagctttcatgttaggctcatgagcattgtacttgatgttgatgttgatccctcaacaactccttgggatccagcaaaagcatacctctttgttcctgtgggagctgagaaatgtatggatcttttaagagagatagattggactctagttaatagcattgtgaattctgatgcctggaacaaccctcttcagagggcacgcccagatgtctatctaggcacgaacgaaaggacacttggaggggataggagggaatatgggttcgggaagttgcgccatggaactgcatttggacagaaagcccaccctacgtatggtatcagaggagccatcgctgaattcgatgttgtcaaagcgtctggattagttcctggtcgtggatggggacattttaatgattatcaaaataaaggcaagttgttcatggcagattcatgttgggatgccaaagatcttgctggaatggttgtaactgccgcccactcaggaaaaaggttctatgtggacagtatttgctataatatgaatgcagaaaattctttccctaggaaagagggctatctgggtcccttggaatacagctcgtttgctgattactacaagcagaagtatggtgtggagttagtttataagaaacaacctcttatacgggcacgcggtgtttcatactgcaaaaatctactttctcctagatttgagcattctgaagctagcaatggagagttctcagagaatcttgacaagacatactatgtatatttaccacccgaattgtgccttgtgcatcctctccccggatcacttgttcgtggagctcagaggttaccctcaataatgagaagggtggagagcatgcttcttgcaattcaactgaaggacataattgggtatccagttcctgcaaataagatattagaagccttgactgctgcgtcatgccaggagacattctgctatgaaagagcagagctgctgggtgatgcatacttgaaatgggttgtgagtagattccttttcctaaaatatcctcaaaagcatgagggacagctcacaaggatgcggcagcagatggttagcaacatgatcctgtatcaatacgccctgaataaaaacctccaatcttatatccaagcagatcgatttgctccatcaagatgggcagctccaggagtgttacctgtatttgatgaagaaacgagagattctgaaccatccatctttgatgaggaatttactcctagcagtgagttacaaaagaacttgtatgatgactatgatggcgatagcatgcaagaagacggtgaaattgagggagattctagctgctatcgtgttctatcaagcaaaacattagcagatgttgtggaagcacttattggtgtctattatgtagctggagggaaaattgctacaaaccatctgatgaaatggatcggtattaatgcagagttggatcctcaagagatcccatcttcgaagccatataacatacctgagagcataattaaaagcatcaattttgacacattagagggtgcattgggtatcaagtttcagaataaaggcttacttgttgaagctataacacatgcatcaagaccatcatcaggtgtttcctgttaccagcgcctggaatttgttggtgatgctgtattggaccatctcattacgaagcacttattttttacttatacggacctacctccaggccgcttgactgacttgagagctgcagctgttaataatgagaactttgcaagggttgcagttaaacataagctacatgtacatcttcgccatggatcatctgcattggagacacagattcgagagtttgtgaaggatgtccaggaggagctttcgaaaccaggtttcaattcttttggccttggggattgtaaggctccaaaggttctcggagacatttttgagtctattgctggcgcaatattccttgatagtgggtgtgctacctccgtagtctggaaggtttttcagcctctgcttgatccaatggtgacgccggacacccttccgatgcaccctgtaagggagctccaagagcgctgccagcagcaagccgaaggattagaatacaaagcatcccgtacaggcaatgtagctacagttgaagtcttggttgatggcatacagattggtgtagctcagaacccacagaagaagatggcacaaaagttggcggctagaaatgcacttgttgtcttgaaagagaaggaaaccgcagcaaagaaagacactgaaaaggatggcgagaagaaaaacggttctcagttcactaggcagactctgaacgacatctgcttgagaaggcaatggccgatgccacagtacaggtgtataaacgagggtggccctgcccatgccaaaagatttgtttatgcggtaagggtaaatacatctgacagtggatggactgacgagtgcattggagagccaatgccgagtgtgaaaaaggccaaggactctgcagctgttcttctgctcgagctgctgaatcgaaattaccgtggcaagcctgatggaaaataatctttggtgatgttctgtggtggtaggtagacgtggaagcatccatcattctgattatacccccatgcagtgcttttcagcaaagcaaattaatggcctttgttgatgttcttggtggcggtattggtgatatggaggcattcaatgcaagcataagcagagctatggggagtgggattagaggattattattagttttgtctgaggtgactactaggtattttactggcgaggtactgaggtcacaactcacaaatagcagttgcaaattgcaatagaggaaatgatgataggttgatataggatattggaggcctcttattcatcgattgtataagatgtttacagaacagtgcattgatccattaaatttatattgattgatatttttatagtggatgcgcctgcagctgggaactcggggttctctatcttggcctcgccgaccaaatatcacgtacgtcgacgtccgcgaacagtatatatatggtaggcttggcgggcgcgaacctgccgccgccgacggcgagcgcgagccagctgacgcaggcgttcggcgccaaggggctgagccaggccgagatggtggcgctgtcgggggcgcacacggtgggcgcggcgcgctgcagctccttcgcgccccgcctctactcgtacgggcccagcggcgcggggcaggacccgtccatggaccccgcgtacctggcggcgctggcgcagcagtgcccgccgcaggggaccggcgccgccgacccgcccctccccatggaccccgtcacgcccaccgccttcgacaccaactactacgccaacctggtcgccaggcgcggcctgctcgcctccgaccaggcgctgctcgccgacccggccaccgccgcgcaggtgctcgcctacaccaacagccccgccaccttccagaccgacttcgtcgccgccatgatcaagatgggtgccatacaggtgctcaccggcacagccggcaccgtccggaccaactgcagggtggctagctagctagctcatccatgagaatgtacctgtagactcatgtgcttaaaatcatacgacgaaactgtacgtacggcgtagagtggtgtggcggggtccaatgattcagattgtacgtacgtgtccatcgatccaactgtagttgtgtacgcagtacagtacgtgctagctacggatcagttgcttatatatagcttgtgcgtttttttacactttcttttgtccttttggtttataatttttattaagatatacaaatatttctcttcagattcggatcgaatacaaatattaaaaatggttcgttctttttca

SEQ ID NO: 25558 - DNA, 867 bp, Zea Mays
acgactgacagtgaaaaaataggaaatgactcgtcaacgcaactaccccaagtcgccgctgagccactctctccgtccgcgaatccgtaaatggaaggggacgaaatgctcagggtgaagctcggcaggcagggccttgaggtgtccaagcttggcttcgggtgcatgggcctcactggagtgtacaacgcccctgttcctgaccaagctgggatcgacataatcaagcacgcgtttgaggccggcatcaccttcttcgacaccgctgatgcctatgggccacacaccaacgaggtcctgctcggaaagtctaaacatccaagatattctggggaaaacttggagaagaataaagttctgtatacacgacttgaaatgttgtccaagaagtatgggtgcacacctgctcaactcgctctctcctgggttcttcatcaaggagaagatgtggtccccatccctggaacaacaaaagccaagaaccttgacgaaaatatcggtgctgtaaaggtaaggctgagcaaggaagacctcgaagaaatctcaggcgcattccctgctggtgaggtggctgggtctagactccttggagtcttggagcctttttcctggaggctcgcaaataccccgcctccaaaatagcgagttcagatgcaaattcttggccatcctaccatttaggtcatgttatgttagatcatatctacatgatgcaaatgattgttcctgtgctcgcgcgtgaaaatgcatgtacctgaaacaaagagatgtaacagttggttctctgtgtggaacgtgctgattgctatagttgatcaaagaaatacgttggaattaagctaaatgtccttcatggtgcactttgat

SEQ ID NO: 25559 - DNA, 895 bp, Zea Mays
gaaattacgtatttggccccgcgccgcacgccctcttctcgtgctccagcggattcgctaggccgcgagcctccaaaaccctaaccctaaatttgggggcgcttgggtcaaagagacggggggaggaatcgagccggcggcttgcggcggcatcagcgatggcggcgaagcgggagatctcgagcaccctcaggaacctcaagcatagttatcatggagggtaatcctcatccaggagctataaagggtcggatgtctttccaaaatttcaatccatctatcgataaactaaatgaagaggcaagaggtgaccagcaaacagaatcagcttcccccagtaactgtgaccaagacaatgcaaactccagcagagggaatgaagttccagcatcaagatgtagagattttggcattcccagttcagaaagcatatctctaaatgaactgaagaggaaggagcccgaccttgatatggaaacaccggcatcttacaaggaaccaaaaaccaatgttggcggtaggtcatcttcacaaagcaatggtcgcggatcacacaagtccaacaagcgtgaaaagctcgacttcaatcatctaagaccgaagaaatgaaaaatggtgttcgagttagctcttgtactctgtttgtagctgtacccaattggccatctgctgtgttttgtcgattatatctagagagctggtaaccatgtccatgtgaccatgtggcatgcattcttagtgagattatgtggtgttaatcatttttctttctattgatgtgttctactcaactactctgctgtaagatgtgaggctctactgtacagcagtgatgaatgcagttctgcttatgttttatgtcgcctactaagcatgtggtcaaaattgagctacg

SEQ ID NO: 25560 - DNA, 2588 bp, Zea Mays
attctgggttttcctctacaccacaacgctacgaaactcttcatccatttgatccacatcaaacggctgatagggcccctcctatctctcctacatcttctccactcccctggattgagttggacaacttggcgcttcacctcgctcgctgctctcctctcagtcctctggttctccgtcctctcgcctcgcgcggccgcgcctgcgcctcgtcagcaagataaggctgcagcctgcaggccacagtgcaggcccatgcttccagaatcttccggaaccttgcgccgagcctgaactccccggcggcgcctggccctgtgaaggctgcatgagtagtcgcgccgccgccgccgccgcagcggagccatggggatgctcgccgccgccgttgcccccgctctcctcgcctcgccacaggcatccctcgtccgccgccgcctctccggtgcgtggacgctgcgcctgaagcccgctgctgcctcccacggcgtcgcggcgctcagggtacataattttctcccaaagtgttacattaccaacgttgaggttgatgttagtactgtaaataaagaagaaactttcgatgatcatccatcattggcaccaggacgcaacattccgcttgttaatcttcgaggagatattctagattctagtccttttccgctgcacgatagggcttcctgtccttcaggttttgaagagttgccggtcttgtctgaaggagagcaacatactttggcatccactcctgctcatcctgctggactatatgctctatatgctagttacttatttggtaacttggtggaacaactgtggaattttgcttggcctgccacactggcaattcttcatccaaatctattgcctgtggccattgttggtttcttcacgaagctttcagtgtttgttggggctcccatagttggcaaacttatggatcatttcccccgaatacccatgtacacagcattgaatgctgtgcaggtaggcactcagttgatatcagctgcaactgtcatctatgctctaagaaacctgagccatgcttctacaacagctgtggttctgagaccttggttcattgcactagtggcagctggagctatcgaaaggcttgcaggattggcgctaggagtttccatggagcgcgactgggttgtgttggaacaaacaggcctgttgcattagctcaagctaatgctgtgctcaatcgacttgatctagtttgtgagacagttggtgcttctgtttttggccttcttttgtccaaataccatcctgtgacctgtttaaagattgctagtggtctaatgatatgcagtttccctgttctggtcatgttgggtcaactaatcaatagagtttcttgccatgcacttgattcctctagaactgccactgatgaatctatttgtgctgatcttttagatgtacgcaggatagttccaaatagcttgagggctatcaaacatggatggaatgagtataagcagcaaacagttctacctgcaagtgcagctaccgtgttcctaaatttcaatgttgcacttgctccaggtgccataatgactgcattattgatgcatcgtggtaccagtccatccattgttggtgctttcagtggattgtgctctatcatgggccttgttgcaacattcatctcctcaagcctggtgaaaagagttggaattctaaaggcgggagctgctggattgatatttcaagcttcactcttgtcaatcgcgctcacagtgtattgggctggttcaatttcgcaaacgacacctctacttatattcctagcatccattgcattgtcgcggttggggcacatgtcttatgatgttgtggggactcaaattgtccagacaggtgttcctgcttcaaaagcaaatctaattggaggaatggaggtttcaattgcaagccttgcggagctagtcatgcttgctatggctataattgcgaatgatgtctcccatttcggcttcctggcgatcctgtctgtgtcatcagttgctggggcagcatggatgttctgtcggtggttaacaaatccaacagatgagcagagggaactattcatggttgatcccctttatcaagttcaggcaatatagtggatgaggcaggaaacaaccaggaaaactgcaggcgcctacttgctggtggtgcttgttggatctgcaataccgttacgatgatactaagatacagtgtgacatttaggttcaatacgggatacacttagggtagaagcatttgctcctcgtggcctcagccatgcgcagaattcaatttgtatactcgttcatctcctcacctgtacaacacatatttgatctgtataagtgttacttgttatagctgatgtagaacaacattaacagccatcggtagcacacagtcaatgaaatctaaccccctcacctttcctctgatgctgcaaatgtgtaactgtatcttttattggatccactgtcttctttctcctgtcatcttggttccttgttaggcatgtacatccctgaacctcttacacatagacagtacatcaagcataagacataattaaaaaaaac

SEQ ID NO: 25561 - DNA, 2405 bp, Zea Mays
cagggatccaaaaatctccctcccaggtggtgctgcctgctgcgtgcaggggagtgagcgtggctgcgtgggcaccctcggggtcggatctgaagaggaagaaggctgtcgcgctgacctcgactcgatgacggccagaagataaccgacgacatcggaccgcatccgcgcctcctcgagaagggcgccaacgtcatccttgctagccacctggtgagtcacctccccaccatcatgtcgaaataaatctttgactcgtgggttctgtgtttttttaattttagcctacttcaacgaactaactggtggtggttgttgttgttgaaacgacgaatacagaattacagatgcgattgtgacttgcatcattgcatgccgccgccatggtctcgccctcccatcccagcgtgggcggctgccaactccctcttccgccgccaccgccgcctgcagcccctcctcttcccggccgtctctcactgcgaccacctccgcgttctgtcccactgcctcgtgtccggcctcgcccgcaaccccttcgttgcctcccgccttctcctcgcatcctccagcctctccctccccttctccctcaccctcctcgcctatctcccggcctcctcgctctcatcgttctccttcaactcgctcatccgcgcctccccaccgcgcctcgcgctccgcctgtttgacgaaatgcgcagccgaggagtccccacggacccctacaccttaccgctcctgatcagcgcctgttcctgcagcggttttacactgtgccagtctctgcacgggcagggcttccgtcttggctacaattgccacgtattcacccagacggcgctgttgaacgcgtacctcaagtgcgggtcggtggccaccgcttgcagggtgttcgaggaaatgccggtgaaggatgtggttgcgtggaccagcatggtgtctggttatgtagactccaggatgtacttaaaagccgtcgaggtatttaacgagatgagaggtgctgatgatcttgtgtggcctaatgaggccacagtggtgtcacttgccactgcctgtgctggtctgggctcgctggagcatgcaaagggtctgcattcgtatgtggagaaggctgggttggaggacgagttaattgtcaggaatgcattggttgacatgtatgggaagtgtggctgcattgagtcggcacatagattgttttgtttgatgcgtgagaaggacttgcattcatggacaacaatgatttcagggctgtcttctcatggacgcggcgaagaagcggttggtttgttcttcagcatgtgcgaggagggagtattaccagattcgaccacttttattgtggttctgtctgcctgtagccatgctggactagtagatgaggggatacatatcttcaattccatggagagtgagcacaatgtcccccgggacaccaagcactatggttgcatggtggatcttttcagcagagcagggcttgttcgccgtgcttatgaattcattagcatgatgcctttcgaaccaaacttggagattcttggggccctgctgagtgcatgcagtatcaataatgaactggagattggggagctcgtgctcaataagattgacatggtctgctcctacaaaggaggtgctggtgtgcttctgtcaaatatatatgctaaccaaaatctgtggcatgaagtggataccattagaaggaagataaggactgaagcaattgtcaggaagccacctggtcatagtttgattgcagcagaagtttcttccatgactttctgattggtaattgcatagatttgcttttaatgaagctgtggtcctgattttgcgaaggaggcttggggtgtttgctttcaacaatccctgtaggccagtcgaaatggaaggtgttatgaggagggtgatcacttcggacaacatctgctttgtaaatgctgcggtgcgattgccaagaagctggctgagcttacaacgctaacggatgtcacaaccatcgtcggctaggctggctgacaagatgagccacatttggaccggtggtggcgcgagcgagcttggagctcttggaaggcaaggcgctaccaggtgtccttgtccttttgtttcggaccatggtgtaacactgcaaagcttatggtttgtattggacttgggataggcttgccgtcgagttttggtagatgagtggtgaataagcttgatctataccactgttaccccctcacctaaaagaactatacaactgctgtcgttacctctcgttggctaccatggtgcactgccatcacttggatgacaaaatcgtcgccatgcactgattcaatgcaatttattccatgcccattaatcccatgccctcgtttaaattgttataattttgattattccgg

SEQ ID NO: 25562 - DNA, 694 bp, Zea Mays
gctgtagtttttatcagctctgatcttgagctagctatagcactccaacagcaagagtttgagcggcaaccacaaaggtttcaagctccacagccgcagcagcaacagcaacaacagcaacaaccaccacctcagacgcagtaccagactcaatctggccgaccaggacttgttgttggtccaaggaggtccaacgccccacctccgtccagaagtgaatcgaagaaagagagatgcatcgtgatgtaaaaataccttcaacagaaatgtagaagaaaaagagagaaggaactcattaagtcattatactgtaaagaaatgttttcttctgcggaggcagtgtctgcgtttagtcaccttgagccatctcccatttgagctttttttttggttttactttctctgatgtatgtaaataacctaaacgaataaagtgtagaaacagatgctgtcaaagtgatggccccatgcaatgtgatttcattcatcgccccgtgcaatttgattttttttcgtagccctctgaaatcgattgattctatttcacttgtcacaatgtaacgctaatttttgaattctaaaattgtgggttattttgataacctgtttagttgtatttattttcagaaaagaactacatatttacttttcacgataaatgaaagtttcgtaaaaataaactaaaaataaaggt

SEQ ID NO: 25563 - DNA, 5072 bp, Zea Mays
atgcatggtggaaccctagagcttcacccctttttagcaccagcattccgccgcacgacctcactcaccacaggtgcggcggcgcacactgctgcacactgcactccctccgtcccgcgtccccgttcggcgctctcggcacgaccgccggtagcccgggacgcacgtcgcacggccccatccctcctagcggccggtgacggcaccggcggccctttgctcggctgtgcccaagctgcgagggcgagatctacccccgcgtccgtgcatcttcgtcaggcccttctccggacgagcactcacagggtatcaaggaacgcaaacctccagattttgttacctcaaggagaagatacatgaatagaagcatttgccaccacctccttgcccactgcaaaaagctaagagagctccagagaatccacgctctggctgttacccatggtctccaccccaaccatcagtctgtttcctgcaaaatcttccgctgctacgctgattttggccatgtagctgatgctcgcaagctgttcgatgagatcccacaccctgaccttatcttctttactagcctcatgtccctccatctcaagttagatcaccaacgcgaagctatatccttgtttgctcgtgttgttgccgctggccaccaccttgatggctttgcggttgttggtgccctgtctgcctctagtggtgctggtgatctagtggttggtagggcagtccatggccttatttttcggcttggattggatcacgaggtcgtcgttggcaatgcattaatagatatgtatagccagtgtggggagtttgagtctgcggtaaaggtgtttgataggatgtttctgaaagatgaggtcacatggggtagcatgctgcatggtcatatcaaatgtgctggtctggattctgcactgtcgttctttgatctggttcctgtgaggagtgcagttgcttggacaacactgataactggtcatgtgcaaggcaggcagcctgtacgggctctagagctttttggtaggatggtactggagggccatcgccctacccatgttacaatcgtaggtgtactctcagcttgtgctgacattggtgctctggatctagggagtgtcattcatgggtatggaagcaaatgcaatgccagctcgaatataattgttagcaatgctctgatggatatgtatgcaaagagtgggcgcattgagatgtcattttctgtgttccaagaaatccagtcaaaggatttttttacatggacgactatgatctcatgctgtacagtccagggagatgggaggaaagctcttgagctctttcaggacatgcttagagctggaatagttccaaacagtgtaacctttgtttctgttttgtcagcatgcagccatgctggcttgatagaagaaggtagagaattgttcaacagaatgcgtcaagtatacaaaattgatccccgacttgagcactatggttgcatgattgatctgttaggacggggaggattactagaggaagcagaagatctaatagctgatatgaatctggtgcctgatattgttatatggaggtcacttcttagtgcatgtctggttcatggcaataataggctggctgagattgctggaaaggaaattataaagatagagcctggagatgatggagtttatgtgctactttggaacatgtatgcatcatcaaataaatggagagaagctcaagagttgaggcagcaaatgttgactcttgaaatcttcaaaaaaccagggtgtagttggatagaacttgatggtgttgtccatgaattcttggtagaggacaagacacatgatgatcgaagggaaatttatgaaaccttggaatacatgacaaggcagctcaagacacatatcagattatcctcatgggagcaacatggttcatccatttctgttgatgaagaaatcatagaatcatatactgctcatttgttgcatgattgattcacatgagtcttcccattaaatagccttttttgtgccgaaatcaaattcgatgatctcattgtaatttatttattattagtcttatcttgcagcgtctctagatcaagattatagtgtagaaatccactgctgtaagttggtggcaagaaattattagatatatgttgaggttggttttacttttaccagtcacttaataaaggttttagttgcaatgctggactacagagaagtttcttctaaatggcaagattattttatcatacattatctattttattgcattgtattctactttctaaatctggaagttcttattatgtgcgttactttttttaactgtgattcactcattgtcagatgtgttctgaagttcatgttgagggagatgcaagtgtcggacagaagggttgcaaggatataaggcgttacaaatgtgaattttgcacagttgtcaggtcaaagaaatgcctaattcaagctcacatggttgcacatcataaggatgaacttgataaatcagaaatatacaactcagatggggaaaagattgttcatgagcaggaacataggtgccaagagtgtggccgttgtttccagaaaccagctcatctgaagcagcacatgcaaagtcactcacatgagggcatagatagttaacagcgtgaagcattggatcccatttaaagaactccaaaatgcgacgaggtattttttattcttgcctgaactagtaacaggttgggatgacctcctgtgaagcttcaacaagattgcctcagtcacgctcactgagtaggtttgttcttgtacaaaattagttttttatcatgatgctcatagtctaaattctgcatttcatgtcatacatgattgttttcagtgttagtatgtattgtgccttctcatatgggccaattcagtgaattatggagttttttttatttctttgttcttctgacttgggggcctttagttgtgtcaatctggtgatcaaacatcaaaatatttcagaaagcttggtcttcactttataagttcctttattacctctaattttctttagtgctgttaggattagatggggtatggatcctggagataaggctgaaaaatatcctcccatcattctgccatgtctccatgggcttccttatgggagctctgatgtaatgcttgaggatccaatatcaaaatgtcatctcagaaagctaggcccattcttcattggctctcagctcgctatggtgacaatagtcctaaaaccgtgttattttgcaattaaaaaatgatgaagtgaacttgctataatcctgtaaggattatatgggttatggatcttttggagataagggtggaaatatcctcccttcattctgccatgtcataaagggcttcctaatgggagcttccagaagatgctttaggatccaatatcaaaatgtcgtctcagaaagctgtggccattctgcattggttctcagctcgctatggtgacaatagtcctgtatcgtctcattatgcaagaacagatgtactgaatggaagtgctgaacttgttatagtttgttgagaaggctttagcatttagtttttctttattatagattcatagttcaaaagtagatgcatttaccttataattttagcaggtttttttcccattatatgcgtcataacatttctcctaaaacacacgtttaacaagttggcacatttgtttagttattaggtaaaaattgtgtcacttttgtaggtccttatcatgatccagtacagtttataattctgagttctgataatcgtttggttaattatttgaagcatttagcacaatgttaaacaaagagcattataaatatttcggtcgtaacacatatccttgtttgactgtagagactctttatttgcccactggaagactgccccttcagctataaaagaaaagatcacttgaaccgacacatgcttaagcatgagggcaaattgtttagttgcaccctggatggttgtgatatgaggttcagtatgaaggcagatatgcaacggcatgttaaggaaatccatgatagtaagaacccccatcaatttgtttgtaaggaggacggctgtaacaaggttttcagttaaattggactatgtggaggtagtgtgctgtgagccaggttgcatgaagatgttcagaaatgttgaatatctgagggctcataaccaatcttgccatcagtatgttcagtgtgagatatgtggagaaaagcacctgaagaagaacatcaagcggcatctgcaatcacatgacaaggtgccctctgatggaaggatgaaatgcacttttgatggttgtgaacacttcttttccaacaaatcaaatctgaccaagcatgtcaaggcatgccatgaccagctgaaacctttcaagtgcggaatcgttgggtgtggcaaggcgttcacctacaagcatgtcagggataaccatgagacatctggtgctcatgtatacatggaaggagactttgaagagttggatgagcagttgcgtgcccggccaagaggtggtcggaagaggaaagcattgacggtggaaacactgacacgcaagagggtgaccatctccggcgaggcttcatccttggatgatggagtggagtatcttcgctggttgctatctggtggggatgattcaattgattgtcagtagccggcgtctttttgctatcaccgctgctttgtacatgggttagattatgtaatgtaagttgtttggtagactacgatggtgttcatgacgcgtttgatatattgtcagcagtatggtagtgcagggctctcatagtaaagcttgccatttttgttgtatctttaacccacgtgggtccagatgatgtgtttattcctatgtatttacttatctacatgtatccacatgtgcgactttggcgtttgtttgagattataatctgttaaaatatgttggattatataatttgggcagattataattccaaacaaacactgactaatgctctatttgtttaccctctagtttatataatctagcttaaataagttaaaagaaacaaa

SEQ ID NO: 25564 - DNA, 1469 bp, Zea Mays
cgccactcgccaccccactttccaaaccagaccacagccgaaaacccccgatcatgccgccgccggtcgaaccctacatcccttcgttcaccgccggcttgtccgcgcacgaggccgccgatgccgacaaagactacctctacttcctccgccacgtccgcctcgacggagacgcctacacggtcgtgattccgtccaaggacggcgcctcctgtcctccccagatcatcaggtacgaacaaccgcactccgatcacaatgccggggcccccgtcgcgggctctgaatgcgggagacaaagggcccatcccccgtcggaggagaactcttgggctacgggtgaggccgccccacacggcgtgaagcgcaaggttccaggcgcgagccccgccggcgaggtccgaagcggtgctgtccgtatggaagaggacaccccgacattggtggcgaagtccgcgtggtatgacttgcaacccgacatcgacgatgactaccgcttcttcctccagaatgctcgcgtggtgaatgacaaattggtgttcaagacggggaactgttcaataactatcggggaccatagtgatgctgaggagcacgacgacaccgaggaggaagagaaagaggaggaaggggaaggggaagaggatgatgaagaagaagcagacgaccttcctgcgtcagggcagtcgggggaggacggtatcggtatggaggaggccggtcctgtgtcagagacagaggacggtgttgactcggatttgccaattccaaaggtgaaggatgaagtggtgagcaaaaatgaagaggatgatgtggggcctggatcagatttgcatattactaacgatcaggtgtattgtgagacggagaaggtgaaagaaggaggagggaatacgttgaatgatctagccaggagaacaacagatttggatcctttggacaagaaggaagcaagctcaagcaagggacatctggccatgcctctcaatccttcggaattacaaggcgttatatggcccccacatatcaatgagaggccaaattcagtttttaaagagaagttgattgagtttctcatcaaaccatttacacaggaagaatatgataggtattttgctctggctagtgatcgcattccaatggtcaaagaacgaaggacccgtaatacggtggcatactatcactggacgcatgagatgagcaagtcatactttgatagatcttgctcagcaattcagtctccaacgcaataactatacaaatggcttggctcttttgcgtgggcttttcttctggttgcagaacattgagctagaagaccaattcagaccatggagcgatgaatttaaaaagtaccgagttgtcatggaatgtttgtagagggtttacccatactagccattactccatccagttcagaaagtcgtttggtaagttagcgcggtcgtctctgtgcaactctctgacct

SEQ ID NO: 25565 - DNA, 1795 bp, Zea Mays
tttttgtttggcgctcagcagcttattattcaaatgaatatcatcatcatactagcaatgcatgcttaacaagaacttgttaatggggaaaagaggaggaatggatggaaacacacaaactcagagtgagtgagtgagcgagagagagagagagagagagttcttgaaaatgctagcataagttcttgaaaaagctatcatcacagcagcctccagttcctaatgactccccaactttattatcctcctaataggcatggcttccatgcgagtaggaatgaaacagaatcagatacagatggatattaatgctaatgtgttctatccaatatgtttcctcgaatatcagcaccatcatatcagattttgatatcaatctcatatgcatatcagaaatctgaatttgagcatttggattcgaatatgttacatatattaaatgttcagattcaaatgcatccatgtagggttatgatcctttcgggaaggacgggtgtctaaaaaatttcatccctacatgtgagtaagcaacaacaaaaaagggcaaacctagtgccggaaggctcccatacgagtgggatctagggaaggaatagggaagccttcccccacaaatgcggagagactgcttgaaacccgtgacctagtgacccagtaccagcccacacttcagaattttcatcgtaagtatgtatttgtttaccttgctacggaaagccataacttttgtggaaatactataattcacattcacatgcaacctttgaacagagattgatagaactcaatcaagacaccaaaaaaacatagaacgagaaaaaataaacatagcaaactagtgagagtcgaggttctcagtcttgagttatgaatggactaggtgtcttccagggaataaagatgtatcaggttaacaagtatgacataattgaaacctccaaacatgtaaaacacacatgcacatgctgggatggaaggcacaaaaggcaaattaaatgatggtaacaaaagagtgcaacacctcgaacttgttatatattcaaacaataacaatgctgctcagttatagtttttgaatggatagatgctatcctcatagtatgtctcagtttaacgagaagtccatcatggcagccacaaaaagcagtaagcaaactacaaactgtaatgtgaacacttggttgcacttaaacaaagttgacatgatgtttgatgtgaccagcaatatagttgtaatgaaaacaatccctaaattaaccgatgtacatcatagaaagtcaaaaaaacttgtttggaaacagcaacagaggcagcaaatgataagaacacagtagcagattatggaattggaggcgctcagcagcttattattcaaatgaatatcatcatcatactagcaatgtatgcttaacaagaagctgttaatgggaaggagaggaggaggaatggatcgatatatatatatacacacagagagagagagagaaagaaagaaagagtgagttcatgaaaatgctagcataagttcttgaaaaagctatcatcacagcaacctccagttcctaatgactccatctttattatcctcctaacgggcatggcttccatgcgagtaggaatgaaacagaatcggatacagatggatattaatgatcatgtgttctatcccatatttttcctcagatcacagaccatcatgccagctattaatatcaatctcatatgcatatcaaaaatctgattttcagcatttggattcagatatagtatggatattaaatgttcaggttcaaat

SEQ ID NO: 25566 - DNA, 1176 bp, Zea Mays
gtttctttcgtcttataatccttaagttgatactgcaatccgcctcatgtgaaattgatgtgtcaatctgacaagcacacttgtattctagatgctataatcaagcaagcgaactgggactgctctaaaatgctagagaaatttcggcgtgatatcgaagatcatgcactttcaattcgtgaaagcaagctatccgaaatgacaagacacgctaaggacaaactaagaaaagcacttgctgaacctgtggagtctctatttgatgctgcagaccaaacaacctggcaatcaataagaaacatttacaaacgtgagacagaggccatcctaccagagtttctgaataacctttgtcagtttgaaatggaatatgctccagcagaagaaatggtatccaaattaaaggattatgcccgaagtgttgtggaaagtaaagctaaagaggaatctagcaaagtatcgatccatatgaaggagaggttcacaacagtgtttagccatgacaaggattcaattccaagggtctggacaggaaaggaagatgttcgtgcaatagtaaaggaagctcgatctgcggctctcaaacttctgtctgtaatggcagccattcgctgggatgacgagccagataggattgaaagcatcctcacttcaacacttctagaaggctctgttgtatcaaagattgcaagtgctgcttctgctgatccacttgcttctaccacttgggaagagattcctccaaagcatacaatgattaccccgtatcagtgcaagtcactatggaaacaatttaaagtagaaactgagttcacgattacacaagcagtatccacacaggaatcccatttatctgttcttgctatttgtgggctacttgatggtcaaagctttggcgatgcagctagatgtcagcagagaattccagaatggagtgtttctgtggtataaggttccaatagataccatcaagactcagcttcagaaacagtttctgtggtttcaggttatggacaactatagtaagggataggccttcagtcatgaaaactactaggctgttgcttgatgagatggctgatgggcttttatagagttttgaccagttttcttaacatgttttgttttctccgcctaacaaaataataataagatgggagtctgatataaaactag

SEQ ID NO: 25567 - DNA, 4244 bp, Zea Mays
ccggtcactgcccgatgggcgtcacccccggcgctccaccccgcgtcgcggacccccgacccgccccccgcctcgtcctgttcgcgtccccctttccccgcgtgtgcgttggccggctggttccggatgagggggttgctgtcggtggaggccgctggcgcggcgtcgtcgtcggcctcggcctcggtgctcaacggcgccgtggactggtggcgcgacgtcaacgagtcgccgctgtggcaggaccgcatcttccacgcgctcgccgtgctctacggcatcgtctccgccgtcgcgctggtccaattgatcagaatcgagtgcagggtgccagagtatgggtggacgacgcagaaagtgttccatttcctaaacttcctcgtgaacggcgtgaggtctgccgtgttcgtgctgcggcggaatgtgcaactcgtagagcctgagatatgcctgggcttgcattcttcacaacatatgcacttctagtgctcttctgggcagagatttattatcaggcacgtgcaatgtccactgatgggcttagaccaactttctattggatcaatagcgtggtttatgcaattcaggtgataaacttgtcatttaactaataagtcaggttggacttcagaacgatatatgctgcggtaatttaatactgtatatatcaatgtgcactttatagtgttgagctgtgtacattgatcacatctaaagttttaatagtctatgaaagagacaggcaggcaccaggctagtcctaggattcccgagcatccttccaggcttccacatgcttgtctatcatggttattagcctgcagaactaccaaatccttttggacgccaaggaccgtgataccttcctattaccaatgaggaaaaatgtcatggaaacatatttagtgcatattaactgtcattagggtacgcacaattgataaattctaggccacaaagctaagtagtacatgccatacttgtcaactctgatttcttggtgaaaattggaaaaagccacttttttctctgaatacacaggagagctacatatcattatattaagaagaaattagggaagggtaaagaccctattacatagaggacacacacaactgtcacctgatacaatcaaacactaccacgaccaacacactaaaagcctaaccaccgacctggagagaggagagagctttagcgtcggccatagaccagtacacaagcccctccttagccattctaacagcagaaataacactaggacgacacttatcaaacacacacttattcctatgcttccaaatgatccaaacgcccaagatgaccatggagttgagacagttcttcaggtggactgcaactctagaacaactattcttccaccaggtttcgaaggagagatcaacttgttggggagacagttcctgcagatttgctagcgtgaggaactcaaaccaaatttttttggcaaagacaaaccaccagcaagtgattgatggtttccgaagcttgatcacaaagaggatatcgctctggatgagacagacctctcatagctagcctatctgcagtccaacatctgttatgctcaacaagccaaatgaagaatctacattttccaggagcccaagtattccacaccctcctagccggttcaaaatccactgacccaaagaacatagcacgataggccgagctagcataagatccggaggtgttaaacctccatgtgtgcttatcttgtaccccatgatgaagaactatattagagagtgattcgcattgatccaagaattctgccaacactgttacaatgagagcaccttttaaatcagcgacccactgaaaattgggtagggcctcactaaccaaccttttactaactagtcgggtaggcaccaactgaaacaatgaagggccacatctttaacacacttgccttacagaaaccgatctttccaaaatagggtgttagaaccatccccaatttgagtaaggactgccacactaaacagatttcgaacctccttacaagcctgaataggataatcagtccatggcttgctcaagtcgctttttggagccacaaccagcaaactctcaaagcctagccatgaaatcgaaggtcaatcaagcctaaactgcataggttttttggccgagtcaccttaggtcaagctagaaggcaatgtcctcctctggcatttttttcttcctttccacaagaaccctcttcgaagcttgtcaatagctttgatggcccacgtaggaaggtctagagcggtagctgcataaatcagttttgatgtgatcacaaactgaacatgaatagacctcccaacccttgacataagctccgctttccagccaggcaagagagaggctacccggtcaacaatagcttgaacttggtctctgggtagcttcttaattgagaggcaaaccaagatatttgcaaggaaaactcaaaacggaacatggcaacaactcttggacacatgccagattaatagattatcatcattacagcggatagggagcacattactttttttgcacgttggtcttaaggcccgaggccacgccaaagagagtaagaatgtccaaggctaagttgatatccgaggcaactggctttagaaacaacactgcatcatctgcatagagggagagccgatgttgcatactcctggaagacaaaggctgcaagcctgcaacagcctctctgctgacttgctgaggcatgcatgatcagcctgttgaggacattcacaaccaagataaaaagcatgaaaatagtcacactgggcttgttgtgaatgcatttttatttgatacacgtaaaataggaacattctggtttctggactcatttgacaccaatgaatttcagataatcctatggttggttttgtggtggaaaccagttcgaattatggtcatcttgtcaaagatgttctttgcaggtgtatcactatttgcagccctcgggtttgttctctatggaggaaggtaacctttttctggcttcactttgccctaacaaattgatgatattctcctgcagttacattctttgctcgttttaacgggtgttatatgtgcagtgggtcttactatacactgtcctgatagagcatatcaaatgccttcttttgcttagatggtagtagagttctgacccaatttccactaaaagatccagagcaagacttgcattctgtaaccgccattttacaagcagaatcaggatacgtagaagtggttttctacacttatcatgactcataaatatccattgctatactaggatgcgagtgagatctccccagcgcataacttatacccttgcttcttggtttgtaggcatattttatcatcctagctatgcatgtagtacagtttaaccctttcatttattgagatgacttttgatgttctgtctgtttctgtaggttgttcatgatgttgcagcgttttcctgtagaatcaaaaggaagacgaaagaaattgcaggaggttgggtatgtgactaccatatgcttttcttgtttcttgatcagatgcgtcatgatgtgccttaatgcgtttgataaagcagcagatcttgatgttctgaaccatccaatcctgaacttcttctattacctgctggttgagatagtgccttcagctctggtgctcttcattctacggaaactgcctccaaagcgtgggatcacacaataccacccgatccattagagagcaggccttgggaacaggcaaaggttttctggtggatagtgttacacaacgtggtaaatacagaagggagagtgaaaagtaccactcgagctttgcccagctttttatacggaagtctttagaatcccaggttgaaattgtgtgtaaaattgcgatctctttcactaagatttagaaaatgtaacttatataactttgttattctcagtgcgtatcatctgttcacattgcattaattgtttgcatgtttcttttgggtctctgcctcaactttgctgaacaagagcagctaatgctcctggagtgcatggatgatgtgattcgctcaccatccgtatgtttggttgttaggacgagtagagcctggttcaagaccatatgcaggttgagtatatgcagactgagttgatgtaattatacagtagcatgcgtgtttggttggctgattctaattagccaggatcaacacaacctatgtttggtttacaaaaatatgc

SEQ ID NO: 25568 - DNA, 1953 bp, Zea Mays
gtcgagctccggccacagccgtagacaccacaactacccatgcacccacggcgttgccttggaccctgcatgtagatgttggtcgcgatctgcagtccgcgacgatcttgagcatctgatggctggggtttataaatggaaactggcatcttataaacagatggaacgtacgaaagttgcatcagagaggttgtcattaagatctaatagcaccaagcatcacgatactgtacatcttggtcttggtcattttgggaaggatggcaatctcatttgtcgttcacttaagtcaatattaaaaccaaaggcaagacagtatgctattgtcaaggtacataataaagatgttgacgagggttgcagctccaaagacaatgagattatttctagtccatctgataggaaagaaggaagtcagctgagggcactggaatcttatttttctaaattcaatccctctcagcagttatactctttgcctcagaagaagcacaaaagtggtccatcatcgtcaaatgaagttgatgcaatcattgctgatgaggatgctaatttgaagaacagggcagactctttgcaggtacagattgacagaggacacacaggtatcaagagtaatcaaaatactcccaacgaggtttacaaggagtacttgatatttgatgaaaaaagtctcctggacatgcatacagatgatcaagcgtctggtttctgtttgacaaacttattggctggtgttaatattgcagttctgttatttgaaatagcaagtccagtgaaaaattctgaaaatgaatatttatccctccctttgttgtatggtgccaagataaacaacttaatactttcaggggagtggtggagactactaacaccaatgtgcctgcactctggtttcttacatatagcccttggttgttgggcattgcttatatttggacctcgagtatgcagggcatatggtcaaaggacattttttctgatatacatacttggaggaatctgtggtaatttgagcagttttgttcacactcctgagataaccgtttgtggcacaggcccagtattttctttaattggagcatggctggtatatcagggtcaaaacaagcaagtcattgacaaggacgtttcagaaagtatgttctggcaggctgtgatagctgcagctttgagcttcttattgagcatttttgggagaattgacaactgggcacatcttggggcgaccatttctggaattttctttggttatctgacatgcccaagtgtagaatttgacaattctgcaaagaacggtcaaaaggaagccgtggctcttattaggcaacaagctcatccatgcaaatccgctgcagtctttttcataaccatacttgcgtttgctgtactcgccttcgcttatgggacacaattcaacaatatggatctggaataggcaaatagctaagtgttgtcatggttcacttcatatatatatatatgcatgcatgtagcccgacagctatatattccggaatgtgaatgagcccgagatgtaagaaaacgttgtacactatagatcagttctatgcgtaaccaggtgaagccacggacggcataactatttgtacactcggtttgcataagaaccgactgcacatctgcatttgcaccgtcggttgcaagttgtgatagactcggcgggaagttttatgtaatataaaataaagtataggtgaagtacatgtttttagtataaatttttatcctgtaattttatagttattgaattttatgactaagagttggtaatcgtgctagtagtgttttatcttggatcactgcatatgtccccttgatgcagtttttggttgtaatccgagcggtttgagttcgtttgaggaaaccccaatacaaaatcttagttttgtctgtattttcagatatgtgattgatttataaatctgattg

SEQ ID NO: 25569 - DNA, 1129 bp, Zea Mays
cagaagtttgggtgttctgatgtgcaggcaccatgttgtttcgcattttggtgcttgaatcctgtctttactgcagatatgatttttttgtcatttttattctgaaatggagagtttggatttggggaagaaaacaagggagctactccaacttttatggtggcttatattctggtggtagtgctcagatggttgagaaatcactagacattcatggggatgagatattatatgttggggaccatatttacacagatgtaagccagtcaaaagttcatttacgatggaggacggcattaatctgcagagaactagaagatgagtttaatgcactggtcaaaagccatgatcagaaagaaaagcttgttacacttatacaacaaaaagaaattgtgggggatcttttcaaccagcttcgcctggctctgcagaggcgctctaattcacgtcctgcacagacgcttgctgcaacttgtatggatgaccaggagcttacggagagtatgcaaaagttgctcattgttatgcaaagattagatgaaaagatcgggccaatgctagaagcagatggagaacttttcaataaaagatggggttggttgtcacgtgctggtctatgggataagagtcatcttaccaggcaaattgaaaaatatgctgatatatacacatcaagggtttcaaattttctgcactatactccattcatgtatttccaatctcaagaacagacacttgcgcatgatgcccattcctattctggaggaaaggacatcaaagttcattgagcatccgttcgtcacaatctggagattaggcaggaaagagcgaacgtgatcattgtgattatggctgcgatggctacacaataacaattgtcgttttgaacaaattaattaatacaccttgtaagattgtatttatatataagtaaatctttagctatagcatgctgaatgattgttctgatagtcagtttgtttgtcgtggcctacctagagtttcatattgggaggcacagtacctgttttggtgtacctgctgctatttgcattgtatatgtgaaatgcgaagtgaagtatgacaaggtaacgataagtgacaaatcacgtcatttgatcctgcgcaa

SEQ ID NO: 25570 - DNA, 1956 bp, Zea Mays
ccggagcagttcacagtccccactccacctccttctacaaatacacctcagtctcagtcccccaccacatccgctccccgccttccgcttccctaccccccgcatcacctaccaacgccgacaccatgggggccttcgcgaaggaggagcaccagttcctagccgagctcggcctcgcgcagcgcaacccaggcgcgttcgcatgcggtgcgtggggcggctcaggtcccaccgtcacctccacgagcccgaccaacaatcaggtcatcgcagaggtcgtggaggcgtccgtgcacgactacgaggagggcatgcgcgcctgcttcgatgccgccaagacatggatggcgattcctgctccaaagcgaggagagatcgttaggcaaatcggtgatgcactgagagcaaagctccatcaccttggcaggcttgtgtcacttgagatggggaaaattcttcctgaagggatcggtgaggttcaggaaatcatcgacatgtgtgattatgctgtggggctaagtcgccaactaaatggatccattataccatctgaacgaccaaaccatatgatgatggaggtgtggaatccccttggagttgtgggtgttataacggcatttaatttcccttgtgctgtgcttggttggaatgcttgcattgctttggtctgtggaaattgtgtcgtctggaaaggtgctccaacaactccactgatcactattgcaatgacaaaaatagtggctagtgtattggagaagaacaacttgccaggcgcaatttttacatctttttgtgggggcactgaaattggtcaagcaattgcccttgacattaggatacctttggtttcattcactggaagtacaagggctggtctaatggttcagcaacaagttagtgcaagatttggtaaatgccttcttgaacttagcggaaacaatgccatcattgttatggatgatgcagatatccagctagctgtgcgatctgtcttgttcgctgctgttggtacagcaggacaacgctgcactacatgtcgtaggctgattcttcatgagaacatatatcaaaccttccttgatcagcttgttgaggtatacaaacaagtccgaattggggatccgttggagaaaggcaccttactgggaccactgcacactcctgcttcaaaagagaactttttgaaaggcattcagactatcaaatctcagggagggaaaatcctttttggaggatctgccattgaatcagaaggaaactttgtgcaaccaacaattgtggaaattacaccttctgcaccagttgtgaaagaagaactctttggtcctgtcctttatgttatgaaatttcaggccccatggtagtgattgtggtatagtgaatgtgaacatacctactaatggtgctgaaattggtggagcatttggtggagaaaaagcaactggtggtggacgagaagcagggagtgattcctggaagcagtacatgaggagggcgacttgtacaatcaactatgggagcgagctacctctagcccagggaatcaattttggttaatcctgcagaaatgttgcgcgtggatctcagtgttttctgcagacgtggatgccgtatggaaagaactgatgcaaccgcatttgagatctcagcagacttgagcagcatttattggcgtcagttgtgaaacttaaactgcaggagcatcttgtacataaataaaataagatgtttgttgctcgtgggccgtggcacgttttggtaccggtgtccagtctactaataaaatctaatgcaaaacggtcataactacattctcatgcagtatgattttccggccttttgatctggaattgaaatgagcgttgttcgttttgaacaagcacatgaagaaaaaactgctaagggttaatttggcaaccttattttttcaagggattttaattttttcaagagaaa

SEQ ID NO: 25571 - DNA, 1290 bp, Zea Mays
ctgaggtgaattaaatcgaaaaaggctctcgaggatgctgagaaaaacatacttacattgaggcatacgcttgctggcgatggagaagtggaaccaaatcaagagcaggttttgcagatagcccttgagatttgcaaggagggtgttctttccctctttgttcagaatcttccttcattgggttgggaggctagaaaggatcttgtccactgctggtgtattttgttgagacagaaggttgatgaaagctattgttgtgtccagtatattgaaaatcattttgatcttttggatttccttgttgtttgctataagaacttggaagtcgcgttgaattgtgggaacatgttgcgagaatgcataaaatatcctacacttgcaaatgctctttcagatatatattggagtcaagcagcttcgagttgtttttccagtatgttgaattgtcaaacttcgatattgcatctgatgctctgaacactttcaaggatttgctaaccaaacatgaagatgccgtctctgaatttctgagctcacattatgaacagttttttggactctacacaaaacttttatcttcaactaattatgtgacacgaagacaatcagtgaagtttctttcagagtttctgttggaggccccaaatgctcaaataatgaagcgttacattttggaagttcattacttaaacattatgatgggcctgctaaaggattcaagcaaaaatatcaggatatgtgccttccacatttttaaggtatttgttgccaatccaaacaagcctcgtgagattattcaggttttggttgagaatcacagagaagtgttgaagctactccacaatctccccacaagcaaaggtgaagatgaacagcttgatgaggagagagatttaattatcaaagaaatcgagaagcttgtgcggttgtcagtataaaccctcaggaaattcgagcgtatccttgaagacatactgtgcaatatgctgccttgtatagagcttgtttttcatgtatggaaaaaaagtttggccacaaattgcattcttcacgagaacacttagcatttctgtcagaaaattattttcgtgtagcagaatttgcaacaggaataatctgcattatggtgtggtgttgataccattaaggattggtgaaagtgcctgccatttgaaatgggtacgcttgtcatgtttgttttgatgtctaaagtttgcacattttttcttgacaacttgagggctgttttggtgaccaagaaaataaagggaggccataggaaggaatcct

SEQ ID NO: 25572 - DNA, 1815 bp, Zea Mays
agcgagcaccgtcgtcgtccaaggtgatcccaatggcccatgtgcggctgcttctcccctccactagctccgatcacctagctagcctctcgctgtactacagatcggacaggggccgcgcaggcacaggcgcagcgtcccaaccaatcgtatttactccgatccgccccgccactgcacagccgccttctgccctccttccatcgcgctcgctcgctcgctctcctatataaacgccctgcagtcctgcagcacctaccagtccagtctcgcagagcagatagcatcagtgcctactgcggtactgcatagctagcttagcttggtcttcgatctcgaccagagccagagagtgtggtgtgaccgtgtgagcgacgatggggaagcacgtctgggcggcagcgctcatggcgctggccgtgattgtcgggctcggtgtgccccccggccgcatcgccgaggcgcgcaccttagagaaggacgacctgctgggcggcggcggtgactttggtgctggagagggaggaggcttcggtggtggtgctggtggaggtcttggaggtgggtttggtggaggaggaggccttgggggaggcggcggtgctggtggtggttttggtggcggggctggtcatggtggtggccttggaggtggcttcggaggtggaaaaggtggtggtgcaggtggaggtggtggtcttggagggggtgtaggcgggggcggcggccttggtacaggtggaggaggtggctttggaggtgggaaaggtggtggacttggcggaggtggtggccttggcagtggaggtggtgcaggcgtaggcggtggtcttggagggggtgccggtggtgcaggcgaaggcggtggtcttggagtaggtgccggtggaggaggtggactaggcggtggtgccggtggcgggtttggtggtggcgcaggaggaggtgttggtggaggtggtggccttggtgacggtgctggcggtggtgctggagctggcagtggtcttggaggaggtgctggtggaggaggtggactaggcggtggtgccggtggcgggtttggtggtggcgcaggaggaggtgttggtggaggtgcgggaggcggtgctggcggtggtgctggagctggcggtggtctcggtggtggtgcaggtggtggcttcggaggtggcggaggttcgggtggtggcatcggtggtggactctagaggtggcgggagctcggcgcgcgcacgttgagtgcgtgcatgccatgaaattaaaaagcgatacatggagtgtgtggtacggtatggacattgctagagttacattacatcatcactagtatatataaggttgactcttatttgtaagcctaatgaaagtgaataattggatgcgttatgtaagcctactctactatatatatgtttgttttggaaaatcgagggagtgtgttacttgactatccccaatcacactcataaaaacttgacttgtgtgttgtttgtactcgaccaattatatactacaatacatatttggtcatgcctgtgtgatcgctgtgctttgtgcttttaggaaggaatgcacgtgcgcgcaatgggtgttaatgagaaaatagaacacaagagagagtgcagcttcaaaattgataagttatcctgatatcgtcttggtattgtattgaatggtacacattagcagagagtgaaatatgtgataattcacaaaactggcgtacttgttagttccacgagtcttgtttttttttttgaaagggtaaatgatttagttaaaacacctctatttttttttaaaaaaaaaaaa

SEQ ID NO: 25573 - DNA, 1198 bp, Zea Mays
cttggccgttctgcaatttgctctgtggccacatgcatgcgtatttggagcctgtcactcatacaagacagccagctctttatatagtatgggcataccaagcatgtggtttccattagagacttctcgttgacgacgacggtgccaagctctcagacatggacctgtttccggagaacgaagccggcgccggcgccggcggcgtcagggaggccagcgtgctgcggtacaaggagaagaggcgcacccggctcttctccaagaagatccggtaccaggtgcgcaaggtgaacgccgactgccggcctcggatgaaggcaagcaccactagaactgattagaaagagcgtaaaagatgtgtccgtaaggccccagaaaacactcaacaccaaagggagagaaaaaaaaaagttcatcctgatgacgcagtattgcagttcgtcgtaaaggccgaaggttctgaggcgctgacgtgctctgtgtttctctgttcctgctgtggtttcttgcaggggaggtttgttaggagcccgtctcttcttcggcaagccctggaggaagagagctagctagacagacacaggcagtggtcctcgctagccttttcttttcttttagttttttttttcaaagcaactttttgttcctctagttcctcgttagctaagactaagagatgtgagtgagaaattttcccagttttttttttgtttcatcggagttttgctctggagaggataggtgaggatggctttagcgtgggttgtcatggcatggtggtcacatagtttgtctcaggtttacaatgtgagaggtaaaggaaggaaataaagcggtgttagaagaacataccgtcatacagcaagcagctccagatgatgggttctgttgtgcttttactgctccagaatatcaatcgcgttgctctgtaacatccattgcgaagaagaaaacgacgagtacaaattagcacggattgttatgcgctagtaagtagcgcgtaagtatttttcttctttaatcagctgacagcatctgctgttcagcggtaaaagtatctgcagtgcggtcactgccaaaatacagcagcaaatcagaacgaaaagagaagaacactacagatctcatcgtaacttcagcgtcgcctggagaacttttctatcagaaattttatttcataaggcgaactacatgcagt

SEQ ID NO: 25574 - DNA, 980 bp, Zea Mays
atggtgcgcaaggcaaaggttgagttcgatgagcagccaccggataacttcgacccgaagaacccatatgcggacccggtggctatgctggagtaccgggaacacctggtgcgggagaagtggatccagatcgagaccgccaagatcatccgggagcgcctccgctggtgctaccgcatcgaggggatcaaccaccaccagaagtgccgccacctcgtggaccagtacctagaggctacacgcggcgtgggttggggcaaagatgcccgaccgcccgagttacacgagcccaagaagatcatcgaggcggagtagctgctgcctcggcttctcgtgctgctgttcctggattggaggggttgcaactgctgcaggatttcggtcatttgacgccatccgtcgcccgtcgtcgctactcccatgcccggcttgttcttttccttttcctgtcctgaactagcctcaatatactggagaccaagagccgacagggaatgtctggatcgtgcaggaaccttgagagagatggctgatgctgcagacctagacgaccgatgatgcattatgacctaccacattgctctcctcatcggagtgtgcttgcaactgtattactgatttgatgcaggttactattgttgtaacattggctgcatcctttgcgatctcctttttcccccctcatcacatatgtgtacagtggcctgttcaatgcttcatagaagcatataggctgatgtctttttcatcactgtgcaacttgccaccaatattccatctctgtcgagtccaacacagatagaattgtactgtcttttttcaaagaggtgcagagatcaggcacaccaaagcagcagcagcatcctattgaagaccaggattttgaagaatctataactaatcaagaagcagaccattatgattgttggtacgagagcaggagatcaggtggcacgacaaaaagtaggctgagagcgcaa

SEQ ID NO: 25575 - DNA, 4119 bp, Zea Mays
tgcccgtgtgccaggcgaaaaacgtagcctcgcactctcgcaggcggcggcgcatcgagaaacagggctgcggctgttgcttcttccacctctccggccatccggcggtccatcgttccgtgccggcggcctcccctcctacgcccctgccgattcttcaatcttcaccaacgtctgcgcgtagcaggctagcagtcggcacggcttcctcagatctgccggacgacttgctgttcgtcaccgactcaccagcaaccaacgtcagccatcagccggcagcaggggaagctgggcggagggtcattgcggcacggcgtccaggcgtacagaaggcaccagcaacagcccatggcaaacgatgaccctatggcagatgaagccggagtagaagatgccttcacacaggagatcaatcattcgtacgtccctagataccatgtgttgagttggatggaaactgtggaggggatggtggccggtgtggcgtcgcttccgccggtgtatttgatactgaacagagatcttcttgagacgggatggggatggaagaggctggtgccctacagacctggttatgttgagttgcatgtgttcaagaaataccttggggactatttcgaccataatcgtgaagcttttctttgtgccgagcagaagcctgatccatttggatggattgttgctgaaaagagtgccctgattgctgcagccaaatcgtgcctcaagatggagaaggcacttctcaggtactgtgctagctttctcactcctgacgacaaaaggctgatcctccggatcaaggaccaggcaaagcaaatgatccaatcagagggtgatcaatctttgattgtaactatatgcttggagtgtattgcgaaggaggccgagttaatgtacaattatttgccttgtgattttgacaccaccgaagaagtcgccgtctgcaataaggttcggcggtctgccttgaatcttatgctctacaaaggttctgaatctgctgttgctgctggtgccatgatgggtatcacaacagaggctaagtccatttttgacttgcttagtcgagaccatgacgtggtcatggaagtttttacttgtgagagtataagggaacatacagcatcagttctgacccagcttgggaaggaatttgcttgcgagactgctactgtgaacagctcatcagcgcggcctatgggggtcagtgatgttagagatctgaactctgaagtatctggttcaatggaagactgtacgagtatggatggagcaaggttttaaagtcggctagtcgactctagtcgcctaagcaccgataaggtgactaatcgcgattagtcgtcgattagctcgattagtcgatcctagtcgactccctagtcgtcctatagtcgtccatctataacaggaccatatatatatatatatatactagattgcaaatctattgacaatattacaatgaaactgtagaatgaatgaatgatcatgttttcactaaaaggtaaagatcacttagacacttaccttggattggagtatacaacagcacactgcaagattagtaggacaacacttctggtatatctccagcagccttactagtgcaaaacgtcatatatctccaacaaagcaagcagaggagggcggcggcgctcacagcagcagcaagcagaggagggcggcggcgctcagagcagcagcaagcaggggagggcggcggcgctcagagcagttagcagcaagcagatgaagcggtggcgctcaactccagctaggttaaagactgtaacggcattggcacagtttcaggcttttcagcccccctggtgggccggcccaaatagaaaagagcagcctggagcccaaaacaaagcacctagtcgagaacaaccctaatcggacgactaatcgccgactaatcgcgattagtcggacgactaggtttctagtcgccctaatcgcgtcggtggccctaatcggccttgcagcagcgataagtccgactaatcgcgactaatcgcgattagtcggacgactttaaaaccattccgatggagacaatggaaacaatccagttgttggagggggtggctaagaactcgaagaatttaaagttggtggagaaccacgaaaacgagaccagggttgccacgtaagagaagactgcatcagcatcactacttgcctgttttgaaatttaatgtacctttcacggaagccctcactaacattaattgtttgtatgtttcatctcagcttgatgactgaaaataactagggccttgcagggaaaccttcgttgacttctgaggtactgaaggttagtgaagaggcagatgattacgttccaaataggaagtcttgaatactgctgtgacttgtgttttgaaatagatatagtattttctggttctcttgcaaacctcattgttgcagccctaacatttcatggtgtgtttgatttgtggggtgggggtggatgggagacggtcaacccattttttaaagttgttcagttagatgggatgcccaaccagtggggatattcccccgagatcttggatgggatgtccatgcaaatctggtggacagagtagtccatggccttgttgaatacttattgcgcgactggttgtggtcacctaatgtgccttttctttttgctccaattgttcccaatctcatccctcattaacctgtttctgactgggatgcgcacagcaattgggaaccagcaggccctctgtccagacgctggtgctttgtgctccgttgttgtgctgctgctccactggcgtttactagttctagtgccttttcactgatttgtccgcacagggatcctggtgctagtgcttggctgattgctgctgcccctgtgttctccctcaattcgtactgctcatgcaattcctggaggccctaggaattggttctgcagttgtacctgtaggctgtagctgccaatttagttcgattttgaatttggcaggtagttgttgtgcttgtttctagatgcaagagtgcttattgtttgtggtgtttgttattggaaattttggttggtggtagttatttgtccggaaaggttaatgcaatgctgtggcttgtcttgcttttagtcaatggtagtaagttgagtaaaatgttcatgtgtatgtgcagcttgtggtcggcagtgtgaaattttgacctctaattatttgttagtaatgtaattttctcagcaggaatccaattcatgatgatgagctacattattcaagtttagcaactattgattgtgtttcccatcatgccttggatgtgtcaaaacttgaacacaccaatttgaagattatcataccctgcttatctatccacatacaaccaaccaaacaaaaatctgctggatcatcccatttgaaaacttgcaaccaaccaaacaagaatttggctcatgcaatccgtccaacctaatgagctaatacatgtaggagcatcattctatgattctatcctaaatccatggatggccctatcccatccaaccttgcctctccaacccatacggccatacaaacttgtgaccattcattgtaattctcatttcattgtcataagtgcgcctcgtttgacactgttgtttctctcgtcatcattggctttgtgtcggacacgttcatgataatttatctgcagcaacggtcaaatttatgaagctacaaggtgcaagttatgagctgctgtaactaaaaggatctctggtttcttttgagcagctgtctgttgtgtcaagttatgtgctacttgtaacactaaagtaccattttaccttatgacatgcagtgcttggttgttctgtcgtagttaaagaccgtgttgcaataagtgctagttctgtatgtttcctgggtttatgttatcaaatggttgcctggtttgcccactaatgtcatgttgctataagtattcctagctgttgagaaatgcgtgcgcgcgtgccgatcgttgtatcattgggtgcaacatcataggtcattgtagccaagggctatgaagaggggagtttcagatagtccaaaaacaccagggtacatagcaaatacgaaggttcttaggaaggaacagaag

SEQ ID NO: 25576 - DNA, 2058 bp, Zea Mays
ctctctaacaatactaatactactgcatcaatgtttgtatgtatagagagagcgcaccttatattataggtatagaataaaaagtggttacgccttatattatgggacagagggagtatctagctagctagttagttattgtgtgtgttgctcacctcagtacttctgcctgttcctttgccgccttgctctgcagggagatacccaaggaggtttacaacaacttggacactggcagccaggatgagaaatggtgggagggagtggacctccaaaagctcattctggctcacaataatcttgaggtgttaagagaagaccttaggaacttgtcttcgcttgttgttctaaatataagtcacaacaagatatcttcccttccagcagctatcggagaggttgacttctcaaacaattgccttactgagcttccacctaacctcgccacatgcccggacttgtccgaactcaaggcatcaaacaacaacatatccagagtaccagatgtacttgctggctgttccaagttaagtaaattggatctagagggtaacaagcttgtggcactttctgaaaacatgtttgtgtcatggacaatgctcacagaattgaatctcgctcgttacagcaaagaatctacttacagccatcccaggtagcattggagcacttccaaaactaatccgcttggacatgcatcagaataaaataacatcgattcccccttccataaaaggttgctcttcgctagccgagttgtatatgggaaataacttattgtcttcaataccagctgatattggcacgttatcaaagttaggcatacttgatctccattctaatcagctaaaggagtatccagttggagcctgcaacctcaaattatctttccttgatctatcaaataactcattatctggtctaccagctgaactaggtaaaatgactaccctaagaaagcttctgcttactggaaatcctatgaggacacttaggagttcattggtttctggaccaacaacaacattgctgaagtatctgcgcagccggctttcatccgatgaggaagcatcaggatccagaagcaccccaactaaagatgaccaaattgctgcagcaaggcgcttgtccttatcttcaaaggaactggacttgagtggccttggagtgaccagtgtaccagctgccgcgtgggagacaagtgatgtggtgaaactggatctttctaaaaattcaatagaagatctaccaaatgagttgtcattatgctcatcacttcaatccttagttttgtctaataacaagataaaaaggtggcctcacacagtggtttcctcccttccctgtctgtcttccttaaagctggacaataaccccttggtagagatatcatccactgatcttgtgcctctgtccaaacttgaagtacttgatctaagtggcaatgcttcagcacttcctgaaccttctgcagtttctgcattaccacagctgcaagagctttacctaagacgaatgaaactccatgaatttcctaatggtttgctgggcctaaaactgcttaggattcttgacctgagtcagaatcaccttacaactgtgccggagggcatcaagaatttcactgcactcattgagcttgatctgtctgacaacaatataacagcactcccagcggagctgggattgcttgaagctaacctgcaagtgctgaaactggatggaaatccgctaagaagcataagacgaactctgttggagcgaggaacgaaagcagttctcaagtacctcaaagaaaaattgccgtctgaataatatttatagaacaaactattgttggagtaatggaataaaatgtttttttgccactgtatctcagttttctggactgaattttgtgcaaaagtatctggaccttgtgtgagaagagagctttgtgagtgtgttgttggatatactggttatagtccacatgttttattggaacaaaaatattttctctgttcaatctttacatggacacaacctggaaagatgttatccaccgttgtatcgttc

SEQ ID NO: 25577 - DNA, 3236 bp, Zea Mays
ggagcgggaaactgtaaacaaattcgccgcgaggggatcgaaaattttctcctccccaaatttctttatttattcggcttggaaactagtgcctcctttatatacacaaacatcgctgctgcccccctccgctctctcacctctctccccccttccgtttcctctctctcctcgcccgagaggccaaaaacccagcctcgagtcctcactccccgcagattcgcgtcatagcgcggcggcggcgatggcgtacggcttctccatcaggggatacgcggcgagcatgcggggcacggccgagctcggcccgtttagtttggcggcccgggaactgcagcccatggaggtgcgcgccttccggtggtgggaggacgagctcgcgtccatcaaggcggcggaggcggaggcggagaaggagaaggagaaggaagcggtggcgggggcgggggcggagggggaggaggaagaagaggaagaggaggcgtcggggaacggccgggcgccgaagaaacgctccatcaccgacctgttcgctgaggcgcctgccgtgggcgccggcagcggacccgacgctgtcgtggacgacgaggaggaggttcttcgctccatcgtccgccggagcaaggagctgcgaagaaagaggcgtctggagcaagctgcgttggcgtcggtagcggaggagccggagacgtcggcggcaggcgaacggcgtgcggccgaggggaatttccccagaaagaaatcagctgacaaaccaagtttgggagatgaattggatacttctggtccatcaaaggaacatcagaatgatctcattacagagaagcaaaagatcccagatcttaagagaaggaagcatggaagactcagtaatagtttacagaagaaggctgagaggctaaagtaccttgagagtagaaaggctgtcaaggttggaaaacagcgagatattaaaaaagtgctccctttgcacagcattctgaagaagtacacaaaacatacgtctgttaaaatggttaaggaaaaacatgggaattcaaaaggcactggagtcatacaactctgtcgcaaatcagtcaagcgtgtcaaattctcagaaacagatgatgccaaaaagcaatgttccaaaagaccaccactggaaagcatccgcgagcttctctctgctattagttcttcttcgtcgtcatctatagagatgtcaagtgaagaggaacatgttattgcggaaagtagtagttctcacatgacagagaaagctgtcactatggctagcgaagcaaatgagaacacaaatcatgacaatcaatatgagctcagcagtaccagattgtccaccggtttgcttgatctgaatcaagctcttccagaacctacggacttaaacaatccatatgttccaaattcagaggtttcaaatcttgagcaggcacaggtaggaacttggaatctggatcaacaagttcttggtaatggaagaaaaaacatagactcatcttttgatctgcatggacaggaacaactgagacattctactgagttggacaccacatcaaaaggcaagtccccttgtactctgtcaaacggattccaggattcagtgcatctccaacagaattggagctctatgactttgcatcatggtgtctctcaactctcaactggaggtgaaccatcttcctttgaagttcgagaaagtaatatatcacacagtgagaaacgaaattttagttctgaaacgaacgtggaacaagagttgaggccttctgctggacaaaccttgcgcttgatgggtcatgatcttacagtatccgatactagagttgactatttatctgacgcggcacagaatcacacaaataatactgcagaccatcttaccacaaaggtggtgttggaattgccacgacaaggtcagcctttcctagcattacaaactcagagtattcccagtgtttcagcaagttctgcaaggacagctcaggcacattttggatacagaacaacacataacatcagccacccgttgctcgctgccaatgtgttctctggtgatccatcagtatatgaagacaggtgcagggacttcacaaacttgcaatcacatcgaaattctatattgggatatcctcctctttccaatcatggcagtgctgcatttcttcagaattcaccaccttggcgttattactctgatcattccaccaggagagattcactctcagcgccatttacaccaacagtgatgcagcatgtggcaacaccttcagattaccgtgccaatctgcctcatcagtcatatggtgtgtactctggaagctcaacagttcgacctcttaactctgcaagttttacatgcacaaaccagatagtacaagcagttgacagtagggctactgcaaaccttccgtccagaagtccaacaactggaacgacaagaactcatcacaactccaatacttcatctagcagccgtttggttctgagatcaggccctgtaaagctcagtgccggggcgaagcatatcctgataccaaatgagaatacggaggacgacaattctgcaccaatgtactcttgtgtgtcctttggcagcagtggtgggaatgtttcggcagcttatcagaataaaggagcaggttcccataggcatcagaataaaggagcaggttcccgtaggttctgatccaaaagctggattatcttgctcgttcgttttctggacagctgctgggcaagaggctgcatgttttgaaggaactgaagctgatgacctaggcaatgctgagatgaagatgcaatgcgcagttcggaggatacctgagaccgtgttaattaaaggagggtacttggttttgttttgtggcctgcaagactttgacagatccttttacttctgcagttttattcccccccccccccccctttccaaaataaagaagattttcgttgtttgaaaacgataagtacgctcaggttgtgcagcatgtgaactttgtagggcatacctggagtgtctatgtagctaccggtgatgaagtagaatgttaatgcgactcaaaagctggttgattgtacaacctgtgtcatcaggagttccctatttcatttgagccagctagatcatttttatttagcggtcatctaatataatatatcctcaatatatagatattatgttagctcaatattgtttttacaagtattattgagagagttgatgcagcactgccgga

SEQ ID NO: 25578 - DNA, 1490 bp, Zea Mays
tacaaagttactactatacacttgtgaagtggaacttgatgatatcttcattttttgactttttgtgctttaggctcctcttcttggatcgactgcagcagttagatctgcacatgtatatctttgtttaattatcgtctccgtattgtaagattaatttgagcttccattctacttttgctccacatatgaaacattaaaagatactctaattatgctatttaactccaagggtggaggtggaatgggtgattataaccacctgcaggttgtgtacatatctttagtacatatccattatgctatttaactccgaaaggagacaatatgcatcagtttcaacaactttgttgtttccttttcatgctgtcttataggatggcattttctgctcaatttgtccgttgctgatttcagtcgggtaatgttctttctgcacaatgacttttgcttgcaaagtcgagtttggcattatgctttgtgtagatgtatctgagaattgcatgactgcatacccttaacatgaaatttcatttttagagattagattagattagatatgtcgctgatggaagtccaactaatagcgaactgaagaccgccgaccttgtgtctacacccgcacattctgttgcatctatacctccttctacaccagcacttcatgttgctcctgcacttttgtctacccctgtcagatgctcatctccatttatcacgccaccatattgttcctcagttgattgactggcatgagggtggatacttgactgttgatttaccaatgtctcggggagaagttgtcattgggggtccaaatgtaactaaaggctatttcaaggatgaagctaaaacaaatgatgattgtgagcccatatatggagaacattataatcaatactgatcctttccataattactgtgttgcgcttgtggcagctgcacaaattgagctgtaaagctaggcttcccaacaaggagttaaaacaacaattcctcaaatttgtgctagaagcaagaggctgttaaagaagtgctctttagcaaaggtttcgtcattcttgcctaccgctgtccctttgcttcagaatacggtgaaacagaagtccttcattggctcttctcatcttggctcacatgcagtacttgaataccagtttcttcctgagcagccaagtgatgcatatgagaggggaagccagttgcgcttctatgatgctctagcagaagtgttaaactcaaggaaagaagaacaaatgtagagggaaatggagagacatgatcacgagagatgtaatgaagagaggttcatgcgtgaaaggcaaaggaaagaagaaaattccattagcaacagagacgtatacttataactattatggtagataaaaaatgttacaatgtctctcttctatagaacgaaactgggatatcattcattgatatatgttcgattttattcaataattattatataattgtgcaccgtcgca

SEQ ID NO: 25579 - DNA, 1031 bp, Zea Mays
aagttgaagaatcctaagctgaagaaaagtgtaccgatttcttatcaatttgagaatcctgatattataagggagagggaagaggagcagaagctgatgaaagaaaagcagaagaaggagaaggccgaaagaaaaaagggaaagagtaagaggaagcatcgatcgccgagtgattcagatagcaacagtagtggtgctttggtgttcgactccgaatctgaatcatgagtgacaggctctgaatactcttctggaagcagttcaagttatagttcatcagactccgagggcaagaagcgacaacacagaaggaagcagaagaagagaaggcacaggagggacatcacatcatcatcatcatcttctgaatctgagtctgcgtctgacagtgattctgatgataagggcagacggaggaagaaggcgctcacggagcgggtcgagtcggtggtgggcgaggtgttcagcgtcgtcgggcagtggcaggccgagcagcagaagcaagtgcaggatttccaggaggaagtagttcaaagagcccaaaaggctaaggagaaagctgcaactgaagtcagtgatgataagggggcgaagtctctaagggaaccttcagcaacaattgtggcgactacaactacgtcatctcccccagctactcccacacagacagaatagttgtagacttcttggtggcagtgaagagttgttgctgcaagttgatgcagttctttgtgcagccaaaaagtctgtagttggctttcacatgatatatgtcgatggatagtatatctgctagtgaaacatccagcatttctagtgacaaacccagcatctcaattataaaaaaaaactaatttacatttttttcatatgaatggaagtactttttgcatctagtgcgttctggtatatgtgtaatatatgttatatgccattcttaagaaatgcagcttcaaaaaccttgggtaagaatatagaattactgtctcgatttatgctattggctgtaatttataactttgatttatgct

SEQ ID NO: 25580 - DNA, 1822 bp, Zea Mays
tcagttggcttttgtcagtgtcatatatccctgtcttgtgctgcaatacatgggacaggctgcgtttctgtctaaaaacataccagctgtatataacagtttttatctttctattccaagtcctttattttggcctgtgttcgtcatagcaactcttgctgcaattttgggcagccaagctattatatctgcaaccttttctatcgttaagcagtgccttgccttgggatgctttccacgggtaaaggtcgtgcatacttcaaggtggatccgtggccagatttacatacctgagataaattggattctgatggtcctctgtttagctgtgacacttggcttccgtgacataacagtgataggaaatgcttatggtctcgcgtgcatcactgtgatgtttgtcaccacctgtctgatgtcattggtcatcatcttcgtgtggcaaaagaatctcctcatctccttgctattcttcgtattctttggggcactcgaaggcgcctacctgtctgcagcagtgatgaaggttccccagggaggctgggctccgatcgcgctatccgccgtgttcatgttcatcatgtacgtgtggcactacggcacgcggcggaagtacctgttcgacctccagaacaaggtgtccatgagatggatcctgaacctgggcccgagcctgggcatcgtgcgcgtgcccgggatcggcctcatctacacggagctggtgacgggcgtgccggccatcttctcccacttcgtcaccaacctgccggcgttccaccaggtgctggtcttcgtgtgcgtcaagtccgtgccggtgccgtacgtgcccatggacgagcggtacctcatcgggcggatcggccccagggagtaccgcatgtaccggtgcatcgtcagatggaggccgaggagtcggcctcgtcggggacggggaggagctacgagtcgtcgacggagggcaggatggcggtcgtgcacaccaccggcacgacggggaccgggctggtgatgatggcctccgccgaggacgcggaaggcacgtccctgtccaggagcagcaagtcggagacgctccggagcctgcagtccatctacgagcaggagtccgccggcaccgtcagccggcggcggaggagggtgcggttccagatcgacgaggaggagcggatcgagccgcaggtgagggacgagctgtccgacctcctggaggccaaggaggccggcgcggcctacatcatcggccactcgtacgtgaaggcgaggaagaactccaatttcctcaagacgttcgccatcaactacgcctactccttcctccggaagaactgcagggggccgtcggtgacgctgcacatcccccacatcagcctcatcgaggtcggcatgatctactacgtgtaagtgtaacccaggcggcctgccctcaaagtcaaagcagcacggggggattttcattttctttcgggtgatacgatatgcttgttttggacccagacttactgctggagatactctctccgtttctttttatttgtcgctggatagtgtaaaattacagtatccagcgacaaaaataaaaagaaacagatgaagtaattagttagttttgtctctgctctgcaccgtatctgtatcgtagtttcatcaaggtggtggcataagacacacagtagccgaatcggccggttgccaccgtttgttcaccagagctttcggtaaccctttgtaaatagattctgttcatcatggaaattaagcattgtagcttgtcaataggctacagctagcatacagatttgagcatccttcctttgcacttcat

SEQ ID NO: 25581 - DNA, 191 bp, Zea Mays
cgccttctccctatccggcaaaagtaacacacgaacgtgagggttgaacatggctatttcagccaccaaacacaatacagttcaacaacggagttcttattcataaaactgagctaacgcttataagccgctctatgcctcctttactagccggtacggtactaagttttttgcaatacaatgcaacaaca

SEQ ID NO: 25582 - DNA, 2213 bp, Zea Mays
ttgtgtgggtttcgggcctcgatttgctcaattgaggacggattttgcacggggcgtcggatctatgcgtgtcctgtatgttgtacctaggattgttgccaattctcccgtcaattttgcgtgatttttctggttgtcggatgaggggttagggtttcgttcggtccagaggtgttggactcctattcgcgcattcgttagggcttcatgccgcgatatccgagcctcttgcttgaattagttattgcatgaacattgaacagaaacgttgttatgtaacttactggttatagacggcaattcatctgtgcccttcatcatggtagttgaatatggactgtaattcattattttattctaccctctcagtagtttagacaagcatgctgcatcaggagaacagtgagccgttcgtgaggcaccactctgagcagcttgcgtgtggcaacatgaggggagcagataatggtcgtccgaatttccttcctgagaagtgccagattgcagtttgccagaggggtgaaaaagttagcctatttgatgaagggctgatacatggtgttgatctaaccaatcatattgctcagtcacaattggtgccaagtggtgtcaaggaaacaccaatagtggatcaaaacaagagacctgcatccagtgacatgcttgacatagttgaatgcaaacgtctgaagcaggaaggtcaaatcgtaactaaggaagacaaccatacatctgcagaggattttcatgagtaccccacatacacgacttgcagaagaagctttgactcaccactatctgagagcgaggatagtgaagatgaaggccattttgtggaagaactgaagaaggcgaaagtgtcaagtggatcagaaacggtgttgtgccaatgcctgatactggtgcatcgtctttggtgttggaacctgttcactgcaaggcagactgtgagtgtcatgatgaaggttcaatcatttgtgtgaaaaagcatgtgagggaagcaagagaaaagctgaagggttctgttggtgcagacaccttcagggagttgggtttgaatgatatgggtgaagaggttggctcaaggtggacagaagaggaggaacatttgttccagcaggttgtcttgtcaaaccctgcttctctgtgcagaaacttttgggatgaactccctcttgccttcccttccaagtccagcaaagaactagtgagctactacttcaatgtattcatgttgaggaagagggctgagcagaacagatttgacccagtgaacatcgacagtgatgatgacgaatggcaggcaggtgacgatggtgagtatccaatcacaggaagaactgatgaatacttgccaactgagtctcttactgatcaagatgatgttgcatgcaatccagttcctttagaaagggatctctatgaagattctgatgatgaggatgagctggacaatgccagtggagacaggcataatggtgcccagagggctggtatgttgtcagagggtaatcgtgtaatgtcggtcatagaacataatcaacagacgttcaagttagatgcagaggcgcaagacgactcttgcacatcatttgaggctcatcaggttggtgttgaaggtgggacacatactgatattgctgatgacaatcattacaggagtgacggctttggtggtggtgcagaacatgggttcttcggtaatcagtgtgacacaaaagagtgggacttcggtctcagtatcggttgggaaaagcatgattttttgtcaacaaacaatgtcatagaagaggtgttcgggaagtgctgtgacactgctgaccaggaccttatctgagccagacgcggaggcttcttgtcagctgcgaaaactttagggttctctgaattgtacagcagtagttggctattttgatttaatgcctcacttgttcttacaggaatctcatctctgtccttggaacatcatctgcttgtgatttcgtcacatgattaatgtaaatccgtagtctgttgatagcctgtggaatgtatgtatcatctttgttgtgacggtgtctcttgacctgagcgttttttctatgtgctagcgagggtcatgtaataaaagctgttgttgttccttgaccctgtctgcaaataaatgtaacctgccagtcaatgtattccgaaaggtcatttttatctgatctgaaatctgtagtcgtttccgc

SEQ ID NO: 25583 - DNA, 3435 bp, Zea Mays
agttttccaattgaactggaaaagcttaacacattaaacagggaccatgacagtgttcttcttcaagaaattggaggagttaagggattgtcagatttgttgaagagtaatttagagaagggagttagtccaaatgaggatgaattattacaaaggaagaatgtatatggatcaaatacatatccacgcaagaagagaaaaaacatactgcgttttgtatttgaagcttgccaagatttaactcttgtcattctgatgatagctgctgccatatcactaacattgggtatgactacagagggtgttgatgaaggatggtatgatggcggaagtatctttttagccgtttttcttgtgatacttgttactgcaacaagtgattataggcaatctctacagtttcgacatctgaatgaggagaaacagaacatacaagtggaggttgttagaggtggtaaaagatttggagcttcaatctttgaccttgttgttggtgatgtagttcctctcaaaattggtgatcaagtaagatggttcctgctgatggtgtcctgatatctggccattctcttgcaatagatgaatcaagtatgactggagagtcaaaagttgtccacaaggatcaaaaggcaccattcttgatgtctggttgcaaggttgcagatggctatggttctatgttggtaacaggggtgggtacaaatactgaatggggtcagttgatggctaacctttcagaagataatggtgaagaaacaccattacaggttattctctgtaaggatagtgcaaattctcgaatggacaattactgaaggctctctttggtttatgctttgaccctttttaggttcgcttgaatggtgttgcaacttttattggtttggtgggcttgtctgttgctggtgcagtacttgttgtgctttggataaggtattttactggacataccgaaaatcctgatgggacacctcaatttgttgctggaactactggtgtgaagcaaggatttatgggggcaattagaattttgactatcgctgtgaccattgtagttgttgctgtgcctgagggactcccattggcagtaacactgacgcttgcatattccatgaaaaagatgatgcgagacaaagctctggtgaggcggctctcgtcatgtgaaacaatgggatcagctactacaatatgcagtgataagacaggaacccttacattgaataagatgacagtcgtggaagcatattttgctggaacaaagttggatccatgtgatgatgttagccagatgtcagacagtgcagcgtcacttattattgaaggaattgcgcagaacacaacaggaactgtatttctgccagaggatgggggagcagctgaacttactggttcgcctactgaaaaggccattctttcttggggccttaagatagggatggatttcgacgatgtgaggacaaaatcttcagttattcatgtttttccatttaactcggagaagaaacgtggcgctgttgcagtacagttagatgatggtgttcacatccactggaaaggtgcagctgaaatagtgttatcatcttgcaaaagctggctttccgtcgatggctctgttcagtcaatgagtgctgagaagcacgatgaattcaagagatcaatcgaagacatgggagcgaattcattacgctgtgttgcttttgcatactgttcctttgacattgaaaagatcccaatggaagacataacaagctgggagttgcctgaggatgacctgactctgcttggcatcataggaataaaggacccctgtcgcccaggtgtaagggatgctgtacgcctgtgcactactgctggtgttaaggtgcgcatggttacaggagataatattgaaacagctaaagctatagctctggagtgtggaatactagatgcaaatagtgttatttcagagccagttgtaatcgagggaaaagtgttccgtgagatgtctgaaagtgcaagaggagaggccgccgacaagataattgtgatggggagatcctcgccaaatgataaacttttgcttgtccaagctttaaaacgaaaaggccatgttgtagctgttactggtgatggcacaaatgatgcccctgcattgcacgaggccgatataggtctttcaatgggcatttccgggacagaagttgctaaagaaagctctgacattataatcttggatgatgacttcacgtcagttgtcaaggttgttcgttggggacgatctgtctacgctaatatccagaaattcattcagttccagctcaccgtcaatgttgctgcacttgtcattaatgtggttgctgctgtgtcctctggtgatgtgcccctaaatgctgttgagcttctgtgggtgaacctcataatggacacacttggagctcttgcattagcaaccgagcctccaacagacaaccttatgaagagaaatcctgttggtcgaagggaacctcttgttacaaatatcatgtggagaaacttgtttgttcaggccctttaccaagtagcaattcttctgattttcgattttgatggagtaaggattctgcgtctgcagaatgaaagccgatctgatgctgagaagataacaaatactttcatcttcaacacatttgtattttgccagatcttcaatgagttcaatgcacgaaaacccgaggaaaagaatgtcttcaaaggggtcacgaagaatcacctgttcatgggaataatcggtataacgacagtatttcagatactgataattcagttcctggggaagttcttcaaaatagtgaggcttggttggagactatggttggtttcagttgctatcggccttgtgagttggcccctggcttatgtgggtaaatttattcctgtgcccgtaagacctcttccggactatttcaaaccccgctgttgttggaaaccgccgcgccgagacgaggaggaaggtgggcagagctaaagcgcaacgagtgggcagtgtaaataggcacgtgataaaaaaatggagataaattgcactggttgattccatggtagcagcatcctggggatgtacgcataagatggcaggtagtcggcctcgtcgttttcttctaggagaagcagtcggaagaaaagaagtactatacagaagccaaacttgtctacccctatccagctggtgtgtctgctatgcggcagcgaaacttgagtcattagattgtagcctgaatgaaagcagcgctagcttgcgatgtagcagtacctttttttccctggcgatatcatctgactgtaaatttgtaaatgctttcggactacgagttgttcttatttttcatccacctcttctctacggaacgtttttttctatataagaaaataaagtcaacagagcagttctaaaacgactgttttttttttcctgaa

SEQ ID NO: 25584 - DNA, 1589 bp, Zea Mays
attatgccaaccatacaatggggaaggcgcacaagaactgtcttggatgttggatgtggtgttgccagctttggtggatacctgcttgacaggaatgccattactatgtcatttgccccaaaagacgagcatgaggctcagatacagtttgccctagagcgtggaattccagcatttctagcagtaattggaacacaaaagcttccgtttcctgataatgtgttcgatgttgtacactgtgcaaggtgcagggtccattggtggaaaaccattgttggagcttaatagagtactgaggcctggaggatatttcatttggtctgcaacccctgtctaccgtcaagagcaaagagaccaagatgactggaatgcaatggttactctgactaaatcaatctgctggagaacagtggtaaagtctcaagatgtcaatggaattggagttgttatatatcaaaagccagcatcgaattcttgctatgctgaaagaaagaccaatgagccccctctatgctccgagagagatggatcacgctttccttggtatgctcctcttgatagttgccttttcacaactgccattaccacttcagatgaaagatataattggcctgttccatggcctgaaagacttgatgttagctatgcaagtgtacctgatgattctgcttctaacaaagagaagtttgaagctgatacaaagtattggaaacagctcatttcagaagtatatttcaatgacttcccacttaattggtcaagcattcgcaatgtaatggacatgaatgctgggtttggagggtttgccgcagcactcattgatcaacctttatgggttatgaatgctgtgccaattggtcaaccagataccttgccacttattttcaacagaggtttgattggggcatatcatgactggtgcgaatctttcagcacctaccctcgtacctatgatcttctccacatgagtaatctcattggaaatcttacaaacaggtgtgacctcatcgacgtggtggttgaaatcgacagaatactgagacctggaagatggtttgtgttgaaagacacgttagagatgataaagaagatacgcccaatcctgaagtctctgcactatgaaattgtcgtcgtgaaacagcaatttcttgtggctacaaagagtttctggcgtcctggcaaaccagcttccacatcagggtgacatatagatcgtactttcaagggagtcttcaacaaccaacgattctattgattctttgagacctgatcaaactaattctttctacaacacagtctatgtagattattacctgtataagtatagaaaatacatatggtaagttgaggtaataccccttttttttgccaaagcataataacaaggatgttatagacttatgcagtagtaggcaagttttgacaaatacatacaaagggaagggatcatgaaacgtgttgtgtatacttgctcgttgataacttttgtaaaaggagtttgaaataaccttgtactcagtactcatcatggttctgcaatgccagtgcattctgacgttcagctcccaggagctatttttatacctctg

SEQ ID NO: 25585 - DNA, 1983 bp, Zea Mays
acgtctcgtcagttttttcctttttcccgtggcccgtgggtgtgcgtcctaggtgtgcggcgggcggtgcgccgtgcgcctcctctcctcgccgcgacgctgccgtgttcgcgattcagcgccgtgctcgacgcccctcctctcctcagaagtcagcgccgcatctccggttgcagagacttgcgctgccacatctccgcttttcgtccttcagttgctcgacgcccctcctcccctcagaagtcagcgcagcgtctccactctccacgccggcgcgtcggcgacgcgggtccttcgaataagacggtttgttctcgcatcgggcgtcagccggattcgagggacatagatgatggaagtcgatcttgggtgccaccacgtcgaagcggcttgtgctgtgtagatccggcgaaagcgcgcaggcaaagcccgggtctgcgtcgtcattggcctcatgatcttcgtattgccatcgcgctaaagggaacgaaggcgacgaggtcttaaactttgattgatatatgcggatatgaaaatgcatgcaactacatgctagaagtctgtcttggttgtgttggagaaaaattctttgttacgtttttgttgatagcgttgagtgccaaaaatggagcttctccctgttgaagtcgttggcaacattctttcccatcttggtgttgcgcgtgatgttatgattgcctctgcggtatgccgcaagtggcgagatgcatgcaggaggcatctccgtttgctgtccttcaactccaatgactttccacgggacatgactacacgtcagttggagattgtcatcacacagactatatttcagactatggggctgcaacgcctttcgattcacattgataacacccatgagttctctgcagcaccagtgattgcatggctcatgtataccagggagaccctccgaagcctgtcttacaatgtcaggacaatacccaatgtaagcattcttgaaaagtgtggtaggcaaaagctcgaagtgctagatttggaattggaccataacaccatcacaggtgtcgaaccaagctatcagaggttcacttgtctgaaatccctttccctgaggcatgtcagcattttggccttggatttgagccttttagttgctgcttgcccaagaatagagtcattagcacttgatgtccttgaggttgtcacttcagaattacagtctacgatggagctcacaagccatacattgaaaagtctatttgcaaaatcggtaggtgtagataagatcatacttgatgcagataatttggaagttctgcacctgaatgctttaaatctcgatctgtttgagcttaacgggaaaggaacactaaaacattttaagattgatgatgtcagtgttactcatttggatattggggacaatactgatcatttggaggcagtagacgtgagcaacttcacaatagtctggccaaaattctatagcatgatatccagggcatctaatttgcgtatgctacgattttggggtgttgtgtttgatgacgaggatgagatcgtggattcagaaactatagctgtttcatttcctcttcttaggcatctttcattgagttatgaattacgagatgggttacttcactacagccttcagggatcatcattactggagaatgtctcagttctggaacttggttggacagtaataagtgagcactttggaccctgggtgtttggtatgattggaaggtgtccaaatctcaagaaacttgttattcatggtgttctttctgagacaaaaacgcgagaggatcgccagatgttagcaagctttacctcattcatagtctgtgtcatgaggaagtatgtgcatgttgatgtacaatttgagtatgagtgacagctactaggttgggtgggcatcttgtcattgttcagatgaagctgtgccatcagtcgcctatatgtgtgcctccacataacatcactaccaccctc

SEQ ID NO: 25586 - DNA, 3740 bp, Zea Mays
cagcaatccataccttctcggcttgtccctccgtcctgtcctgcgtgcgacccgacccgacccgaaaagtcccactaggctagacagacaagcctgctcgccggagatctcccgctcgcgcggcgcggcccctcgctccgcgaccatggcctccgggcaggactcgtcgggcaccacgctgatggatctcatcacctcggatccttcggccacgtcgactgccggggcatcgtcgcagcagcagtcctcctcgggcgtcggcagcgccggtggctcccttttggggaagcccgtggctccggcggcggatcgcaagtcgaagaaggggacgctgatgcagatccagaacgagacaatatccgctgccaaggcgcttaaccccgtcaaggtcctgccccagcgcaacaggaagaagaagaaaagttcccagaggcagctcgtaaatagtgtgttccccaagcttgctgtgtacaattctgtggatccttcggtggctccatctcttctcatgctccatcagcaatgtgaggacagaaatgttctgcgctatgtatactactatctggcccgtatactgtcagataatggttcccagggtttaagtgctgctggtggcatacccacgcccaattgggacgctcttgcagacattgatgccgtcgggggagtgacacgagcagatgttgtaccgagaatagttgatcaactttcagcggaatcctcgagtgatgatgttgagtttcatgcacggagacttgctgctctgaaggcccttacctcctgttccactagcagttctgagatgatggaaaagctaaatgaaattgtgtttggcatcttggaaaaggtagcagatactaaacaaaaacggaaaaagggtatttttactaagcaaggtggtgataaggagtctatcatacgtggtaatttgcaatatgcttctctaagtgcactgagaaggtttccacttgatcccggtaaccaagcattcctccaccgagctgtgcaagggtacccgaaagcaaaatccgctatccaatggtcatggtggaacggacacaatagcaggattattagcatcactgatggaagttgtgcggacaacagtagcatgcgagtgtgtatatgttcgagcaatggtcatcaaagctttgatatggatgcaaaatccacatgaatcttttgaagagctaaaatctatcattgcatgcgagttgtctgacccagcctggccttcctcgctcctgaatgatgtcctactaaccttacatgctaggttcaaggcaacccctgatatggctgtgactctgcttgagattgcaagaatttttgccactaaagttcctggaaagattgatgctgatgttctacagttgttatggaagacatgccttgtaggagcaggaccagatgggaaacatacagccttggaagctgtaactatagttcttgatctgccaccacctcagcctggttcaatgtctggactcacttctgttgatatggtatctgcctctgatccaaaatctgcaatggcactccaaagattagttcaagctgctgtttggtttctaggagaaaatgctaattatgctgcatctgagtatgcctgggagtctgcaacaccacccggtactgcattaatgatgctagatgctgataaaatggttgctgctgcaagttcccgtaatcctacacttgctagcgctctgacaaggcttcaaaggtgtgcatttagtggaagctgggagatccgcattgctgctgtacaagccctaactaccattgcaataaggtctggtgaaccttatagactgcagatatatgaatttcttcatgctttggctcttggaggtgtgcagtcaaacttttcagaattgcagctaagtaatggggaaaatcaaggtgccagtggtactggtcttggatctttaataagcccaatgcttaaggtcctagatgaaatgtatagaggccaagatgatcttgccagagatattcgccagcatgataacagcaaacaggaatggagtgatgaggaactcaagaaactttatgaaacccatgagaggcttcttgattttgtttccttattctgttttgttccaagggctaaatacttgccccttggtcctaccagtgccaagctaattgagatctaccgcaaccgtcataacataagtgcttctggtggtctaagtgatcctgctgttgccactggaatatctgatctcatgtatgagtccaaagaagtacataaagagaccaatactgtccagtctggtattgatcccgatctggcaatggcctgggcagcaggtttggaagacgatgtttgggcaaacaacgctccagctgtggataaagtaaaggacttccttgccggtgctggaactgatgctcctgatgtggatgatgaggaatacatgaactcgaggccatcagtcggatatgatgatatgtgggctaagacaattcttgaaacttacgatgcagaggaagatgatggtaggtactctggtggatcctctcctgaatcaactggttctgttgaaacctccatatcgtcccattttggaggcatgaactatccatcactgttcagttcaaaaccgtcaagtcatggggcctcacaacaaacgatacgtgaagaaccaccctcatattcgacgtcagtactacagaggaaggaatcatttgaaaacccccttggagggggtggaggacgaagtttcggatcccacgaggatgaagataagagttctggtaaccctcagtctgggaaagctttgtatgacttcacagcaggcggtgatgatgagctgagtttaaactctggagaagaagtggagattgaatacgaggtcgatggttggtattatgtgaagaaaaggaggcctggaagggatggaaagatggcaggtctggttcctgttctgtatgtgagttcatgataacagccgtgtgtatcgtttcccacacttgtggaagctgtttggagttcatgggcttaacaaaaaggcacactggaatgctcccgagagatcttcgcataaactcgtgcccgtcgtataggcacgtggccttgtggaagcaggtcatatccagtcatcttggggttcgtatgatgctgcagtgctgttcctgggaaagatttacgtgttgatttgtctggacccacaccactagtcattcaattgattgttttttgttgctaaggtggagactcttcagaggttaaaccgttcatctgtgccattttgctgccgtctgtgttcaagaaggcaatttcgtcgtctccagttcgtgttgtgcgatatatattctagtaaaattgtagaggcatcatttccccggcatatattattttggtcgtgtatggtgtgattctggtggtaaaatagtgtcattaatgttgtgtatatttgtttccgggtggattacagagtatataactataagggggtgtttggtttaagaaatcactacatccaaattgaggtggtgcatcatgtgttcattcctcaaatttggtaggatgaccctattcctcatattagtactaactaactaattatgacgaatgaggtggtgatgatcaacttattccatttcacaaaccaaacaaaaatagtgaggagtgagaagatgatggactagttcattcctcaaaccaaacatcctataaagccgtagttttgtttaggatcatcaggctaaagcttggtaccgaagtccgg

SEQ ID NO: 25587 - DNA, 1672 bp, Zea Mays
atccctaggtacggccactacaacagtgcagagcatctgaagcgtccgattgtctttgtctccatagcagcgttggtcttcgaggtgagaagtcagcgaaggcaaatctgaagtctgcttgattgcttgagtcagatctgatccagtctttcggcaccgagaaggcgagaaccgaggaggagaacatggcgggtgacggcaacggccgcgcggagcttccccggatcgcggtgatcggcgccggtatctttgcgcgcacgcagtacatcccaaggctccgcgagatcgcgcacctcgtcgtcctcaagtccatctggagtcgcacccaggaatctgcaaaggcggccgcggagcttgctcgtgacttcgcgcctgatatcgagtgcaaatggggtgatgcggggctggaggagatcatgggagatagttcaatcatgggcgttgctattgttctcgctgggcaagtccaggttgagctttccctaaagatgctcaaggctggaaaacacgttattcaagagaaacctgcttctggatcaacaacagaagcagaaactgcactgtcaatctaccactcatttcaaaacctgttcccgcataaacccatttgggcagtcggagagaactacagatttgagcctgcctttattgagtcaagcaagctgatcaatgatattggggatatgatgcacatccaagttatcatcgaagggtcaatgaacagttcaaatccatatttcaatagcacctggagacggaattttgtgggtggtttcattctggacatgggtgttcacttcattgcaggactacgaatgcttgtaggttcagaaatcacaagcgtatcttctatctcccgtcatgtggatatggctttgccgccaccagataacatatgttccctcttccaactggaaaatggatgcgctggtgtctttgtgtttgccgtcaattcaagatcaccaaagatattatggcgggtcgatggaacaaaaggaacaattcaggtagaacgtggagttgatagtggaaaacatggctaccaggtttgacttttttcctgcatacatcagttgactgatgctcactacctttgctgcactgttcatgcagttgcacagtacggtcataaaggcttttctttgcttttgttttcaaccatattatggtgttattctctggtgaaaatgggcagtgccagaagacattttacccgttctgtggagtgaatgaagaactgaagacgtttgtccatgacatgttggaagctggcaaagatggagatcacaaggctgcaccccgtggttcttatgtcgaaggcgcccgtgatgttgccgtgctagaagccatgttggaatctagtgcgaagcaaggagccccagttcaagtgaagagattctaacagatccgaaatgtcacataaaagagactacgtttcttctagggtgatttgtccattggatcatatattttcggtagtaaaatgaacattgttccaaattcatgtacataccgtcgaggttatatattaaatatatatgtgaaaaaatgacatacattagaaccaccattcctacactcgtaaaaatcatgtaccttttcttatacactagatatgttgccctattagatattataaatattagtttttttacgggaaatacgaaagaga

SEQ ID NO: 25588 - DNA, 265 bp, Zea Mays
ttttgttttaagggtcacggcaatgatccttccgcaggttcacctacggaaaccttgttacgacttctccttcctctaatgataaggttcaatggacttctcgcgacgtcggggggcggcgaaccgcccccgtcgccgcgatccgaacacttcaccggaccattcaatcggtaggagcgacgggcggtgtgtacaaagggcagggacgtagtcaacgcgagctgatgactcgcgcttactaggcattcctcgttgaagaccaaca

SEQ ID NO: 25589 - DNA, 5975 bp, Zea Mays
cgctctgcaccgcgcgcctccttctctgctgcggcaaccgggaactgcggctgcggcggcggcgacttaaaccctcgagctcgctccaaggccgtcgctggtcgatcgggcggaagaggcagaagccagccagccagccaatggcccccaaggccggccgtggcaagggcaggggcggcaaaggcgacaagaggaagaaggaagagaaagtggtgcccagcgtggtagacgtcacggtggtcacccccgacgagtcccaggtgacactcaaggggatatccacggaccgcgtgctggacgtgcggaagctgctggggtcgaacgtggaaacgtgtcacctgacaaactattcactctcccatgtggcgcgcgggcaccggctggaggacggcgcggaggtggtggcgctcaagccctgcgctctccggatcgtcgaagaggagtacgcgacggcggagcaggcggaggcgcacgtccgccggctgctggacatcctcgcctgcaccaccgcgttcgccaggccccgggacggcgccgccaagcacagggcgtccaggcacggccgccccgcgacaccgccctcctctcccacgcccgcctcgaccggggcccatggcgtcgccagcggcgaggccgcgccgccgatatcggaggcgcacgacatggccgccatccggccgccgcccaagctgggggagttctacgacttcttctccttcgcccatctcaccccgcccgtccactttatcaggaggaaggaggcgaatggcgcttctcaggaaggcgatcacttcgaaatcgaggtgaaggtttgcaacgggaagcttctgcacgttgttgcttcagtaaagggtttctacttgtcagggaagccacacaacgttagccactccctggtggacctgctgcaacagctcagcaatgcgtttgctaatgcatatgaggcgttgatgaaagctttcgtggatcacaacaagtttgggaatttgccttacggattccgtgcaaacacatggcttatccctccaatatatgttgactctgccacaaggtgcccagcactgccagtcgaggatgagaattggggtggaaatgggggtggctgtggacgtgatggaaagtatgatcgcagacggtggtcaaaagagttttctgttttggctagaatgccttgcaaaactgaggaagaacgggtgatcagagaccggaaagcttttcttttacacaatctgtttgtagatacagcaatttttagagctgcgtcaacaataaggcgactcattgatcagtctatgaactcagttggttcacatagtggtacacatggttcaaacgtatttgaggaacgtataggggacatgaatataactgtgaagaaggatggtgctgatgctagtttaaaggtggaggacaaggttgatggtgttgccttctgtcaaacgggtgctatggatattgcacaaaggaatcttctgaaaggtttaacctctgatgaaaatgttgttgctaaggattcttcaacactcggggtggtgattgtcaagcattgtggatatacggcaactgtgaaggtttctggacgtgcaaaggacagtaatgatgttaaacaaacaaatgacatctctggtaaatttgatggaatgctgaccattgatgtacatgaccatccagatggaggttctaatgccttgaatgttaacagtctaaggataccactcccgagagttatccatccagaaactgttgttggtaaccagcaccatagcccaaagtctcatgctagtaatcctgcaaagaaattggcacgtaaaatactcaaggacagcttggtaaagctggatagcatgcctagcataaattctagaattattagatgggaactggggtcctcctggctgcaacaattgcagaaaaaggatactccagcgtctgagaatggtaaggggaatgcgatgaagactgacaaagaaccagctgtcagaggtcttggaaagcattttgaacaattaaggaaacttaaaaagaaagaatgcaacaatgaaggttccagttctgagaaggaagaatgtagcaataactattcatcaatgaatggtacacaagtatcagatatgatagctgctgatgaagcaaataacggggctgatattagcaagttaatgtcagaggatgctttccttagcttaaagagtttgggagctggccttcatgaaaagtccctcgaagagctcacaaagatggcccataatttctatgatgatactgcactcccaaagctgctgattttgcgtcccttgagctttctcctgtggatggaagaaccatgacagatttcatgcatgcaaggggacttaatatgtcctctttaggcagggtggtagagctagcagagaagctcccacacatccagtctatatgcattcatgaaatggttattagatcctttaagcacatcatccgagctgttattgctgctgttgatgacatgcaaaatatgtctgcagctatagctgaaactctaaacatattactaggatctcccagacttgaaaatggtgctgacacggatgcccatattgacaataatttgcgactgaaatgggtagagagcttcctttcaaaaagattctgctggaaactgaaagatgaatttgcacatttacggaaatgtatcattctgagagggctttgcagcaaggttggactggagttagctgcaagagattatgatatgaatagccctaacccattcgacaaatctgacattgtcagcattgttcctgtgtgcaagcatgtggtctactcatctattgatggtcgaaacttgcttgaatcatcaaagatggcattggataaaggaaaattagatgatgctgtgagctatggaacaaaggcactgtccaaaattatagctgtttgtggtccataccatcgactggcagctaatgcatacagccttcttgctgtggtgctttatcatactggagattttaatcaggcaactatatatcaacagaaggcacttgatatcaatgaaagggagctgggtcttgatcatccggaaactatgaagagttatggggatttatctgtcttctactaccgccttcaacacattgaaatggctctaaagtatgtcaaccgtgcgctatatctgcttcagttttcatgtgggctttcacacccaaattcagctgccacctacataaacgtagctatgatggaagaaggcatgggaaatgttcatgttgctcttcgatacttgcatgaagccctgaagtgcaataagaggttgctaggagctgatcacatccagactgctgcaagctaccatgctatagccatagccctttcaatgatggatgcgtactccctaagtgtgcaacatgaacaaacaaccatgcagatacttcaggagaaactaggggaagatgacctccgaactcaggatgctgctgcatggctagaatattttgagtcaaaagcattagaacaacaagaggctgcccgaagaggcatgccaaaacctgattcatctattgcaagtaaaggacatcttagtgtatcagatcttcttgacttcataagcccagtccaggaaagaaaagaaagcaatgtgcaaaggaagtgtcggcgtgcaaagaataataccagagctcatcatggtgaatcagttgaagaaaaggagaatttccagcatgactcaggatctcttggagcaagtaaagacggttttgaagaagaaaaacctgatgtgcatcctcctgctgtattagaagaaaattatgctgcccatgaagagcagaagcaatgtgatgttttatcaccagaagaatattctgatgaagggtggcaagcagctaatatgagaggaaggtccgcaaatgactggtttacagcctcgaacaaaaggggagaaagatgattctgcaactgctcctagccagatttcatttggtagctttttaaaaactgacaagttgaatggggatcccagcattgctgaagataagtctttgaatggtactgctaaaccagaacaatttacaaatccaacaggaattaacaggccaaccagcattgcttccaagtttatatcatacaaagatgtggctgtttcgccccctggcacagtattgaaaccaattttggagaagaaggaagcaaaggagaagggtagtggacatgatatttatctaacactgtcatccgaggaagaagatccacagtttacagaaaatgagaaggaaaagccaagtgaggacagtagcaaagaggttctttcaagtcagcaagacttagagagtcatgtagaaacacctgacagcaacagtgatgaaaacccatctgcacctaagaaggcatctggaagcaaactgtcagcttcagcgcctccattcaatccaggatcactcttatcaatgtcccacccatacagcacggtggcaatatatgatgctagtgctgttattcaggcagtaccaaaccaagcaatggagattctccctcatgccattgacactagagtgcctcgtggccctcggtccaccttgtactatcgtactgggcattccttccaaaggaagcaaggttacacgcacagccagagcactattgtaaggggtagttactcccccacaaccatgaacccccatgctgctgaatttgtgcctggaaaaacttcgcagcaatctgatgtggctgacagagaacccagtcctgctaatcatgtggccaattctgatctggatgttgtatcacagaccacagatgaagtgaaggctgaaacacctgccactgaaaaggcaggtcaagttgagaaagtcgtttcaggtaaaggaaaggaaaacagagggaaagacatcgtgagaaactcatacaaaacagaacttgcaaggcaaattttgctcagtttcattgtgaagtcagtgcatgacagtttaggttccgcccaagctgaaccagagaggaagccaagtggatcagatgaagctagtaataaacagagcagcaacttagtcaagaatgcttctggtcgcaaagattcagataaacaagagaaatccatggaggttcccaagggcctgaaggatacagagggatttacagtcgtttcaaaacgtcgaaggcggccccagccattcatgaaccccataaacggcctctgttctcagccgtctatttgcacctctgtcagttaaggtctcattgcattttcaaagacctgcaatagtttggaagatggaccattgcttttgcttaggggttggtagaagaattttgccgtatccaagcgagcagcgagcatgtagtcaaactgtacaaaattttccaggataccctttgtaataataataaaaaaaaactgctgtaatctgcagtagctgtagcgctgaataaagtattcctttgtatgttagatatgacagaatcagaggaaatagcaagcagatgtttaggttaatccaatatcccagtagtgcttctcttatgccctagtgtttctgcagtttctcaagatgtcgtggggatttatcgttgcaatctgcaaatgctgtcagagcagaagaaactgaatctgctaggcgccaagagtttgttcatgaaggcatgtcttttattgcttctttcccctgtgcccagactgctcagtgtggtcattggatgccttgtcagaggacggagcagcgtttcaccgtgaagcaattgcagctgcagaccagatcaccagaccactgaggccaggcgtgaactgggccggcagttttaaagctgttggcagctacgtatactgtacgagtctaaggagtagcctgcagctaagcgtagctgcagagaccacacaaatgtgaatcaaatcagttcagttccaaactgtcattgctgggagccaacatccgagactgaaaaatatgttgtgcatacgtatttttcttttgcatttaaatttgaaaccggctcattgtgtccattgc

SEQ ID NO: 25590 - DNA, 1330 bp, Zea Mays
atggaggcggagaagaagccgccggcggtgtccgacgtgggcgcgtgggcgatgaacgtcgtcagctccgtcagcctcatcatggccaacaagcagctcatgtcctcctccggctacgccttcgccttcgccaccacgctcaccgggttccacttcaccgtcacggcgctcgtcgggtggatctccaacgccaccggctactccgtctccaagcacgtcccgctctgggagctcgtctggttctcgctcgtcgccaacacctccatcaccgggatgaacctcagcctcatgctcaactccgtcggattctaccaatctccaaactgagcatgattccggtggtctgcctcatggaatgggtgctcaacagcaagcactacaccactaaggtcatatccgcagtcatcgtcgtggccgccggtgtcgggatttgtactgtcacggatgtcgaggtcaatgccaaggggttcatctgcgcttgcgtggcagtgttctgcacgtcgcttcaacagatcacaattggctcctttcagaagaagtacaacattggatcatttgagctgctgagcaaaactgcgccaattcaggcactttcactcattatactgggcccctttgtggactactatctaaatgggcggtcattgttgaactaccctttttcaggaggggcaactttcttcatactgctttcctgctccctggcggtgttctgcaacatgagccaatacctctgcatcgggcggttctcagcgacctcattccaggtcctgggccacatgaagaccgtgtgcgtgctgatcctgggctggatcctgtttgactcggccctcaccgtgaagaacatcctcgggatgctgctcgccgtgatgggcatggtggtctacagctgggccgtggaagcggagaagaaggcggcagccccgatcccccggaacaagggcggcatgctcgacggcgaggacgtgcccctcaaggccagggtgagcggcgtgcccgcggtcgacctcgaggacggcgacgtgaagggctagccgctgatccgttcattcttctcgttcttttgtaactgtgcgcgcgcggtcgctcgatgcaaagttgcttgttcgtcggttctcagctatcgacactacactgttaattttgttggccccttgttggggggagtctgctcgtaggtgaccccccctcccccgggttcgacgtagatgaaacacacgcgggcaaattgttaggatttttcaggcggggaggtggcgacatgctgttatagatggtgacaagactttatataatggaaatgcaggtgtttttgaggtttcgctgttca

SEQ ID NO: 25591 - DNA, 727 bp, Zea Mays
ataatggataagagaagtatactttggttgtgccaacgacaaatttggtggatgtggatcaatcatgtcattgcacaatggtgctgcttcgtcgtcagatgaattatcagggagccaagcctctacaccaaaaggtttcaaatgcactggagggatcatggctgaagaagcagttgctctttttaggtgtttctacgaacaaggaaacccaaatgccccaaggcctcacagaccagtacgaatgcctcaacaataattggtttgttttcctggactacaatcataacgcaaaaacttcaggagtgcagacatacaaacttactgtaaaacttgtttaggattctttgtatgctttagtgtgacgcatgtatgctatttgatagtgtctttttagtctgggagcgcagccacatttcttgatcggaccatgcaagttggtcgatttaaaaggatctgtgacagaagagtttgccagtgtccgcaaaatcagcattatgcaattggagtagattgttttcatcatttgcaatcttgaaagaaatattctgtaatgatgtagatacactgcaacgtcattgactcgtgatatggtatgcttttctttgtacaaaatactatttagaggtacttccatgcttagctctttgaaaaatacaaatttgacagaataattgtttaaattgcttgcaccttcaagcattttaaaattgatacagttcctttacaa

SEQ ID NO: 25592 - DNA, 1858 bp, Zea Mays
ctctgatcccttctctcttaggcttcttcagatgacaacactgagttcatgattgacatgttacgggagtgcggactagctcacaagacaatactatttattctagaagaattcgacctctttgctcagggtaaacagaggttgctttacagcttacttgatgcaatgcaatctctaacatcccaagctgttgtcattggtgtgagttgccgcttggatgcagatcaactcctagagaaaagggttagatcccgattctctcataggaaacttttatttatttcgccttcgttggatgatatacaacggttggtggagcatttgcttatactggccaaagactcaggtttaccatcaaagtatatcgccgattataactcaagacttactgtatcctttctacgacctgactgttatggtgcatatctcatcttatttgagtacttagctattaatggcatataatcttgttaaatgaaacaaaatgtttgctttctgaaactaaaacatggtactctaacttgcttaaactcaatccttcaaatcctcgtttccaccttgagtttgagtagggtgttaactgttaagtgtacgaggccttttctataggccatatggctcatgattctatatagtcatctccacttgtgggatgcttatcttttcagatccccaatgttccccaaggttagaaacactattgatgttttttcaaccaatccccttgggattttttgttccaccatggagcagtgttttcaagttggacgacttgctgttcgttctggctgaccggcttgggcgattaatcacgattagtcggatgacttggcgattaatcatgacttgtccaaaccgacttggaattaatcggatgacttgaaaacattgtcgtggagaaacaaaagggtaaagaaattaggcagaacaactgcaaacaaattacacaatggaattctcttatcatatacgctgcagagcatttttagtgataagaaattcaaaggttgtctcaactccctcatggatgctgatgcaacaacgagcaacattcaaagatttcttttcagagctgtgtcatatatggacatggaatctggattcctgtcggtagaaagcttcctaaaggccctttcttccatgcagaggcaacctaagatggacagcttacaagatctctcgattttggaattatacattcttgtgtgcatgcacagattagaaagtaaggagcaaacctcatacaacttcaccagcataatgaaagaatacagatccatacaagacgcctataagacttctgataaatatgcaagcaccgtttgttttagggcctttgagcacctttcggatcgtgagctgattagttttggtgacaatagatggagaaaccaggcgcttgaataccgacctgttaagctcctcatatcctcccgcgagctcgctgagtccctcaagctgaacaccacctgccccgctgtactgcagaagctgtttgatcgtgaaagatacatgtagaatctcctttcagatggccgcgcttcacctgacttgagtcgccgctttcatgtttcaccgggttgtcaagttcatgtttcactgtaaaccggcgattgtattagtatcttgtccactgttcgctggaaaaggtgtgggccgtgtggccaactgcccagcgtgagtcgtgacctgcctgtcaatcgcttgagtcttgaccataggccacacggaattagatatctgtggtgcactgattttgggctaacgacccgatttctatctcgcacaagtttagcagcgtggtgacagtattttggtagctttgaaatgaatgcgctattcggagtttacaaaaata

SEQ ID NO: 25593 - DNA, 1855 bp, Zea Mays
cgcgagaggcgcgaacgagaggcgcttcccaccgggcactcctccaccaggcgtgagaggcgctaacgagagccacaaactctgctccgcgtgcacgccgcgctccatggccgccgccccagcagcagccggaggccttatgcagctccagcctccgctatgcgtgtcgcctcgcgccagcgcttcttgcgcaccaagcatctggggggccctgccccagcttcgccgccgccgggccctggcgcgcgcggcgtcgtcggtagcggccggggaggctgaggcgtacacggaacccgagctggtgttgctggaggccctcctcggcatccagggccgcggccgcgccgtcgctccgcgccagctccaggaagtggagagcgctgtgcaggctctcgagacccagggaggcattcctgatccgacaagttcaagtttaatcgaaggtagctggcggctcatcttcactacgagaccagggacagcatcgcccattcagaggacatttgttggagttgactctttccgtatcttccaggaagtttatcttcgaacagatgatccaagggtggtcaatgttgtcaagttttcagaatcagttggtgatctgaaagtagagaagcaactattaaggatggaaagcgcatacttttccgttttgaccgagcagcatttgccttcaagtttctgccatttaaagttccatacccagtgccatttagacttcttggagatgaagctaatggttggcttgacacaacgtacttgtcccacactgggaacatacgaatttcaaggggaaacaagtgcagggaaccacttttgtcctacagaagagtgcagacccaagacaaatcttattgtcagctatatctgcaagaacaggagtagaagaggtcatcaatgattttatttcaagccaaaatggaacaaaggctgatctaagcattctggtgggtgaatggcaactattgtggtgctcacagactgaaggtgaaagttggtcatctgttgcatctgccggtctcaaggacttccagattataagagaagatgggaaattaaagaattcagctagccccttcccaggtctcactcttaatgcaacaggcaacatatgcaaaaatgggagtggaaacacctttaccatgtccatgaaagaaggagctgttaaagttggtggtttacagtttcccttggatgctcaaggagaatttgtgatggaaatcttgtatggcattcacgtcttcctgaaattgaaatatgaagcttatacttaggaaaatgttggttgctggtgagtggtagctcaagatagcagaaataatgcttattctgaatgagttttttttccccacattacaggtatatcgacaacaagataaggatatccaggattaaccagcacatgcttgtccatttacgcattgcgaatacaacatgacaccttaatgaagactatgtgaacatatatcctaatttcattgctgagcacacctcatcagatgtgactaggtcatgcgacataattttaaatttactggtgtatagctaacattttagcacaaaattttctacatagttttcttgtactcaaaccgttttctcacaaacatatggaaccacagttgagcagtttgtatggcaacattctgtaaatgcctgtttgaaaccagatccgatttctcaggggatttcttatgtaacttcagagttcctagaagacatgggcagaaagtagatctcaaaatgcccttgtgcaattaacttttattttctttatgggcccggacggactcaggctcgtgttcgtgctacccgatttatgtttcaggactgaatgactactctctcgtca

SEQ ID NO: 25594 - DNA, 1362 bp, Zea Mays
gtgaccattcctattgatattgaggaagaggaaaagaaacttaaatgtgctattgaagaagctgaaaagcaatattctgaagttagttctgagatgaaagatcttgaaataaagtctaaacaatttgaggaattggaagagcggtactggcatgaattcaacagttttcagtttcagttgacatctcatcagagacgcagtttttgccaagataggagtttctcaggttcatttggaaatgttgaagcatactaatgttctcaatgatgcattctatatttcatgtgatgaagtaattgcaagaataaataactttcgcctcggacgccttcctaatgtagaggttgagtgggatgagataaatgttgcgtggggtcaggctgcacttctgttgcataccatggcccattatttcactccaaaattccgataccggatcaagattcaccctatgggaagctatccaagagtcacagacatccacaatcatacatatgaactgtttggtcccgtgaatttgttctggagcacccgatttgacaaagccatgacatggtttctgacttgcctgcaagagttcgctgagtttgccataagtctggataaggagaacaatgttccacctgaaaaaacactgaagcttccccacaagatcgatggtgacaaagtagggaaccacacgatcgtcctaagtttcaatcaggatgaaacctggaccaaggcgctcaagtacatgctgtacgatctgaagtttgttctctcctggtttattggcaatacaagttttgcgccaccttcgagatcactgcacacccaatttctgaagaacaagagttgatgttgttctctctctctctctctctctctctctctctctctctctctctctctctctctctctctctctctctctctctaagggcatgtttgggagcaagaaggggattttagccccttctccaatcctttggcttagtaaccaggttcccggatcgatgggatcgaggaacgggaacgtggtacgcggtacgctacaaaaagtaggatttaacactaccggaacgagattgttcccacgttcccggaacgaggaacgtggccaagttcccagttcccggttgttcccggaacgaggaacgtggccaagttcccagttcccggttactaagtcctttggtcccaaacatgtcgtgactgtacatagtttatatacttgaccctagctagccgttggatgtaaccgtagtgacaatgacgacatgtttgatgtacatatgtttactgtactatctaaagctcagcgactccattttcgctgcgctctttaaaaacctctgctgcgctcttattcttggcagccac

SEQ ID NO: 25595 - DNA, 1974 bp, Zea Mays
cagcgtcgccatcccatcgtcgtcgtcttccatagctgagcttgtggtgtctccgcagtccgcacttggcaattccgtggccattatctactcctcggctcctctcctcgcagaagaattcgttcccccaatttggagttggaaaagcgtcgaccccagaaaacgggaggcctcgacctcgctagtctccgttccattcgaaaagccatcgcctggtcgcagtcgtatcgatttgggaacccctgccccacccaccactgcgggctgcagcctgccgtttcgctcgaacgaagcaatgctccaggagatccaccgagtgtttggcgagtggaccgtccgtttccagattgacgcggccaataaggagaatgctgtcccgttactcttcactgatggtcactttgcacggcaacctcagccggtgctacaaggccatgagcgcgctgcggccagatggggtatccaggcacttcatgtccgctggtggtttcgaacgcgtcgttttaggggtggtgctcgtcatgtccatctcgggagcttcttatacagcaccgtcatcatcggcgctcacagaggaaaacttgcttttcctggaggcttggcgcgcggttgatcgagcatactatgacaaatcttttaatgggcaaagttggtttagataccgtgaaaatgcccttcgcaatgaaccgatgaacacaagggaagagacatatgcggcaatcaagaaaatgctttcaacattggatgacccttttactcgtttcttagaacctgagaaattgaagagcttgcgggaagtctggtacgcaaggcgcactcacgggtgtaggtttatcgattggttacccaatggcaattaatggatcaccttcaggagttgctgtcatgacagccacccctggtggtcctgcagaaaaggctggcattcttcctggagacaccattttggcaattgacaacagaagcactgaagatatggatatatatgatgccgcagaacgcttacagggccctgaaggaagttcagtagatttgtctattcgtagtgggaccaataccaggcatgtcgttctaaagagacaaacagtcaatttaaaccccgtgaggtcaaggatgtgtgagattccaggttcaaaagatagctcaaagatcggttacatcaaattgacaacatttaaccaaaatgctgcagaatctgttaaggaagccattaagacattgagggacaacaatgttaaatcctttgtgctggatctgcggaataacagtggtggcctttttcctgaaggaattcaaattgcaaagatttggatggacaagggtgttattgtatatatatgcgatagccaaggtgttcgtgacatttatgaggctgatggcgctgatacaattgctgcatcagaaccgttggttgtgctggtaaacaaaggaactgcaagtgcaagtgagatccttgctggagcgctgaaagacaataagagggcagtcgtatatggggaaccaacatatggaaaagggaagattcagtcggttttcggattatctgatggatctggcttggctgttaccgtagcacgctatgaaactcctgcacataccgacattgacaaggttggtgtgattccagaccgaccactgccagcttcatttcctaccgatgaagatgccttctgcagctgccttagggattcaacggctgcttgcaatctgaatgctgctcagctgtttgcaaaatcatgaccaggcccttcattcaacattttgggtcttgggcgttgtacagataaccgtggtgtttcgtaggagctgcttgtgcgtggtgtgtgggtagtccgtaattcttttcattagcattgatttttgtcccagttttatcgcctgtgaaatgaaagcattgtttctgcgtgaaatcacggtcgtgttgaacatgcacttgatgcaacaattttgaatggaagcactaagaaaacctgc

SEQ ID NO: 25596 - DNA, 982 bp, Zea Mays
gtccacggcaacgaaacaagtccatctagaccgttcctcctctaatccccatcctcgctccccccaaccctcaccgccatggcgaccaccgaggactccgccgccgcgggcgaggcccgacgcctgttcgccctcctcgagtcccagcagcagatattgttgaggaactaataaagtcagggaatgctatagaggctatatatgttgcccatgaggctgatttgcttgggaaatttccacctgtgcctctcttcaaatcttatctgcagaattccactgataaggctcaggcagtgttgaaaagtggaagacattccagttctgcacttgaagaggcaaacagcttggagggcaatgcatacaggtccgtcataaggtgcgtcgagtcctgccagctacaatcggtgtttcctttagaggtcctgaggaagaagttagggaagttggagaaagagaagtctgataggaagaaggcagctggtccaagcagattcccgaacaagcgatcccgcggcgcagctggaccctatcccttccctgctgccaaggctgctaggggctcaagctttggtccgcgtttccagaacccagtctcacgttccttaaactacgcacctcatgctggatatataaacccagcagctgcatcaccattctctgtccctgggagcgtgtcggggagacgaggtggtgtaccatatggcggacctggagccacgtatggtggctcccctagctttgcaaccggtggtgggcagcaaccattccgtcgttaggtctagggctgtttgttgtaactgaatgctccttgttttctggctaatagggataatgtatgcctccagctattcaagcatacttgttcagttcttgatggatgctggatattgaacgtcgtgtagtacacattctatggtactgtgtttgctttgttaaatttgaactgtgtcttccataattttgtggcgcaggcatacgtggg

SEQ ID NO: 25597 - DNA, 2744 bp, Zea Mays
gtcgtctccccgttcgaggggatcaggggaattggacgggcttgcttcgactccacctcgcctccgtcggcgtctcatctcatgctgggactctggtggggtggggattgacttcgctatagcccaatccagtcagcagcagcttcccgccgccccatgcctcgtcgcggccggtggcgatgggcgacgtcccagtcccttctccagctccccctgtttccggcatcgatatgaccccacgccgccgccgtgagccctccgagccccgcagcgacagcgactgggacgctggatccagtcgcgagggctccccggacctcctccgccgcgcgcccgccgtccagatctcgcgcgcctcctcttcctcgtcctcctggctccgcgagatcgagcgcgaccgtgtgcgcctcgtcagggagtgggtccacatggctgcccgcgaccgtgacgacgacaccggacccccaccgtcccccgtccatgaacacgctcgcagggacgcccccaggatccgcggccgccaagcgcgcctcgagctcgtcatgcgcatggccgccgaccgccaagccgagctccaccgcctctcgcagcaccgcgccgtctctgactttccgcatcgcaacagaatccatcggtttaccagaggagaggaggcccccatctgtggccgcaagggagcttggccagctgcggcaaaggcatcctgtctctggtttgagattggagaatcttgtccgtggtcaagcagatagccaagtggatgcttcttcagttcacgatgttgagttatctacaaatgatcgttctgaattaaggcctcctgaaactactcaggagagacatgagcggacaagtgagattgtcagtcttcaacaaatcgacagtacggcaatgacatcaggatttgaaagtggcagccctaacattgctgaagtcttctgcgggtctcatagccaagcagaaagtcaggatgatttggaacatgagagaagagactggcaacgattttcccatgctgtgattggagaggaatctgaaagaacttggcgtgaaaatgcagacaacatgtcatctcatgaggggacagcagttgaagatgataataacgatcatcttccagaagcaaatgaagagtcaaccagtgttgatcaccttcctgaaggacttgaagggtctatcactgatggtagtcttcctgaagcgcaagaagatcagcatgacagtgatcatcttcctgcagtgcttgaagagctgcatggaaataatcactttcaggaatcacatggggaatggagaagagatgatcgtcctgttgaagtctatgatgagtggcagagtgatgatcatctccctgaagtaaatgaagagtggcataatgatgatgagtctaatgatactgcagacaattggcatgataataattctgaccaaccaattgatcatgatgctgctcttattagaagagctaatactttcatccctggagatgatgataatgtgtacagcacagaattgagggaacttctaagcagaaggagcgtttctaatcttcttcacagtgcttttcgtgaaaacttggatcgacttatccggtcatatgtggaacggcaaggtcgtggtcctctcccttgggatctggaaggaacaacccctgcccctccatcaccagttcaaattcaggaggagcaaagagatgatgaggaccaggaactgcagcgcactgtcaacaggcctcctttagtgataccacccccacctatgcctcctcgtcagccactttggcattcagagttgcatcgtactaattggatcagacaaaacattcatcgttcatcttctgatattgaatgggaggctatcaatgatttaagagctgatatggctagacttcagcaaggcatgagccatatgcaaaggatgttggaagcttgcatggatatgcagctagagttgcagcgttctgtaaggcaagaagtatcagcagccttgaatcgtttcattggggagcaaggtggtgaaagtaaagaaataatcgatgatggatcgaaatggataaatgtgagaaaagggacctgctgcatatgctgtgagactccgattgactcccttctgtacagatgtgggcacatgtgcacttgctcgaaatgcgcaaacgaattggttcgaggtggagggaaatgcccgttgtgccgcgcacccataatcgaggtcatccgagcatacttcatcatgtagatacaaaaggaagacagcaagaagatagaagaggcccaaattgtttttggtctgtgtggagtcgttagcgggttgtgtattcaattttgttcattctctctaatgcgtttggttaagtttttttccggcttcatttcgttttggtctgcttgccctattgtaagtaatgtacggttttgggtgtggcggcaggacgggaaggtggtcttctctcattaggacttgggtcactgctaattatgttccacaacgactaatggggttggaggttgtcgaaacacgagatgaggaaacttttggtatctttttgttcgtgtagcaccagcaaagtgcggcttggtcgcttcagtgtttcgtgtgattttgttgttggtcttggctatgtggtcatgatattttaggcttctagtttgcagatggatgtaaaagtggtactttgttgtcatgggcgatgctatttcctggatgtttgctttttctttccacaatagtaaaacagatcattttta

SEQ ID NO: 25598 - DNA, 2651 bp, Zea Mays
agccttgtactttgtttgccaattctgcaaccgtgcctttttctctcctcccaatctcccattaccccagcggcccagcgtgcggagacgggagacgcgctccccagtccccacccccctctcgtgtcgtggcgacgactggggggctgtcgctgccgccctacgtcaggtggccaggtcgtattagggcacttcgccggcgacgagtaccacaaggcagtggacactttctctggtatcagaggatcaatgtccaattattatgatgactacgatgacattgacgggatggaggatgattatgatatggatgatcccattgatgacatggtagacgagcagcaagggattagggattctgatgtggaagataatgattatggacaaccaaatgataagatcccagatacttcatcagcagatgcaagaaaaggaagggacattcaaggaataccctgggagcagataaacataacccgtaaaaaatacagacagtccagattagaacagtacaaaaattatgagaatgtacctaactctggagaagaagctatgaaggattgcaaaccaacagagaaaggtgggatatactatgagtttagacgaaatactagatcggttaaatcaactattctacattttcagcttagaaatttggtatgggcaacgtccaagcacgacatctacctagtatctcattactcaattcgtcactggtcagcattgagtggtgtggatactgaacttatcaacgtccaaggacatgtggcaccaagggagaagcatgcaggaagtttattagaggggttttatcagactcaagttagtaccttgacagtcaaggacaatttactggtagctggtgggtttcaaggagagctgatctgtaaagtaagttaacaactatggatcaagttcgtttgaatccatgctgttgatgtgctagctgttggcgcagcatctttgctgtggactgtggtcacattatctcttctaaccactttatatatctatttttacttttatctgtccttaccactggaatcttcctatatagaaacttggacatataatgcacacattaggctaatgatgtcactgggtatccagtcctttactcaaactcatgtccgtgttatttggggagggtatatatccagtaaaatatggatatggggagggtgtcaatgggtaatacccattacacccatacccactctaaacatgagagatggtgatggtgaaggagatatgcgggttcagtgaggcggagacggcaaggagaaaaggatggtgcagacaattgctgagtaggcatcagctagtcagccgaggccgggtgatgcacatcggcggcacggaagaatgccagcatcactgcccagcagttccctggcaacaacttatatctcagttctctgtgtgctctccatattgatcttttgttcaattgaatatcttctgttgatgtcaaatgcagcaccttgatcaggaaggtattagtttttgctgtcgaacaacttatgatgataatgctattacaaatgcggttgagatatttaatacctctagtggcgccgttcacttcatggcatcaaataacgactctggtgtgagatactatgacatggagagattccagctattcaagcattttcagtttgaatggccagtgaatcatgcttcgttgagtcctgacagaaaggtggttgttattgtgggtgatgatcctgatggtctacttattgatgcaaactctggaaagacagttcattccataaaaggacatcgggactactcatttgcatcggcttggagccctgatgggcgaacatttgctaccggcaaccaagacaagacatgccgaatctgggacgtgaggaacctttcaaaatccgtccatgtgttgaggggtaaccttggagccatccggtccatccgcttcacctcggatggccagttcatgtccatggctgaacctgctgactttgtgcacatctacgacgtgaagagtgactacaacaaaaggcaggagctggacttctttggcgagatatccggcacatcgttcagcccagacactgacacgcttttcgttggtgtgtgggataggatgtatggcagcctgctacaatttggccgcctgtacaactactcgtatcttgactccctgttttgatgtggatccaaacgggtgttgaactgttgggttttggtgtacctcagtgctctgaatgttgtcagcataaattaggtggttatccctaatcaggatattaagttgcaaagataattgaattaataaatgttgtaccgtgcccgatgtgtatatgtaaaaagaaatgtatacatgtgcctattgagagaccgagttgagatgtgacttaggggttgtttgtttgggattataatctattcagattatataatctaatttatttgttttaggggttgtttgtttgggattataaatataatctaacttatttgtttgtttgagattagtctagcttgaaaagtatgtttgaccttgtgtgcataggattgaatacagtgtgtgtagtttcatgtagacgcaggtaatgtatgtttctgtcacgggactgaccggccgtggtaggaatgtgtgtcgaaggaaaatatcttttggc

SEQ ID NO: 25599 - DNA, 584 bp, Zea Mays
ggtccaggtagctgaacaccgcagcttcactagccggcaatccttctgagcctgagcccacagcaccaagcttcctttggttgaagttctctacctcctgcaccaactcatccttggttctgcaatataccaccacgggaaaccaagctatcaacggactgccaatacatcattctgaaatgcaggaggcgaacataaattagaggcttagacatgtgcaaacaaatcatctcttcctttccgcattaaaaagtttcagcaattgaaaacatgtccatcaggatggagcccaatcgcatcaagagtcccttcatccatgacaagttcaaatcttctctccaacttcgactccaaaacatcatcaacctgcaaaaggaccattcctataaactcaaataattcttttctgctcttataatattaaggctagttttgcacctaagatacaacgagaaccattggggatatgttataaagtgaagggcaaggacagcaaatgtgggcatgcatgtcgaggtgaatctacaaattataatatatgcttcagcggctgactcaccaagaaattaatgtgctcaaaccca

SEQ ID NO: 25600 - DNA, 243 bp, Zea Mays
aaactcgacctgcgaaaagtaagacagcccccgagcattatattaagaagaagaccttctcacacatgtcgagaaaaccactgaacccctgcctcacccatacacagcggcatcgaaagcccatgtgacaacgaccatgactggggctgagctttagacctgtgctttgacatgggacagacgaggggattttttaaccacagcctgaaattcgctcccacggagagtcgaacccaggacctg

SEQ ID NO: 25601 - DNA, 2359 bp, Zea Mays
ctgcaaacccaggcattcattactcccaccgcccagcagccagcaccaatgaaatatgggtccaggtattgtccacgcctccacggtgcacatgtttcatcgggtttgacagactgcagcatatatggaaagttggaaacaaaaagcgtctcaattctgctcggtgcactcgaagctactgctattgccaattccgtctctattattatctgataatactcgtctctctgctcacaagtcacaaggaggggagcgaggcggcggccaacacctagcagctccgaaccctagctccggccactggcggcgatggctgctgctacggcgttccggtcggggacgaggcggggcgacgctctcgcgcccgtagaggacgcgggctccgccactcgcgagcgccaggccgcgggccgcggcggaggcagcgtccgccggtcgaagagcctgagccggttcccgccgccgtcgccctccaccgaggacacggcgacgccgtcgtcgaggttcgtcaacaaggtgcggggcgggggaagcggcggcgtcttcccgccgcaggtcagcctcgacgacctcgccgacgagttcttccgggccagggccgagtccgaggacgacgacgacgaggagactgctgcgcgcggccggtcaaggcttccagcggccgcagagcgtgggggcggtggcgctggcggtcggcggagctccaccgcgcggtacgctaggcagacggagtcttcgcggcagcgcgggcgctccgtgtcgcggccgccagccgagcggcgaggcgtagcggccaatgcggtggatggcggccctgcagccaggaggcagcgttatgcgtcggtcgaccggcgcgctgccatggatcgacaacggtggtgcgattcggataatgatatggaagttcctcaccagtatgtttctagggggatgcataccaaaagtagcagtggcaatagcctgcagagttcattccataagccatctaaagcaaatcaagctttgaagaggtctacaagtcaaaaggatttctttcattctagagacagcagctccagccattcttcaattactgatgatgagtctaggagttcactctctttccatagcagaaatcagaaggctgtctgtgcagtttatggtcttgacaaggagcacggaattgatgatggggctggaaatgtattgtacgatgtaatgcgaaaagaagttaggcaagctgttgaggaaataaggaatcagcttgaagaggccatgacaaaatctgaaccttcagaaaaggcaataaacagtgatgcacaaccaacccaagttattactcagctccgaaggagctacactagtaaattggaagagtcagagaagcggaagcaggaactgttagctcaattggcagcagaagaacaccatggtcatgagctcacaaaaatagttagagaattgctacctactcctaaaaagactgcaaacttacaaagacagccacactacagaagaaggagcaatgatagatcaaggatgtcaaaacgacttactgaagaggctgaacaatactttgaagatttcctgtcgaatgttgaagacactgacttttcttcttttgatggagagaaaagtgactcaagttcaaccaggaaagacctgttgttacttcatgctatgacagaaactccagttaagctcccagaagttgctttacctgcagaggcagatggcgttgtccttccctggctgcaatgggaaactaccaatgactttcagacctccccgtgcaaaaccaaggcccagggagaaagtaccagaggcagcactagcaatcagactgcgagcagccgtgggagttggagccctggagaccatgccacttcatcagttgcctctaaaaatagtttactgaccagatttggtgaggttgggatttgccgaagcagcttgtctgactatgctcgaaccttgtcgtttcacatcgacgactatttgcatttaaggcagagtgaggatctcctcttggagacgtggatgcagaaacaaaggatcgactctggcggcctagtcctgtgcagtaaatcgacgatattgtagagtgcagccaaataggtagttgatggggttgagttagactaataattgcttggatttttacctttagctgccatggctcctgccgcctagtgtgtatagatgcatgcattatagttaacagattggataagctttttttaacgcttcatcgtgattaagaaaatttattttttacaccatcattctgcaagtgcaaatgatccacgacaatattgccgagattaagatccatattgtgttgcatctcaacaatataaaatgtcaatctctacaaaat

SEQ ID NO: 25602 - DNA, 2083 bp, Zea Mays
gtgagccaaaccaaaccaaaccgcctccagctccagcctcctgtcctgctcccttcctcccctgcctgcctgccgcgcaccactccactcgagtgactcgagtcgtcctcctcccaccacctcccgtccgttgcgttgctcctgcccgcgcctcctccatccaccacaccagtccgtcgttaaagctgcggcatcggcagcacacgccgacgggtacaaggagcactcattgcctccccatctcgtgtaggctctccccctcctccgcgctccgtccgtctctcatcaccgttccgccgccgccccacctctccctcctctcgccgccgcctccgaacccgccacggcgcggcggagatccaaccggacggatctggatcgacctactccgacaccgctttccgaagatagatagatagataacaaggttgtgctgtgcttgctgtctgttgggaagtggaggaagctcaataagttgatatccgcctcgagctcgagggaaccggtgggcaggtacctttaagatctgacccagttcttgtctccgctgttctaaattctcacaggttggttgcgcaacggtccaagaaatgagcctaaaccaaaagcaaaagaaaacaaccaaacctgtgcagcttttgttttgtttagcctgcgatgcgatgtgtccagtttgagctcgagtctcgagagcatgcatgtgttatcctttgtttttctcttttattctgccaccaacttgtcacattttgccggccgttacgtcgcgtagaatgggatcataatatatactccagtataaaacataaacaaacggctgcaaagctgcaggttttgtgttcctatcctagcacataggataggacatagccgctgcatgttgcgaaggatatgagcacgccaggtccagccattgatttcttgcttcctttttcggttgtagagtcagtgggcgcagcgcattgccttgccttgccttgcctcatgattctccgtttggtaaactcatatttatgaccatgaaggatgtggcctacattgctggatctgctgctacattggtggtgccactgatctggtaccttggtgatgaaaaaatctatgctggtagtagctaggtagggtatttgggagtacttttatcatgaatcgatccgattctctgtggcagggccccccgatcacgagcatggacagaactgccaataatgcggtattggatatcgagagccttcctcaaccgcctgataaatgctgctctgggagtccgaagatgatcagggccttgtcgcgtaagggttcgaaccggatggagaggaggggcggcggcggcggcgagcaggagcaagaggatttggcgaaaaaacttgtcatcaaagttgtgccgtctcaactggagcagcagcccctgggtcagaacaaggcgctggtcgctccacattgcacacctgttcttgttgattctggggaagggaggagcaaaagattcattagccggttcacgtccatcaaccctcggaagattctcctcttgttcgcaacgctcaaagcggaggcctagtcgcctggagacacccaccaccaccatttgcgtcggcgagcgggcggcggcagtacattccgagcttgagtttttatttttctctatttttgtttgtgaggtagctgccgcggcgagattagatgcagcctgccgctcaggtgtctgtatccattgactgagtgagagactgcttcagtgggtgtcattcttcctcgcgtgtatgtatattggtggaatcgttgatgtgacttttttagtcttcaattatgtgcagcagatcatgtatataacaggagatctgttgaagacagatcggcagagaagttcaattcggattaaaccggctgtttggactcctgcagttttaatgcatagagacaaaaaaaaactataacagtagaagctggtatgaattaaagccaagtaaatataagacaaatgaccataaattgaacagtgatatatatacaggagggctggtacagtgctatacatggcccttcttctagttataagactgtcactctaaaatagaaaacg

SEQ ID NO: 25603 - DNA, 454 bp, Zea Mays
gtgagtttgtgagtatttggtgcatggaggccacgtaggtcagttcatatgtggttggcaccatgggaaaacacctctactgcatgtcaaacatgtcagggacaccttgccccatggttagtaggttaaaaggctaagtccagtgaagctttcctccttgccttaagccctacccacagaccgttgtaaagtgtgtggaggcctatgttccaactggtgaaagcctctccctagtctctagccttgatctgaaccagagccgagcacgccagccctctgcgtggtgaccacggccaccagctccttcacctcataatggccagaacatagtcgcgccaccgcaaatcatcgtcgtgtttagtttcatagtcgaccggccaacatacgacttccccgagcagtttcatgcacccaccgagaacttggactgtcagagctcccaaaataaagagtg

SEQ ID NO: 25604 - DNA, 727 bp, Zea Mays
attttatcccaggagaggtcgctgcgggcgagctggctcgctcacccacccttgcccgccgtttacggtttagccgcgtgctctctctgtctccctccctccctgtcggggacaattcggctaccgctgccgccctacgccaggttcccagctcttcgccaggcccttctccggcgacgagcacccaccaggccaccaggtttgttgagggggacttcgacacgtacgtatctcagattaggaagccacatgtctggggaggcgagccagagctgttgatggcttcacatgttcttcagatgccaatcaccgtctacatgcacgataaagccgctggtggtctaatagcgatcgcggaatacggccaagagcacgggacggaagctcccgtccaagttctttaccatggctatggccattatgatgcgctgcagataccaggagagggtggtccgaggtcaagactgtaacgttagtggctctgaatctaaatggcaagttccggttcgatactttcttcctttgtacatgtacgtgcatacatacatactagtcactaacgcgcgcctagcgcgcgataggttgtataattttattaaaatgtgtgtatagcatgtattcgtaagagaaaaaaagattaagttatcagaaagtaagtaactatgttgggattcataagaaaacaaaaaaaagtatcttgtcataagaaaacagacatgaattaatt

SEQ ID NO: 25605 - DNA, 1566 bp, Zea Mays
actcctttctctcccagctcccaaaattccctctccgtcgccgccgctcccaaaatcccctctccgtcgccgcctctcgccaggtcgtttccaagccccgttgggggcctcgccggcgccggcattggatataacctcgcccgctacctccgtccgaatgcagggccttgatatttaatgggctggaggtggtacatgcatgttcgcagtgacaagaacacattgaaacgttggtttttcattgacaagaggcttgttaaagcatttttggtgcactaaccttttgttgtctgtaattggtttcacaacaagtttcttggggggttgtgtcctgttgatggatttgaagacaggcctcaattcacctgttattgctgaccatctccctacgttagcattgcctgctgctgtcatgactttcacaacacctactagctttccctctccggggctttgcttgaacactacaaagaagatacctctgcctggtaagattgaagaagttcgtgctgctggatggcttgatctcatgaaggcctcatcacctacccgcaaaaggcagatcaaggatgtcatctgtgatgctcaatctgatcttgatttgcaatactgcaactggacagtgaactatccttctgctttgatctcatttgaggcaattagtgatcttgctgggagtaaaaggttggcattgtttcttgactatgacggaacactttcaccgattgtggacaatcctgaaaatgcattaatgtctgatgagatgcgtgctgcagtgaggcatgcggcatcacttttcccaactgcaatcattagcggaagatctcgtgataagctaaatgaattgtactacgctggaagccatggaatggacataatgggccctgttaggaagactactgactccaatggcgtggaatgtattcggtcaactgatgtgcatgtgaaactactttctagatctttaccctcaatttaaatgttttacttgctttcttagtgtgtatcttcttatcctcctcgtagggtaaagaagtcaacctgttccaacctgctagtgagtttttacctatgatcactgaggtgtatgaaaaacttggtgagagtgttaaggacattgatggtgcaaggatggaagacaacaagttctgtgtatctgtgcattaccgtaatgtggcggaagatgactataaaaaggttttccatcgtgtaactgctgttttggaaggttacccttgcctaagactaacccatgggaggaaggtttttgaggtccgtcctgttattgattggaacaaaggtaaagctgtggagtttttacttgaatcgcttgggctcagcgagagtgaagatgttctccctatctatgttggagatgacagaacagatgaagatgcattcaaagttctgaaggcaagcaaccgtggctttggaatattggtgtcgtctatacccaaagagagtgacgccttctactccttgagggatccagctgaggtaactcatagcactgtggcaaccacaacgaacttttgctttgaatatttcttgggtcaaaaggaaaac

SEQ ID NO: 25606 - DNA, 1106 bp, Zea Mays
ctagtgcattcaaacagtccttaagtccaaatatccaatatatctcagctatatgttgtgtgttgagtgtcaagtgtgtgcaggtattgatatcacatagtttaggctaggatgaccagtggaagagggatgatctctgccttgtaactaataatgtctgatatcttgcatgcaatggagatggctcgacttatatgtggtggctgccagacattattgatgtatgctcgcagtgcaacaactgtaagatgctcatgttgtgacacagtcaatcttgtcagaccagtgagtagcatagctcatgtgaactgtggccagtgccaaacagtgttgatgtatccatacggagcaccgtctgtcaaatgtgctgtttgcaacttcattacaaatgttggcggggtgactcccatgatacctttgccaccaccagcactaactgcatcaagtggaacttcatatatcatcccgtcaatttccgtgccgacgaatcaaccgcggaatgtaactgttgtcgttgaaaacccaatgacagtagatgacaagggaaaattggtgagcaatgttgtagtaggggttacgagcggcgggaaaaagtgacggcatatcacaacccgtatagctttgtccaaactatctaaaaagggtttaagaatacataccttgtatcatactgctgtttggcgatcggctgctcgacggaggaatccccctccctggagagcgtagtggcaaggcagcgctgctttcgccactgcgatcgtgctagaacgagccaaaaaaaaaaacgaagtgcgggtgtgcatactcagagtatatctgtagcttgttaccccttgattcttttgtatgtaatatgggctctgcctgactttcactgtgtgatcaaatttccaagcccgtgggcgctgttgctgcgtgccttgttattagtgaataacaaacattgcaaatggctcttgaaatacagtgtgtgtgtgttttaatctctctgcatttatgttaatcagcaggtgccaccatttgctgttccagactgataatgcagagtttgtatccacgttctttggagaaaacatttgaggctcatacgctgtttcatgtcccat

SEQ ID NO: 25607 - DNA, 3223 bp, Zea Mays
agcaacgggcacgaaccggcgcgacctcccaggcggggaggacacacggagggagggagggagggagggacggggagagacgcgctcacagagtcacagtacagagactagagcgagagagcaacgacgagcaacggaacaagagggcgcgcgcggcgaggtggaggagcaggaggcgacggttgccaggcaggagcgccggtccaacggaataggacgcgggcgcaagtcggggggcagggcgaggggtcccatactcccatccactgcctggtcgcgcacgccgcagcatccgcccccgccctgtgagccgccgtgcagatgaaggtgtcttccaggaggaagcagccgccgccgccgccgcagcagcagcagcgggaagaggccgaggccatggacgccgatgctggcgtccaggaggtggaggaggaggaggcggcggggtgctcggggaaggcgcccgaggcggagggcaggacagtggtggtcggcgtgcgcgcggacgccgagagccgggcgctgctcacctgggtgctcgtcaatgtagccgcgcccttggaccgcgtcgtcgccgtccacgtcgcgctgccgtccgccgcggaggcgcccgacttcgacgccatgctcgccgtctaccagggcttctgcaacctcaagcagatcaatctgaagctgaagatttgcaaggactcgtcggtgcgcaaggcgctagttcgtgaggccagcctgttgggggctgccaaggttgtcctcggcgtcgccaagaagaggcgtgcgatctcgtcctcgcattcagttgcaaagtactgcgcaaagaagctgcccgcaaagtgcgcggtcctcgccgtgagcaatggcaagatcgagttccggagggagtcgagtgcccattcaggcaaggtctcagcagaggttcttccgtgtgctgacgatgagatgtattgtgcagtgcggttccaagcccatgaacctaaggatggtggtgagggtggcaccacgcatgatgttggcaccaagggaagtgaattggaggacaccatcaaacacgaacagcttgtctcaagcgtggtcctccctgcggatttggcaacggatcaggtcaagatcgacgcagatctttctagcagcaaggctgtagaatcaactgtcaaacagagagatgagactgccgagcttccaggtaagggtgccagtgtgttgtactgcgtgcttcctgggagaagtagcgattctgctgcaagtacatctagtaggcaagaccaggattcagtggatgtgctgccatctgaaggcaccggggagctatattgcttattgccccccaggaatggccattcagtcaggagttctggagattctaagcgttcaaatgcgagccaaagagatgatagaccagccaatccatcgcctgaaggagatggcgatctggactgccggctgccgaggagtggacgacccagtaggagttcttctgccgtatccatggaagctgaggactcgccgaaagacgctgcacgaaatgctgaaacaccctctagttctccaatgtcactgagacggatgatagaaggaagatctgatcgcagccgccttcctagaagaatctttagacatcatagaagctcatctcttgaatgggcaaaaatctcgatggttcaatgggcgacgagacttccgagccggtacacttcagtgcacacagatagcagatcattgaaacaggatacaagcccaaggctgaactgtggttctgaacccactacaacagctgttgagccggaatcatcatcgatgttttctttcgctttctatggtgtagcatggcctcccagtgaattggaatcgcttcgagagaagtattcttcagtctgtaggctgttcagttatgaagaactgaaacttgcaactggcaactactcacctgatatgttgattgggaagggtggaaccagccaagttttcaaggcacgactcgacgatggaacgttttgtgccgtaaagattctgaaaccctcggtcgatgcagtacatgagtttgttacggagatcgagaccgtgagcagcctgcagcacgagaacatcgttgcgctgaggggattcagcttcgagaactacaaccttgtgctggcatacgattacatgccccaagggagcctggacagagctcttcacgggaagaatggtggcacggagtttcttgtttgggagagaagaattaggatagcgatcgacgtcgcaagagcagttgaattcctccatcttggcggtgtcacccagtctgtgatccatggagatgttaagtcttcgaatatcctcctttcagaggattttggggcacggctgtgtgatttcgggttagcgaagcgagtgtctgcatcgactccccacctaacgtgtaccgacatcaccgggactttcgggtacatggcgcccgagtacttttcacacgggacggtcaacgagaagatcgatgtctatgcgttcggagtcgttctgctggagatcatctcaggaaggagacccattacgccgggaagcacgaagggacaagagagcctggttggttgggccaagcctttgctgtgcggcggcggaattagagagctggttgatccgttgctggggaggaacgagtacgactgcgatgagatggagaggatgacgctcgccgcctcgctttgcacgaggacatcttctcgctctcggcctgagatgtcactggtcctgagactcctccagggcgacgacgaggcgatcggctgggcgagggcgcaggtcacggccagcttcgacgggtccgacgaggaggctgcggcggcggcccctgacctgaacatgcagtcgcatcttaacctcgcgctcctcggggtggaggtggaggacgacgacacgctgtcgcagtcgcagtcgcaatgcagcagcaccgtggacacctcggccgacggctactggagccggtcctccagtttcgactagcgctgcggtctgcggggtctcttttagtagtagtagtagtacgtttatgtacagttggtggcaattggtgagttgattgttcttgtgagtgttgctaatttattagcttggagttggttctgttgtgtggtagaagatcttaaaaaattagttcagattcagcagagtgttgatggcaatgcaatttgttcagattcgtgttattaccatctttgcgggccatgattccaaccaagttgcattgcat

SEQ ID NO: 25608 - DNA, 3186 bp, Zea Mays
gtggagcggtggtgagtgctgtcgcagcaaccgtgcccccagccccaccccgtcggtctcctggcacccgcccgcggcgtccggcattcccgggcggccgttcaccccccgctgcggcctccggccccctccggccctcccttctcgcgcccttcctatttcaggatcgctatactactatggccgcgaacacgtagcccttggtctctccccttcccccgttcgctgtcccgacaggtcctccccactcctggagccccggtctaccctccccgtacgcatgcatgtcgacatgtcccaccgcgtccggctcgccgcggcggcgctcgtcgtggtcgccgctctggcgcttgcccccggcgccgcggcggcgtggcagctgacgaagaacggcaccgtggtcagctacgaccgccgctcgctcatcatcgacggccgccgggagatcttcttctccgggtccatccactacccgcggagcccgccggacatgtggccggagctcatcgccaaggccaaggagggcgggctcaacaccatcgagacctatatcttctggaacatccacgagcccgagaagggtcagttcgacttcgaggggcggtacgacattgtgaggttcttcaagctgatccaggagcacaacatgtacgccatggtccggctcgggcccttcatccaggcagaatggaaccatggagggctgccctactggctaagggagatccctgacattgtgttcaggacaaacaacgagccatataagatgcacatggagacgtttgtaaagatcataataaaaaggctcaaggatgccaaccttttcgcgtcacaaggagggcccattattctagcacagattgagaatgagtaccagcatttggaagcggcgttcaaaaatgatggcaccaagtacattaagtgggcagcaaatatggccatctccaccaacgtcggcataccatggatcatgtgcaagcagaccaaagctcctagtgatgtgattcctacctgcaatgggaggaactgtggagatacatggccaggtccaatgaacaagagcatgcccctcttgtggactgagaactggacagcacagtacagagtattcggtgacccaccatcccagcgttctgctgaggacattgcatttgccgtggcgcgcttcttctccgtgggcggtactatgacaaactactacatgtaccatggtggaacaaactttggaaggacatctgctgcctttgtgatgccaaaatactacgacgaggcacctctcgatgaattcggtctgtacaaggagcctaagtggggccatctgagggacctgcacctggcgctgaagctgtgcaagaaggccctgctctgggggaagacatcgacggagaagctgggcaagcagttcgaggcgagggtgttcgagatcccggagcagaaggtgtgcgtggcgttcctctccaaccacaacaccaaggacgacgtgacgctgacgttccggggccagtcctacttcgtgccgcgccactccatcagcatcctcgccgactgcaagaccgtcgtcttcggcacccagcacgtgaacgcgcagcacaaccagaggacgttccacttcgcggaccagacgacgcagaacaacgtgtggcagatgttcgacgaggagaaggtgcccaagtacaagcagtccaagatcaggctgcgcaaggccggcgatctctacaacctcaccaaggacaagaccgactacgtctggtacacctccagcttcaagttggaggcggacgacatgccgatccgccgcgacatcaagacggtgctcgaggtcaacagccacgggcacgccagcgtggcgtttgtgaacaccaaattcgtaggatgtgggcacgggaccaagatgaacaaggcgttcacgctcgagaagcccatggacctgaaaaagggcgtgaaccacgtcgccgtcttggcgtcgacgatgggaatgatggacagtggcgcttacctggagcaccgtctggccggcgtcgacagggtgcagatcaagggcctcaacgcgggcacgctggacctgacgaataacggctggggccacatcgtcggcctcgtcggcgagcagaagcagatctacaccgataagggcatgggcagcgtcacatggaagccagccgtgaacgacaggccgctcacctggtacaagaggcacttcgacatgccgtcgggagaggacccgatcgtgctggatatgagcacaatgggcaagggcttgatgttcgtcaacggccagggcatcggccgctactggatctcctacaagcacgccctcggccggccatcgcagcagctaaggacaacgtgctggtgctgttcgaggaggagttcgggcggccggatgcgatcatgatcctgacggtgaagcgcgacaacatctgcactttcatctcggagaggaacccggcgcacatcaagtcgtgggagcgcaaggacagccagatcacggtgaccgccgccgacctcaagccccgggccacgctgacgtgctctcccaagaagctcatccagcaggtggtgttcgcgagctacggcaaccccatgggcatctgcggcaactacaccatcggcagctgccacacgccgcgcgccaaggagctggtggagaaggcctgcctcggcaagcgcatctgcacgctgcccgtgtccgccgacgtctacggcggcgacgtcaactgccctggcaccaccgccacgctcgccgtgcaggccaagtgctccaagaggtcgcccagagccgcgcagtaattcggtagtcgtcggcttcggcctcggcttgctacctcccgtcgtctttcattcttcattgctgatgctgctgctgtaccatgggaccattatctgaccggagacgtcgattcggatttcggacccatccatgcgtggctgggtggggaaacagattgtcggtactgtcactgtatgctttattatacacaaatatattatctataggaatagattgttaatttgatgagcaaacatatatgcagatatcaatttggtgattaataatggcaataatatatagcctagtggcctaactgacagattacactgttgtacctgacgtactcctactttgcttctgaatctgagtttgtgacgtacaatatttgaaaacgagaagcagggaaacgccca

SEQ ID NO: 25609 - DNA, 3038 bp, Zea Mays
aaatatttgtgcgctctcttccaggtgggccctttctctccccttctcccctcaccggctcaccctctcccctcgacgatacatttcacctccccggatctatctcgccgcgtcggcgcgctggtcacccgacgaagctaggaggcagtcaaggcggacgaagcgctgcaccaaatttgacgggggatcgagcacaggaggcgtagtggaaaatgtttaagtttctcaaggaggtggtcgcgggatccggatcggggctcaaggacttcccctacaccattggtgagacatacgcatccgcctggggttcatggacacaccaccgcggtacctccaaggatgatgggtcacctgtgtcaattttttctctgtcagggagcaaccctcaggacagacacatggttgctggccgtaatggtgttaagagattacgaacggtgcggcatccaaatatcttatcctttttacacagtactgaagcagaagttgcggatggacctgccatcaaacacacgatttatattgtaacagagcctgttatgccactttctgaaaagctcaaggaactgaatcttggtggtacacagagagatgagtactttgcatgggggcttcatcagatatccaaagctgtgagctttctcaataatgattgcaaacttgttcatgggaatgtatgcttagccagtgttgttgttacacaaaccctggattggaagcttcatgccttcgatgttctgtcagaatttgatgctaacaatgaagcctctggtagccccatgctgcaatttgagtggttagttgggatgcaatacaagccaatggagctgtcaaagtcagattgggcttcaattagaaaatcacctccgtgggccattgattcttggggactggggtgtttaatatatgaactcttttctggtgcaaagctggctagaacagaggaccttcgaaatactgcttcaatcccaaagtctctacttccagattaccagaggctcttgaattccacacctactcgtagactaaatccttcaaaacttattgacaacagcgagtttttccagaataagttagtagagactatccagttcatggaaattcttaatttgaaagacacctttgagaaagacagctttttccggaagcttcccaatatagctgaacagcttccccgtgagatagtcctgaaaaagctgctccctgtcttggcttcttctcttgagtttggctcagctgctgctccagccttaactgttttgttaaagatgggttcctggcttcctacggaccaatttagtatcaaggtcttgccaactattgtcaagctttttgcctccaatgaccgagctatccgagcatgtcttttgcaccacatagatcagtttggggaatcaatgtctgctcaaactgttgatgaacaagtttttcctcatgtagcaactggattttccgatactgatggtactatccgtgaactgacattaaagtcaatgctcatattagcaccaaaactatctcagcgtacaatctcaggatctctcttgaaatatctctctaagctacaggtggatgaagaacctggaatcaggacgaacactacaattcttcttggcaatattgcaagctacatgaatgatgggactaggaagagagtactgatcaatgcattcacagttcgtgcactacgtgataccttccctccggccagagcagctggaatcatggcactgagtgtcactggttcatactacgaaatgacagagattgcaactcgcatcctgcctaacattgttgtcctcacatttgacccagatagcaaatttctttgatgtttctatagtgatgtccggaccaaggctttccaggctactgatcagttcttgcaaatagcaaagcaacaccatgaaaagcttaatacgggagacaacagggtggctgaaagtactggtgttaagttaaagcctggaaatgcaggtttacttgggtgggccatgagttctgttacacaaaagggtaaaccttctgaccacgccccaatatctactgcaaatgctaataattctcaagcatcaacagctttgactgccgctccagagactcaggcttccacaccagcgtatgcacaatccacatccagctcccttgatcaagctgcaccagcatcagcaaggtcttcagaagatgggtggggtgagcttgaggatgacaatatccatgaggagaatagtgataaagatggatgggatgatgtagacccgtttgaggacaagccatcaccatctcttctatccaacatacaggctgcacagaaacgtccagtggcgcaaccaaagcaagctgttgcaaactcatctaaatccaacccactaaaagcgccaaaatcagaagacgatcctctatggggtcctatagctgctgcaccacccaaaagcgcagcaaaacctgcagacatcaagccatcaacatcacataacgatgaggatgacctgtggggttcaatagcggcacctcctccaaaatcatctggaaagcctttgaagccagctgcagcgaatagtgacgacctatggggtgccattgcagcacctccaccaggaaccaaagccaggcccttagcctcatcaggtaagggccgaggaacaaagcctgcgcaaccaaaacttggtgctcaaagaataggaagaacatcctcaactggaatgtgatggcttatgatatcaaatgttgtacaagagtgcgaagttttcctttttgtcccccatgctttgagtctgaccaggatgtcattctttgtaaactagcaaaaggtatcaatatatggacacaattttgacaaatgtattaatattgtttcaccattgtgtattaaaatagacacatacgtttttttttgtttttgtattttttgtacatcacagctgtttcgagtaaatattattaatatatttgcccctgccttattttggcttgattactttgacatttcctttttgttgggataaaacttgtcggtgtagcgctgtatagaacttaca

SEQ ID NO: 25610 - DNA, 723 bp, Zea Mays
tcggcctttccactttccagcccccagttacgaacaaccccctcatgaagtcatggtcatggcgaagagcgaaggcccgtccgccgccgcggggctccgcccacggcagcggggcgccttccttctgggggagccaacctgggaggacaccggcagcgggcggtggcggtgcgcggagacggggcacgagctgccggagcgggagaaggaggcctacgcgcggtcccgcgcctgccgcctcgcgctcattgaccacgccgtcgcgcacaagaagccgccgctcaacgccttcaagccccaccccgagcacaaatgctgctgctggtggtggtgataacgacggtggtgatgaaaatgttacggctgagaaggatgacgctgaatcaagggaacttgcctcaatgacaaagcaaatttcttcctggctgcagctaaagcaacagattcgggcacccgtgagcgcagcctcctttcaaagttcaacgaaagggcctaaaagtcagcaggtagaatctttagaatgtcagcaacaagttattaccagggccggccctgagattttgggggcccagagcaagacttaaacctgaggccctctcttattacaacacatatatacatcttgtatcacttattagtttaggtgctaagcaattgttacaataccggtaagaaaaaaatttcatcctcgaagataaaaacaatatctcagaaatttcaaaa

SEQ ID NO: 25611 - DNA, 914 bp, Zea Mays
ccttctctttcaccttcagctggaccccgcccctggcccgctcgtcaggcacccaagcaccccacgcgacgcggcacttccacaaggtggatagcgaacccacagcacgtctccatctctggtttgaccgccgccgccgccgccctacgcggctacgccaggcgccgaggccttcgtcggcattttcgtcggcaagcactcaccaggtattcagccatggtttttcttgaggcagagatgtcatggaatgtgttgatctcacctagccagctggaccgcaagggcctcctgctccgcaaggctatcattgtgcgtcttctggaggatgtcacaaacaggagggcttcgaaagagcatggctactacattgctgttaatcagctgaaggcaatatctgaagggaaagatcctcaagcatggcgtgttcctcaaatccggacccgtggagagcatcttcctggctgagaagtcgatgagtaattacaagtacataggtggggagaatgcgatgttcatgaacgaccactcgaagctggagaaggacaccgccgtgcgcttcaaggtcctagggttccgctggatggaggctgaccgccaattccagctccttgctacgatcgctggtgacttccttgggccgctgtgaactgcttccacaggtcaaacaggttctaatgtacattgctcgttagatggtggatggatggttggatctgatgtgtagaattaaactttgctaccagtggtttggtcttgtagaacctgagacatggtaggttttctagatgctgttgccagtgatatttagctctggtttgaacgtatcagtgtacctgtatgatgaacaagcgttgtcatggatgtaccttttctatgcttgcttggaagttaacgttacatggtgttccctgatc

SEQ ID NO: 25612 - DNA, 1769 bp, Zea Mays
ctaggctgtactgattaatttccacatttttactaatgttgaacatagtcgaaggaaagatgcagtacctatttgatgaggatggccgtcgttacctggatgctttcggtggcattgcaacagtttgttgtgggcactgccatccagatgttgttgaagccatagtaaaccaggcaaagcggatccagcactccacagttctatatctcaatcatgcaattgcagattttgccgaggcattggcttccaaaatgcctggtgatctgaaggttgttttcttcacaaattcaggcacggaggcaaatgagcttgcactgatgattgcacggctttacactggttgcaatgacattatctctcttaggaatggataccatgggaatgctgctggaacaatgggtgctactgctcaatccaattggaaattcaatgttgttcagaccccttcagaggtgcttttggttctgacggggagaaatacgccagagatgttcaggaaatcatcgaatttggaactacagggagagttggtgggttcatttcggaagccatacagggggttggtggaatagtggaactggcaccaggatacttgcccgtggcatacagtatggtaaggaaagccggtgggctctgcatcgccgacgaagttcaggcaggagtcgcgagaactggaagccacttctggggattcgaagggcatggtgtcatcccggacatagtcaccatggccaagggtatcgggaatggcatacccataggagctgtagtaacgacgccagagatcgctcaggtgttgacccgcagaagctacttcaatacctttggtggtaaccctgtcagcactgcaggcgggcatgcggtgctcaaagtgctggagaaggagaagctccaggagaatgcgtttgttgtgggctcctacctaaaggaacagcttaacaatctgaaagacaagcatgagatcatcggtgacgttaggggcaaaggcttccttcttggagttgagctggtgacagaccatgaaaagaaaaccccagccaaagctgagatctcacgtgtcatgaaccatatgaaagatatgggagtgttggttggtaagggtggtttctacgggaacgtttttaggataacaccaccgttgtgcttcaccaaagaggattccgacttcttcattgaggtgatggacattgcgctctcgaagctgtgaggcaagcagggcgaagatgatgtgcaaaccctggtccgtcgccatgggatttttgcccatgaataatattaagattaatgagacagcacctcgttgtctcttaatctaagacgatgccatgtcatccggtggcatggtattcctaatcctacctgccaaatcactggtattgctcgctgtctcgtaatcagacccatggagcaatatgattcttgtaaactctagcttcatccaatctgttcctcctgatctaactagtctgaatagcagctgttcgtttgtgaccaatatcaacttcttttcagatgctccatatattcctgctctctgtaaacaaaccattatcactgttcaatagatgcggagatgtggatataaaaattacatatacgggtactctttggtgtaccagtgatttggcaagaaagaaaaggtttaacgtacaatccaaaataaaatgttcacgtattaaattaatatgcatgatcatcatcaggtcacatgagaatggaaaacacgaagcaggcaatggtttccgtcatcaaaccgtcacgataatgat

SEQ ID NO: 25613 - DNA, 646 bp, Zea Mays
ggagcatccagctcacacttcacgcgctgagggagcaaccagaacaaggctcctctcgtcgttattgctgaggctccggccgagtagagctcagagtacgcgggaggtgtccgcctggcgtctacctctggagatgtttacagctttggtgtagttgttttggagatggtgacaggcaagcgaccaacagaccctaccttcaaagatgggctggatatcgtcaactttgtgagcagcaactttccgcatcagatatcccgcgtcgtcgatcctcgtctcagcgaggagtgcaaggagttttcccgagataaggtggaaccagaaaatgcagcttaccagtgtttactgtgcctgctacaagtagctctttcatgcacgcacccgtcaccaagtgaaagggtcagcataaaagaagtagccaacaaactgcatgcaacccagatggcatatgaaggagcgaaagaaaagaaataaaatacatgtttcagcatagtgatagtgtgataccatgctacgagaaaaagggaccagagtggttgtcttagccgtgtttgaccgcgttcctcctgccgcggctaagctgccattatacatgtccaaacgggtcgggcctaacgggtagcccgaagcacggcacgggttaggc

SEQ ID NO: 25614 - DNA, 1452 bp, Zea Mays
cttctgttatcctttaagaattcttgaaagcaatgggcgcggttgctgtcaaccttgttcccggagagaaacctgcagatatctactcagaaatagcttctagggtactgaatgttgtatgtgaagactcgatgaaggatcctgctactaacccaactgcttcattagcaagagttttagttgatcagcttacaggtggataggaagcttgtcaagcagacagtcatgacatcagtctatggtgttacatacattggtgctcgtcagcagattacaaagagactgcaagagaaagggcttatcacagatgataaattgctgtatgatgtatcctgttacgctactcgggtaactttggatgcactgggacaaatgttccaatctgcccgtggtataatggcctggcttggtgactgtgcgaagatgattgcttcaaaaaatcaaccagtcaagtggacaagtcctgttggtctcccagttgttcagccctacaagaaatataagaattatatgatacgaacttctttgcaatgtctggctttacggcgggagggtgatgcaattgcaatccaaaggcaaaaggcagcttttccaccaaattttgtgcactcactggatagttcacatatgatgatgacagcgattgcttgcaaggagtctggccttcattttgcaggagttcatgactcattttgggtgcatgcgtgtgatgttgatcaaatgaaccagatattgagacaacaatttgtggagctttacagcatgccgattcttgaaaatctgctggaggagttccaaacgtcattccccacactagaatttccaccctgcccaccgcaaggtaactttgacgtgagggaagttctgacttcaacatacttcttcaactaagcttaacaggggaagttctgcacatgaaacatgcataagcaagaaacaggagtcaatcaattatctgcactccagaccaagccaagtggttccaaggaatttgaaatgaacaaacctaaagtagttcctgctgagtttttaggttgatgcagaatctgcttggatgttcaggtcactcattggttgccatgacaactcatggtatactccaccctggagtgcaaaggtaaattatgagatgccagagcagaatactgactgacagttgatcgtgctgacctcattgatcatagacgacagcggaacacaaagttcgctgaatatacgtgtacgttgtaccatcaatttttttgctgtcttaggacttgtagatcgcataatgccgtggcatcaccctgtaataaatgtgtaagatatgatagccaaatagatgtatacgagactagttgctgttgacagcaagttttgaaaagagagacatgaatcaggcagacttcaccggttcactgatgttctgatctcttcctgaaataatcgtagtaccttcattttggtcttgct

SEQ ID NO: 25615 - DNA, 1022 bp, Zea Mays
gtcacggccaggacaaatatcccacctggaatgccctatccccacacgcgaatcctccaatctgtccttgccgccgccgcccgatccaggtctgcagactgctcacttctccccacccaacgcggcggcactccttctccctccccgagtgcctgctgtgcgcctgtacttcacaccggcgtcgccccctcctccagaactccccaccggagccaccctcacccgtcacgcactcctccgctgagtgcagcaagtgctgatcagttcggttagcacactctcttacaaatccagagacacttcttcacagtgggtggacgggagatggtgctgaggcgggcggcaaccgaatgccccaagaaggttgcggggctgaaggatctggtgaacctgccaacccagctgcgagagttcgccggaggccggtcccaaatgtcacatatctccttcttcctcagtgtctggtcgtacatcaaggacaacaaacttcaggacccaacgaataagaacattgtgaagtgtgatgagaagctgaagaccgtattattgggcaggtccaaagtgcaactgtctgaactcccaatgattgttaagctccatttcccaaaattgccaaagtagtgacaacatagtattgtatattgaagttctgtgggaccccctacagtaacttttacttcaaaaaaaaaagttctgtgggaacatgataggatagatagaacactatatgtattgttttgctgaaatttccatttactgtctgtatgtactggagcgatctatacatcgagcataccgattagattgcttgtcattttgatagcatgtttgatttatcagtaactttgctcatgtttaactgaagagacaagatgtgcaggataaatttcttttgttgtgaattagtacaactgacttcagctaagcagaacttcaatggcgcacctgattttaggacgatagagtggtagtcatatgtatgggtcacactaggtttcttgtgtctatggctcacttttaat

SEQ ID NO: 25616 - DNA, 1611 bp, Zea Mays
tatagctacagttcgtggtaaccttatcttctctctcaatggaacacacaccgtgtcgttttagtgttctcatcctccatccgcttgctcctgctctctcaagtcaaagcagttgatacggtggcgcgagcagcaagctcgggaggccaggtagcaaaactagtgtcttgaatcggctgttcgtgagccgagtgcgctgggtgggctgtgccgacggcggcggcggtccggttcacagctacctcttacctagaggagcgcgcgcgcacactacacgcggacggaccagacaccggcgatggccactctggcgacggccgcggcggcgtggacaagggaggaggacaaggcgttcgagaacgcggtcgcggccgccgcggcgcccccggacgacgggccgccggatgatgggtggttcacggcgctcgtggccagtgtgccggcgcggacggcggaggaggtgcggcggcactacgaggcgctggtggaggacgtggccgctatcgaggccggccgcatcccgctcccgcgctatgctggagaggagtcgtccgccgcgacgcccgagggctccggatccgccgcctccgcgcccaaggacgctggaggaggaggaggaggcggtgggcaccgacgcgaagaacggaagagcggcgtcggcgttgacgtggggaagagtagctctaaggctgagcaggagcggcggaagggcatcccgtggacggaagaggagcacaggttgttcttgctgggtctggacaagttcggcaagggcgactggcggagcatctcgcgcaacttcgtcatctcacggacgccgacgcaggtggcgagccacgcgcagaaatacttcatccgtctcaactccatgaaccgggaccggcgccgctccagcatccacgacatcaccagcgtgagcgcgggcgaagtcgccgcggccggcgcacccatcacgggcggcccaaccacggcgggagcgatgccgatgggtcccgcgggcatgaagcaccaccaccaccacccggctccgccgatgggcatgtacgggcacgcgcccatgggccacccggtctcggggcacatggtggcgccggcggccgtcggcacgcccgtcatgttcccgccgggtcatcactcgccctatgtcgtgccagtgggatacccggcgccgccggccaagatgcaccaatgatcgtttacccggcatttgcacatctgcagagctgcatttcgttgcttgttctttcttgattttgttgatcttgtgtagccagagcaatctatccatcctttcctgatctcctggagtgagtgcagggcaggcaggcaggcaggcgatgcgacgaagaataagtatctgctgactgttgcaatagcgctacttgtagtagtcacactgatggaggctccaggaatgttactagtagcagccttccaggttgcggatacttactgatcatttgtgcagagttgcaagttgcacctggggactgatccgattccattgtccgaatgtaaatggattgtctataatattactatctcatctgtttatttaaagaaggaattacacttggcatgttgtaaaaaaaaacttataccatgttatct

SEQ ID NO: 25617 - DNA, 485 bp, Zea Mays
tcctgccagtagtcatatgcttgtctcaaagattaagccatgcatgtgcaagtatgaactaattcgaactgtgaaactgcgaatggctcattaaatcagttataatttgtttgatggtacgtgctactcggataaccgtagtaattctagagctaatacgtgcaacaaaccccgacttccgggaggggcgcatttattagataaaaggctgacgcgggctctgcccgccgatccgatgattcatgataacttgacggatcgcacggccttcgtgccggcgacgcatcattcaaatttctgccctatcaacttttgatggtaggataggggcctaccatggtggtgacgggtgatggagaattagggttcgattccggagagggagccagagaaacggctaccacatccaaggaaggcagcaggcgcgcaaattacccaatcctgacacggggaggtagtgacaataaataacaatacggggcgcg

SEQ ID NO: 25618 - DNA, 1583 bp, Zea Mays
caattcagaagctttagcacaactacagcacgatgcttgcagcaagcacaaaactagactgcagtctgcagtggccactggatgagaaaactaagatgagttccttgcagacccaacatgcagcgagtgaagacgcatccgtttgatcaaagcagagttcaattctctgctgtctttatattaagtcttgctgccatgatgctgagacttgttacttccgagagcagtctttgtgtttgatatccttcctgttgggtctgcaaaagtccagcctttgggtgatgctagtttcagagagtacagcaattccttcatcgttgtcatgctcacttgagttggatccactactgagggatcttgttgagaagaaactaagcctgaagaggaatgtgactgcaatggctaccgagctcagggatgccaggaacaggcttgcttcacaggaactgttgctggctcaggagatagaagccagaaaggttgctgagctaaagacgagaaatttggaggatgaggtgagcaagctgcagaaatgcttaggggacaaagatgagcagttgcgtgcatcgctatgtagcgcagatcagttccgcaatgagttggatggtttcagatcacaacttccagtgatgacaacgctgctgcactgctcatatttgttaggaaagctgaatgataggaacaattcgatgagtgagggtgaatttccggtgaacaatttagcagaacagctcaatcatcttgaaaagtgcctcgagagcagggatcccacactaagacaattcaaagattgttactctttgagaaccgagtctgacatcacggatgcctttgccagagttgcatttgataacgatgatggtgtggccaagccgggagaggatataagggcgctatctgctcactgggtaaacagaagcaaggaactggaatcacagttggatcagcatcggaggacagcccaggagctgaagaggagggtaatgagacttgaactctgcatcctagaaccatatggaaactccataggctaagaaatcagatggccgtgcagcagcccacttgtagtggctcaggcgagaagcgcaatctctgggagagctcagccttcaagctcatagcatccgtgtcaatgttggtcctatttacacttgcaaaccgatgagctctcacggtctcgcttttgcgtacagaaaatataaacgttcatgtttgaatgtttgaattgctgtgaaacggacatttgttctcaacatccattcatgctagttacgtccataacaataaaaatgaatttctaggtccttaagcttgttaagtagcgcatcacagtggtcggtatagtcccaaaaataggcttgcagtgcaccatttttataagtttagaggatgtggtacatcacttaacaagttgaagtgtctagaaatgtattttcaaagtttgtggacctaagtatcatcctttgacgactttaaagggccactgatgcaactaactctttttaatacgcgtatgtttaaaacatacatttatatatgtatatacattttagggatcattaaaaattaccgttcttttaatc

SEQ ID NO: 25619 - DNA, 2639 bp, Zea Mays
gccgagttgccgacgcaccgaaaaaagacagctgacgcgaatgcccaaacgttcggggggcgagcgggatttggaagctgcgcaacgcgcttcccaaatcccccaatcccgacgcccacccgaccccgtcgccagatctcgcgcctcgtccccggggctcgatcggataagcggcggtcggcgattcggggacggggtcatctcgcctaggcttgggcggggctgggctggtgggagccgccgagccggggagccatggcgtcggcgcaggcgccgtcctccgccgctgcgccgtcgcgcaaggaccatctcgaggccgggaagaagcggctcgagcagttccgcaagaagaaagcggcgaagaaggccactgcagctagtgcagagcaggcaaaagcgcctgcgcctgatgtagtggagaacccacctccaattgtcaatgctggtagcttgggagatggactggtgtctgatgtagacccaaaccaagcgagcacgtcttcggtaccattgtccgtatatgagaatggcccagccagtgcatccaggggtgcagaattcatgtcaaatggtcatcagcaagatgctgttagtgatggaggacgtaagttctatgggaacttgagcttctctgaccttgttaatggtcatcatgagaattggagaggcgacggagcccgtaaaaaggacgagcacagcccttacaaggatgtggaatcaaaatcaaaattaagtgcctttgggaatggcagcagtttaaatttaccttctactgaaaacatgccgagttggggaagaaattctttatcaagtcaagtacatgatactgaacaatctagttcatattcatccagcaccctttttggaaagtccaaaaatgcctatgctcaggattactccacaaacagtgatatctttggtcgtttgagagctacctccgaagactcttccaaagtggagcaatctatgtatgccagcactcgagattatggcaatgccttcaatagttcaatgattgccggtactgtagatcatgatacaaatgttggaataactcggacatctgcagattccacacctgttaattctgaaagacaggatccttttctgtcatctggttatccaactacatacactcgatcaaggccatcatttcttgatatgattggagtgcaaagagcccccctaacaactgaagcctcatatagggagcctgcaaaggctaatcaactatccagctattcaaattatcagagttcatttttgcagcaatcaaatcaacaatccactggaagtaatgctgcagatattccttttgcatcagaaagtcaggaatatagtcatgaaaaggggtcatatggcagctccactcctcctgatttcttacttcccaaagaagaaagaagtaaacaccatggtaatcaaacattccaaaacttcacaactcatgggaaggatgatgattttgcagcactagagcagctcattgaagatttgacaaaagagaagttttctttgcaacaaagtcttcagaaatctcaagaactagccgaaactttggcgacagataactctgcattaactgataagttcaaccaacaggcacatgtaatcagccagttgacatctgacatggagagattgcaggaagagattcaagctcaactgctggcgctggagtctatcaggaccgaatatgctaatgcacaactagaatgcagtgctgcagatgagagggcaaaagtacttgcagctgaagtcattctactagaagataagggtttgaggctgaggtcaagtgagctaaaacttgaaaaggaagttgaaggtttacattctgagatttcttcttacaggcgcaaagtttctagtctagaaaaggagcgtcagcatcttcaatctactgtcaaagctcttcaagaagaaaagaagctattgaggaacattcccgtgaatgagaaggcaacaactactgtagagaaaccttgggttgataaaagagacgcatcaactgcgacagaagatttagatattggggaaaacagctcttcagaaacgctaaccagcactgttgacacattggaagatgctggaatatctgttttgcgttccaacattatgtctgatttttcttccttagaagaggtctcatctagcattccagatgatcagcttagaatgattgacaacatcaattctttgatgtcagagttagtagtggagagagaagcgctgctgcgagcactgagaattgagtcatccaactgctccaagctgaaggagttgaataaggacctaacacaaaagctggagattcagacacagaggcttgaactattgacttctcaaaggatggctaacgagaatgccctggcaaaaccaattgacacacgctccatcaatgatgcaacaatgtatgcagatgaaggagatgaggtaagtatccctcatcaagtatatagtggaaatttgatagttgatcctaccacataattgttgatggaaattcacattggttccagtgttttagcttgaataagagttagagctaaaggaatccaaactttacatatgcacgttaaagttcacatcaccctgaaaacgttatctgtagacgtttgacatggaatatggctcag

SEQ ID NO: 25620 - DNA, 1514 bp, Zea Mays
ttgagggaacacttcccccacagtaaggaaattataggagacaatggcagaccagttagggtcttacacaattagatcccatggaatgatattggcaagattacacatgtatgactggataatacttctcctccttgctgtcatagacgggctgttgaatataattgaaccatttcaccgttttgttggaaaagacatgatgaccgacttgagatatcctatgaagggcaatacagtgccattttgggctgttccactgattggaattatactgccttgggccatctttgttggaatttacttcaagaagaacaatttttatgatctgcaccatggcatactggggattctatactcagtgctcataactgcagtgattactgatgcaattaaggatggtgttggacggcctcgtccagattttttctggcgctgtttccctgatggaaatgatgtttatgataacatcactactggtgttatatgcaatggagtgaagagcgtaatcaaggaaggccacaagagctttcccagtggacacacttcatggtcttttgctggtctaggcttccttgcatggtacttagctgggaaactcacggcttttgatcgcaaaggacatattcggaagctatgcattgtgtttctgcctcttcttactgctgcgcttgtggctgtttctcgagtggatgactactggcatcattggcaagatgtatttgcagggggtcttataggtcttacagttgcttcattttgctatctacagttttttccatatccttttgatggcgatgctttgtggcctcacgcatacactgtccagttagccgaggaagggagcagcagaaatacaaactcctacagcgtgagaccagccgagatcgaaacagtcaatattcctggtcacggtgggatcaccctaagagatactctaaatgatatggagtctggtagcggcaggagattgtgaatgagtctggaagttttgaaccatataccatgagagctgcttgcaatatatacacaagtagatctattgtagagctgttgagtgctgccaccgtgataggagagggttgtttagatgggtctgtcactaaattacttggtaggggtgttgtatcttctgacaacctttggcctttctttatactccacctgtggttaaagtttgtttgcttacgaactctttgatgtcagcttggtcgttgcattcagcaaccatgatctaaccatcgtgaattgaaaattttgtcgccaaatataaggggattaatgctgcaaccaaatggaactctctgaggaacaaaattatagagaccggttgtgatatactttgtatccaggaaacaaaaggagaacaattcaatgaaacatacattcgtaacttatgtacaagatccttggacaaattgtatttctgtccctctaatggtgcttctggagaattattactatctggaaaagtttgtattttgatgctaagttgattcaacaaaatgagttcagcc

SEQ ID NO: 25621 - DNA, 1851 bp, Zea Mays
ctctcctcgcgtctcgttgtcccatctagcccatctgctatcagcgaggacgaaggcacaaacccctcacctccctcaaaccctagccctcgctctcccgcttgttcccgtcaccgccatcatgggctcagatgcggacatggaggactacgggttcgagtactctgacgaagagccggaggagcaggatgtcgacattgagaaccagtattacaactccaaaggtttggtcgagacagacccagagggtgcacttgctggttttgatcaagtggtcagtatggagcctgaaaaggctgaatggggatttaaagctcttaaacaaactgtcaagctttactataagctggggaaatacaaagaaatgatggatgcatatagagagatgttaacatacataaaatctgcggtcacccggaactacagcgagaaatgtataaacaacataatggattttgtttctggatcagctagtcagaattttactcttctgcaagagttctaccagacaacactgaaagcgcttgaagaagcgaaaaatgagagattatggttcaagacaaacttgaagctttgcaaaatttggtttgatataggcgagtacggtcgcatgagcaagatattgaaggaactgcataaatcttgccaaagggaagatggttctgatgatcaaaagaaaggcacacaacttttggaagtctatgctattgaaatacaaatgtacactgaaacaaagaataataaaaagcttaaggaattgtatcaaagggctctttccatcaaatcagcgatacctcatccaagaatcatgggtataattcgcgagtgtggtggaaagatgcatatggctgagaggcagtgggctgaggctgcgactgatttctttgaagctttcaagaactacgatgaagcaggcaatccacggagaatccaatgcctaaaatatcttgtccttgccaatatgttgatggaatctgaagtgaatccttttgatggacaagaggccaagccgtacaagaatgatcctgaaatccttgcaatgacaaacctgattgcagcgtaccagaagaatgacatcatggaatttgaaaagatcctgaagagtaatagaagaacaataatggacgatccttttatccgtaactatattgaggacttattgaagaacatcagaacccaagtgctgctcaagcttattaaaccatatactcgaatcaggataccattcatttcacaggaactcaattttccagaaaaggatgtcgagcagctgttggtgtcactcattctggacaaccgtatccaaggccacatagatcaggttaacaagctgctagaacgtggagaaaggtccaaggggatgaggaagtacaatgctatcgacaagtggaatactcagctgaagtccatttaccaaacattgtccaacagagtttgatgagaaggatcgctgctgctgcgtgcattgcacacctagcattgttgatagcctgttttgcggatttgagggcaactgcaaagaactgtctggtgacgcttgcgatagaatcctggatctgggtaaagttaatattgactacgagttggagcgatgacggtctttaacctcccaaacttgcctgcacacgctgaacgttaagtttcaggttgagagtagatgcgctgggtgaagtggcgcggcttaaatgttgaaacgaggtgagcgcagacactaccaaagaagctgggcctgtttggttgcctccgaatcagggtcgcgggatgcaggtagctagcttgcgtttggcttcctggtccaggcattgagccaggcttgtggcgtgctacgttcctacaaattttatcttggaa

SEQ ID NO: 25622 - DNA, 2097 bp, Zea Mays
aggtaccggcaggccattggccacagcccgctttactcacgacgcgacgaaccgcgcactccttttaaagctccacgttgcggtgtcctcacgggtcacggcgaccgatgccgctgctgctgcgcggcgcctccctcctccgcctctgccagtgtaccagtgggctctcaagtgtgaaatttagttcaagagtaacggtactagtgaatctcaacgccatgagggacggaatgcgggccacatattcacgtagagctgcctctaagaacagtgaggtcaagaaagatgagcagccagtcacagagaaggttagtagagctgcctctaagaacagtgaggtcaagaaagatgagcagccactcacagagaaggaagatgctgctgaaactgatttggaggtggagcgagggaggagcagcagccctagccagctccaatcaatgactgtcaaggagctcagggagctcacgaggaggaggggtatttctgtgaaaggtaccaagaaagatttagtatcagcactgatgaattctatggccgtggaagcaaatggtgaagggggaaagtcatccgttgagctggttagccccttggaagtacctttgaaaagaaaaggtggtgcttctgttgtggttgaacaaaaactagaaagttctgagatcatttctgaaacacctaacaagaaaagtagaacaaaacaaaaatcaagcaagaacaccactcgtgaggaaatttcggtgactaatgtcaagctaagtaagactgttgtccagaaggaaacagttgccggattaagtcctgatgatgattcagagccttggactatactcgtgcataagaaaccacaagccagctggattccatacaaccctaggactatgaggcctccacctctaagcaaggatacacgggctctgaagattatgtcatggaatgtcaatggattgaaagcattgctcaaatcaagaggcttctctgtgcagcagttagcacagagggaggactttgatgtgctttgcctccaagaaacaaaaatgcaggagaaggatattgaagttattaaggacactttgcttgatggctacacaaatagtttctggacttgcagtgtgtcaaagcttggctattctggcactgcaataatttcaagagtcaaaccactgtcgatcaagtatgggcttggtatatcagaccatgatactgaagggagggttgtgactgtagagtttgatgacttctacctgttaactgcttatgtaccaaactctgacttacagggtcacagagtgggatccatcccttggtaactacatgaaagaattagagaaatcgaagcctgtcatactaactggtgatcttaattgtgcgcatcaggagattgatatacatgaccctgctggaaatcgtagaagtgcaggcttcacaaacgaggaaagagaatcatttgggaccaattttttgtccaaagggtttgttgatacgtttcggaaacagcatcctaatgttgttgcctatagttactgggggtacaggcataatgcccggaagacaaacaaaggttggcgcctggattactttcttgtgtccgaatcaatcacagaaaaagtgcatgattcatatattcttccggacatctctgccagtgatcacagtccccttggtctcgtgctgaagctgtaggctgtatcacacaggctatgccaaacattcagtctgaagcctgtgccatatttctcagacagcgatgtttattcctgatggtttctggttcgtgcagatccctggcaggaacaacgacttttgtcagactattagtgaaacaaggctttgtaacgcactgagcagatttgactattagtggacaacttactgttagcaaagctgcacctttgtagtgtaaatatgcggccatatcttgtgctgcacttgtgcagctcaatatgagcagcgggggaagctcattacctggttatggaattatgatactgaccttaacctattgaggtctttaaactatctgatcatgtgctgtgccgctgatggcgtcagaaaataactgtgccatgcaatttcacgcatagccgaaactgttcttgg

SEQ ID NO: 25623 - DNA, 5138 bp, Zea Mays
ccgtcccagcccccgagccgtttctcttctatttcgtcttccgcctcggtcccttctctcctgtcgttcccccctcccctggcgattagctcccgcccgcctcccgccccgctccccaccgcgctcgctgcgctgcctgtcctggcgctgcgtcctgcggcgccgcgagagttggagggtgctcgtggcgggcagatccggcgtcggcgtcggcgtcggcagacaggctcggaggtgagatcggcgtcggtggcggcggcggagcgcgcgaggtggtcgagggaggaatcggtggcgcgcggaggcgaggacgaggctgaggaggacgtcgagctcggctggtgctgcatgggggtatgaagcgcggcgccagagacgacgcactcatggggtcacagctcaagcgcccgaacgttggccgatccgatccgtcggctcagccacaacacatgcctgtgcccggtttagcgtctgcagccgcaccgccgcctcaagctggtgctgctccgccggcgcagccgcaacagacatccggcgcggccttgaccaaccagaagctgacgacaaatgatgcgctcgtctaccttaaggcagttaaggataagttccaggacaagcgggagaagtacgaggagttcctcgaggtcatgcgcgacttcaagagcgagaggatcgacaccaatggagtgattggccgtgtcaaaacgctgttcaacgggtaccctgaactaatccttgggttcaacgccttcttgccgaagggctatgcgatcaagctacaagaagagaagaagcctgttgattttgtggaagctatcaatttcgtgaacaagataaagaatcgatttcagcatgatgaacgagtttacaaggcattcttggacatcctcaacatgtaccgcaaggataataagtctatccaagatgtttaccatgaggttgctgggctgttcaaggaccataaagatttgcttgaagaattccagcacttcctgcctgatacctcagtggccccacaagcagtggcatcttcaaggggtggtttggttaagcgggaggacaggagctctttgccacctgcaaataggacccttcacaatgagaagagggagagagcttgtctatcacatgctgaccgtgactttagtgttgaccgtcctgatgtggatcatgatcgccagagaagacgtcttgataaagaaaaagaacggaaggtggaaagggatagaagggattatgagagagaagacaaggatggtgaacatgacagtagagacctggagataggacagcgtaagcgaaagccttttccaaggaagatggaggataatgcaggtgcggagacacaccaaggaggccccagtgagaatcatggaatccatagcgtttcttcttcatcatatgacgataaggatgcgctgaagagtgtatacacgcacgagttccatttctgtgagaaggtgaaggaaaaactggagcatgaagcttaccaggagtttttgaaatgtctacacatctacagccaagagattatcacgagaagtgaactgaagaacttggtgaatgatatactccagcattatccagatcttatggaagggtttaatgaattcttggaacattgtgaaaatatagatggatttcttgctggtgtcttcaacaaacgcccaacaacaaggattgttaaaactgaggataaagaaaaggatagagatcgggacagggaggacagggatagagatcgggaaaaggaaagagagaaggaacgagaaagactcgataaagggtcaacattcaattcaaaggacggttcttgtcacaaacctcctatgttttctggcaaagagaagtacaacctatccaaaccaatatcagagcttgatctctcaaactgtcaacgttgcactccgagttaccggcttctacctaaaaattatcccatgccccctgccagcaacaggactgatcttggagcctctgttcttaatgatcactgggtatcagtgacatccggaagtgaagattattcatttaagcacatgcggaagaatcagtatgaggaaagcttatttagatgcgaggatgacaggtttgagttggatatgctgttggaatcagttaatgcagcgactaagcgtgttgaagagctgatagaaaagatgcaagacaactcagtcaaacctgagagtccaatacgcatggatgagcatttaactccgttgaacctgaggtgcattgaacgactgtacggtgatcatggtcttgatgtgatggatgttcttcgcaaaaatgctagtgttgctttgccagttattctaactaggctcaaacagaagcaggaggagtggtcaaggtgccgatcagatttcaacaaagtttgggctgaaatatatgccaagaattatcacaagtcacttgaccatcgtagtttctatttcaagcagcaagatacgaagaacctgagcacaaagtctctcctgacggagataaaagaaattaatgagaagaaaagaaaggaagatgatgtgctccttgccattgctgctggaaataggcgacctatagttcccaatatgtcattcgagtatgtagactcagaaatccatgaagatctacataagatcattaagtactcctgcggtgaaatctgcaattcttcagatcaattagataaagtgatgagaatatggacaacttttgtggagccaattttgggtgttcagcgaaaacatggctccgaggatcctgacctagttaagccaaagagccgaacaacaaaatcgggtattgcaaatgttggggaaagcaacactggagctgggattgtctccaagcataacaacgatgatgaaagtgaacaagggctgccgtctcgggctagaatagcaaatggagttgcagccaacgctcaaaatggtttccatgatgcagatcgaattgcccgtagaggtgaagaatcattaaatgttacacttaatggaagagtgcatggtgctgcctctgcagacgaaacaccttcactaagcacacaaaatattgcttctactgagcgatcagcagagaatgcagctgttgttaggactgaacaacataaggcaaatttggaacttacgccaggcgtgaatggttctagaagttctcatggtgcagttgaggtggctggtgaaggcaaggctgtcaatgaaacattgccttctgctgtgggaggggaaacaggtaggttgggaccatcttttaatggcatcagtgagggaattaaagggcgcctaaataatgatggttctgcaccccatatttcaaaagttgaaagagaagagggtgaattatcgccaaacggagattttgatgaggaccattttgttccttttgaagatggaacatctaaaggaaaggaaggttctacaagcagatcattccagggtaggcatggggaagtggtgccatctgctgaggcagctggtgagaatgatgctgatgctgatgatgaaggtgaggaaagtgctcagaggtctactgaggacagtgaaaatgcttccgaggctggtgaagatgcgtcgggcagtgaatctggtgatggtgaggaatgctttcgtgaagaccacgatgaagaagaagaggatatggatcatgatgatcaggatacaaaagctgaaagtgagggcgaggcagaaggaacaactgagacacatgatgtggaaggaggaatatcactaccactttcagaacgctctctgtactcagtaaaaccacttgccaagcatgtacctacagctttacatgatcgagagaagttctcacgtatattttatggaaacgattcattttatgtcttgttcaggctacatcagatcttatatgagagactactttcagcaaaaactaactcttttaccgctgaaaagaaatggaggaattccaaggatacaaaccctcctgatctatatgcaaagtttatgagtgcgctttacaacttgctcgatggttcttctgacaacacaaaatttgaggacgactgccgagctattattgggactcaatcatatgttctctttactttagataaattgatttataaagttgtgaagcagcttcaagcaatagcaacagatgaaatggacaataagcttctgcagctatatttatatgaaaaatcaagatctcccgggaggttttttgacctagtttatcatgaaaatgcccgtgttctactgcatgatgagagcatataccgatttgaatgttgctcaagtccgacaaggttgtctattcagctgatggaatatggtcacgaaaagccagaagttaccgcagtatcaattgatccaaatttttcttcgtatctttttggcgagtatttatgtagtacgtcagacaagaaattatctgaaggcgtctaccttgcaagattttttgaaggcaatggatggtatcaaagttgtgaatggtctcgaatgcaagatatcctgcaagacctctaaggtctcgtatgtcctagacactgaagatttcttgtcccggcttcggaagagaaggaaaattttgcggggtgggagtgtgtctgacagttcgcagttttcaaaaatatatgctgcaaaagtgcagcgcttcaataggttcctatccaaagcataggatcatttggcatacaaaatgtctcatcattgtatctaaacctggagatattgctgggaccccagttgctttgcttcttcagtgataatatgcaggagttggaagatggtgacgtcatcgacaattcgtcgcagaatgccctttttgaataacagatggggagatctatagggtaaatacagcaaaacgaagcgagcatgtaggccacagcagtcagctctgttgtgcggaaagatgtgtatatatgtattagcaacatgtttgttctgatgacctttttaatgcttttcgatgtgttcagaagaaactatcttggaagtccaaagtctgctaccgtgtgaggtcgcagtttttccttgcaagtacttgggacttcctctttccttgcacaagctgtccaagcaacagttccagccgtatgttgataaatttgctgatcaactacctaattggaaagctgatttgatgaccagagcaggcaggagaatactagtgcaacatgtgct

SEQ ID NO: 25624 - DNA, 364 bp, Zea Mays
ccaacccaaccaaacccccacgagcggtgctcctattttttttcagctttgctcttgaatatgcgctcacttctccctctctctctcttcccttgcgtgatttttgtcaattctctgtgccccttgcttccttcccactcagctctgtggccccccgcctgcactcctgcactgcgagcgacgtgcaatcgcacatgtacagtgctccgcgtgccgcactcggcattcccaagtcccaaaacccctcctgtaggagtggaatatgaacccggtgtcccggtagggaagcacttgtgggaactctgtgttactacagagacagttgggacgggtaccggtagcgactagcgaggcgagagtgagg

SEQ ID NO: 25625 - DNA, 1768 bp, Zea Mays
gatcctccatcacaaaaaatcccctcccattccccaccccaccctagcgcgaggccgtagtacgaatccagcggcggagtacgtccacacgaaatccagagagaggggataaggttccggggccagccaaagccatatcgtggtgcagccactggcgcgccgccacgtggggcggcggtggtcacacctgcgctccgtcccggcattatcgccagggcttggcgccacagctagtatattggctagcttttggctcggcagctaacgacctgcagccaaccatctaccagcgactcagcgagcgagagcagcacacactgcacgcagctagctaggagcagcagcagcggcggcgatggcggcctccatgatctcctccttcgccgtcgtctgctccaagaagaagatcaagaccgacaagccctacgggattgggggtggcctgaccgtcgacgtcgacgccaacgggagaaagggcaagggcaagggcgtgtaccagttcgtcgacaagtacggcgcgaacgtcgacggatacagcccaatctacaacgaggatgactggtctcccaccggcgacgtctacgtcggtggaaccactgggcttctgatctgggccgtcaccctcgctgggatcctcggcggcggcgccctcctcgtctacaacaccagcgccctctccggctaaggatatccaatgcatgcgcttcttgcgattcgtcatgtaaaatcagggtgtctgtctataatctagcctccatggatgctcaaccttcgtcatgtaacaataatcagtgctactcttcattacataattttgatgctatatatatataccccatccctccctaataattcgttctatctgcgtagcgaggttaattcaaaaaaaattcgtaaaagatggtgaagctaattaagtgaaatataaaatatgtgacatacatacatacgtacgcacgtgcatacatactcctccggttacaaattcaaccaaatgatgatcagctcctccttaggtcttgtttaggagcaaatgtaacgaagggaatttaaatagtaaaataatattctagcctgctcagggcctgttcgtttttcacggattgaagacctgaaatagttcttgaccggattgtttctctaatttatataagttttgataggttggaatgaatcctggtccaataccagagaaacgaacgagccctcaatctactccgttacttttgtttacaaacaagcccttaagcttccgaaacgaacgacgaaacccgcaactgatggtactgcttctagtgcacggcttgcgactgcttgtcttcgtgctcgtctcagtgataaccaactagctagcacagttgcagtggtaggcggctgtgcaggaagcaagtcagaggaagatcagattgagcgcaagagctgaaacttgaaaatttccaaaacctttttaagtctttagactgtctccattacgtgaaatagagaacgtggaactatagaagacacggtttacagaaagaagtttgaaatagaggatgtgataaaagatctgctagaaatagcctcacgtgtacgtgtacccccgcaggccgcttggcactgagtgactctcccacttttccacaactattacttgataaaatatatttggtccctcaaacaacaaacaaatcatctgatacattcgggggtaagttgtaaacgcaatcttgaaccacatagctatagcttccccccccccccccctggttgtattttccagcaggca

SEQ ID NO: 25626 - DNA, 2509 bp, Zea Mays
cgacgcctctgtcagtctatcttctcggctcgcacacctcagacacagccaggcagcggagcgctcccccctcgattccttcgcttccttctagaaccttccgctccctccgttgcaacagtagcacagagcttcctcctcccccacccccgaagatgacgaccatggagaacgtgatcgtgctcgtgaaccgcatccagcgtgcctgcaccgtcctcggcgaccacggcggcggggacgccgccgcctccctccctaccctctgggaagcgctcccgacggtcgccgtcgtcggcggtcagagttcggggaaatcatcggtgctcgagagcatcgtggggcgagacttcctgcctcgaggatcagggatcgtgacgcgtaggccactcgtcctgcagctgcacaagacagaggccggggtgcaggagtatgccgagttccttcacatgcctaagcgccgcttcactgatttctctattgtgcggaaggaaatccaggatgaaactgacaggttgactggaaagacaaagcagatatctccagttccaattcatctcagcatatactctccacatgtggtcaacttaacattgattgatctgccgggcctaaccaaagttgcagttgaggggcagcctgaaagcattgttcaagatatcgaaagcatggtgcgttcatatgttgataagccgaattgtattatattggctatatctcctgccaatcaagatatagcgacatcagatgcaatcaagcttgcccgggaagtggatccaactggtgagaggacatttggtgtgttgacaaagcttgatttaatggacaagggaacaaatgcacttgacgttcttgaaggaagagcttacagactgcagcatccctgggttggaattgtgaaccgttcacaagcagatatcaacaagaatgttgacatgattattgctaggcgaaaagagcaggagttcttcgattctagtcctgaatattctcatcttgccagcaggatgggttcagaatatcttgctaaacttctttcacagcatctagaggccgcgatcagatcacgcattccgagcataacctctctgataaacaaaactattgatgagcttgaatctgagatggatcacctcggtagacctattgcttctgatgctggggctcagttgtacctcatcttggagctttgccgtgcatttgacaaaatatttaaagaacatcttgatggcggccgacctggcggtgatagaatttatggggtctttgataaccaactcccttctgctctgcggaagctcccatttgatcgtcatctctccgtgcaaaatgtgaagcgggttgtttcacaggcagatggttatcagcctcatttaattgctcctgagcaagggtaccgtcggctgattgaatcttctctcaattattttagaggaccagcggaagcctctgtagatgctgtgcattctgttttgaaagagctggtgaggatatccattggggagacacaggagttaaaacgatttccatctctacaaacggagctagctgctgcatgctataaggcccttgagagattccgcgaagatggcaggaaaactactctacggctggttgatatggagtctgcatatttgactgtggagttcttccgcaagctcccacaggaagttgataagactggaactggaaatcccagaaatgccaatcctcctgctccttcggatgatcgttacgctgatgcacatttcaggaggattgcttctaacgtgtcctcatacattggcatggtatctgaaacgctgaagaatactatccccaagtctgttgttcactgtcaggtccgcgaagctaagcggtccctgcttaaccatttctatactcaagtgggcgggaaagatgctaagcaacttgcagtactccttgacgaggatcctgccctcatggaacgcaggctgcaatgctttaagaggcttgagctgtacaagtctgctcgggacgagattgatgccgtgtcgtggacaagatgaagttgcgcgctctgttgatgtgacccttttggtccgtccgggaaatcgtcgcctgctggccatggattcacgctttctagaggacgtgtgttgcccgccgtgcgcccttccatgagttccccgcatagaacaggtcgtcttctggaacagaaaggcgaagcgcgtggcgagctgtcctgattttgacgagtccatgcatcttcagcagattggactggtcgccataagaacacgaaactgtgattaggaggcatacacgtcatctgctagtgtttccggtgaagtcagttgccaccatgacctgctaggcagaaataaatatgcccctattaatcgggccttgatctgtcgtcctcattgctgaaaacctcacccaaattgcatcttatagcacattcgtcgccatggatatggtcattggctgtgccggctgtgagctgtcaacattttgtacagtactacatttccaaaatctaaaccgg

SEQ ID NO: 25627 - DNA, 2282 bp, Zea Mays
atgacctcatcgggagtcgacacgcagccggaagcacagcaggcgcactacctagagtcacactccccagcaacacagtgccactccactccaaggaagtgcttgcctcccgctctctacctctcctaccaatttcagctcagctctgttctgctcccgcagcaccagtacagaacaccccagaggcagcgagtcctgttcggtgtccggctggaaggccatgggggctagggctacctcccctccgccatggaggcgtcactgcctctgccgcgccctccacttcctcgttctcttgctctggggtacttccgaggcaaacaaagaacaggccatgttgcctccaagagggtggaactcgtatgattctttttcatggattgtagacgaaaatgcatacctgcaaaatgcacagatcatgacagagaagttactcccacatggatatcagttattgatttcctctggtaccggaaatatgttgacggtgcatacacagattcctatggatttgacaacattgatgaatggggtcgaccttttccggaccttcaaagatttccatcgtctagagttgatagagggttcagtcaaattgccagtaaggttcatggaatgggcttgaaatttggcatccatttgatgaaagggataagtgtgcaggctgttaatgctgacacgcctatcttggacataaagacgggaaaaccatatctagaggatggccgtcagtggacagcacgagacataggtctcagtcacagaacttgtgcgtggatgactcatggatttatgagtgttaatacaaatattggagctggaagggccttcttaagatctctttatcgacaatatgctgattggggtgttgattttgtaaaggtcgattgtatcttcggcacagattatagcccagaagaaatcatcactatttcagaggaactgcagttactccagcattagctgagaatattagtgatcatgttaacatgtataggataactggagatgattgggacaactggaaggatgtgagctcgcattttggtgtatcaagttccttcgctactgctaagaagattggggccactgggttgcgaggaagatcttggccagacttagacatgcttccatttggatggcttactgatccaagtgtaaatcagggccctcacaggaaatgtaaccttactcttgatgaacagaaagcacagatggcactttggtcaatgactaaatcacctctcatgtatggaggagatttgaggaatcttgacgatagtacattaaacataattaccaattctggtttgttgaagataaaccactatagtagaaataacatggagttccattatgtgcacagtgaaaggacatcaaatggagaacattctggtcactttaggtctccttatcctgttcgtgttaccaagaatgatggcatatttgtcagtctcactgcttgcagcgacgatgcagctaaaggatggtatatgtttccacaagatgggaaaccagatcatatatgcaggaactatgaaatactgaatgataaaaatgtctcattttgcctcggaaaaacaaaacgttttcttgcatcggatgtccttaccatggacaccaaggaacaccaatcaaagtttcatatttcagttacaaacactgatgatacttgtttggatgcatctgctggtcgaaggcagactgcctcagagatcaggcttcctatgttctctgcatgcaggtggcatgcaaaacagatgtgggagttaaatgcgaatggaaatcttgtgagcagctattcaaggttatgtgccacagtggaatcaagggacgaaggaggtaccagtggaggtcgggcatggattgcaactggaagtgaaggagaaatctatctcgcattcttcaatctcgactccatgagcaggaagatgaccgttcaaatatcagaccttggaaaggttctcggaagaaaccttttggagaaaaacccatgtagctacactgaagtttggagcgggaagaatttcggcccggtgaaggaagagatttcagcggtggttcattcgcatggctccatggtgttcgaaatcatatgttgagattgcagtactgggcaagttgttcgagaagtttgcagtgataatttagttgtaagctccattcctgttgatccttttttacccttagtccggagatggaagagatacgttgatgaaccattaactagatgtctgctggatttgacttcaatgaataacaaaacaaacaaacaaacaaac

SEQ ID NO: 25628 - DNA, 2960 bp, Zea Mays
tccctaccgtcgccgtttccgcactttcctcgtcacacaagtccacctccaccgccgcacgccgccgctcctccgcatccgcgaccgcgacctcgaggtcgccctccctccgcgccagctgcaatggcggcctcgccggaccaattccgggggcatgcgcgcctcccgcacttcgcggccccgctccgctacgacctccgcctccgcccggacctcgccgcgtgcaccttcacgggcgccgcggccatcgccgttgtcgtgtccgcgcccacccgcttcctcgtcctcaacgctgccgagctggatgtcgatcgcgcctccatccgtttccaggatttggcgccgacagatgtggctcagttcgatgaggatgagatcatggtcatcagcttcgaccgggagctgcccttcggagagggcgtgctcaccatggacttcaccggcacgctcaacgatcagatgaggggattttacaggagcaaatatgtgtacaatggagagtcaagaaatatggcagttacacagtttgaagccgctgatgcacggaggtgctttccatgttgggatgatcctgcatttaaggccaagttcaagctaacactagaagttccatctgacctggtagcattgtccaacatgccagtggctaaggagactgtcagtggacttaccaagactatttattatgaggaatctccacttatgtcaacctatcttgtggctatagttgttggcatctttgattacatagagagttcaacatcagagggaactaaagttcgtgtttatactcaagttggcaagactaatcaaggaaagtttgcactagatgttgctgtaaagtcgctggatttatacaaagattattttgccactccttatccattacctaagttggacatgattgctatcccggatttttctgctggggccatggagaactatgggttagttacttaccgagatacagctttgctgtatgatgagctactatcatcagcatccaacaagcaacaggtagcaataactgttgcacatgagttggcgcaccaatggtttggcaatcttgtgactatggaatggtggactcacttgtggctaaatgagggttttgcttcctgggtaagctatttagcagtagaatctttatttcctgaatggaataactggacacaatttcttgatgagacgacctctggcctcagattggatgcacttgcagagtctcatcctatcgaggttgaggtaaaccatgctagtgaaattgatgcaatttttgattccataagctatgacaagggtgcatctgttattcgtatgctacaaagttaccttggtgcagagtgttttcaggaatctggggagcctgttaaggatttgatgactacatggactaagcaacaaggatatcctgttatttatgcaaaaatcaatggacatgatttggaacttgaacaggcacagtttctatctgatggatcgtctggtcctggaatgtggattgttcctgtaacagcatgctgtggctcatatgatgcacagaaaaagttcttattgaaagataaaatggataagataaatattaaagagttttctgactctcaaagtgctgatggggagaagaatcaaatcatttggatcaaattgaatattgatcaaactggattttatagagtgaagtatgatgatgaacttgcagctggacttgtaaatgcaatcaaagcaaagaagctctcattaatggataagattggtatcgtggaagattcatatgcgctctctgttgcttgcaagcaaacactgacgtcattgttgcgactgctgaatgcttataatgatgagtctgattacactgtactttcacatgtaacctctgtatgtttaagcatttctaaaataacagttgacgctactcctgacttgaacaaagatatcaaacagcttttgatcaaccttcttctcccagctgtcataaagttaggctgggaccccaaggatggtgagagtcatcttgatgtaatgcttagatcactgctcttgactgcgctggtcagacttggacataatgaaactataaatgaaggagttcggcgtttccacatcttctttgaagacggcaaaacttcccttcttccaccagatactagaaaggctgcatatcttgccgtgatgcgaactgttagcacctcaagcagatccggttttgatgctctccttaaaatctacagagaagcatctgaaccacaggagaaatcacgtgtcttaggctccctgtcttcatcaccggatcaggatattgttttggaggcattgaactttatgtttactgatgaggtgcggaatcaagattcattttacatccttggtggcattagcttagaaggacgagaaattgcatggacctggttgaaggaaaactgggatcacgtgttgaagacatggaaatcgagttcactcatatcagacttcattgagtccattgtcccacggtttacctccgaggagaaagctgtcgaggttaccgagttctttgctggccaagttaagccatcattcgagagagcactgaagcagagcctggagagggtgcggatcagcgcgagatggatcgagagcattaggagtgagcccaagcttggtcagacagtgcaggagctgctgcaggccgatgcgtaaacatgtggcctggaaggtagcggttcctcagtgtgatcatctcatacgggctgttcgggtcagattaaagtcggttgtttagattgctgcagttataatctatagagataaacattgtagaaacagtagaagtcggtataaattaaacctaaacgaccaggcctataaattcttgaaaaggttcaggtgggcttattctacattgtattggcagttgcttgcgtatgatttgttgagggaaaaaactgatgcaatgacgtttgtttcaaagagtggtgtactga

SEQ ID NO: 25629 - DNA, 299 bp, Zea Mays
ctgggagtgggttcataccggagggaagaatgctctgaagatcccgttcacggcgcagagcggaccgcgacgacaatttccggccaccaattccgggggcccggacgctccccacccgttcgagctccacggtgaagtccccccggcaagcaaagaattgagtccatctacttcgcgcgcgagaaatatccgcacagggcgtttcataatctctctccctcaccgctccgctcgatggaggtgctccatgcccgattctctctctccggcgaggtagccatcagctacatcattggctc

SEQ ID NO: 25630 - DNA, 2092 bp, Zea Mays
ctccgggaggtgtgagtccacctcctgcccggttcgctgggatcaaccgcgggcgcgtttcccgctcctgtaggggttgcgttggggttttctcattccattttttgggtgctggaggggcgatcttgcaatgcagacgaataatagcaactatggggagcttacccgcaatatccgagaaaaccagcttggaggggtgatctttggttgcaaacacgatacgattgaagaatgcttcagaaaacagctattcggtctgccttcagtccattattcatatgttagaaatgtcaaacctggcatgcctttatttctattcaattatagtgacagaaagctccatggaattttcgaagctgcaagtcctggtgagatgtatattgattcatatgcttggagtaatgatggttgtttaaggtcagcttttcctgcacaggttcgtatttgcacaaagactcggtatccacctctgctggagagccaatttaaaacattgcttggtgacaactattacaaccatcaccacttctattttgagcttgaccatgcacagacaagagctttaatttctttgttcaaatcacttgctccgtctaatttcattcaagttccagctgtttcaagcaaaaggaatcttgcagttcctgacccaaagaaaatcacagcaaattctaaggaaatcaatccatttagtgttctatcaaatacagccgctccagttaactgggctgatgatgtggaaaatgctagtaactcggatgagaagaaatctggtggttcagtttctgattatgacaatttggatgacaattttcttcaaaatcaatttggtcctcattcaaatccagatgaggtcagtcaaacttcctcaggcaaaattgatggccaaggactggagcttattgaatgtaatcatccacttgtcaatactgtgaatggtaaaagaatcataactgatgaatcaatgcttttgaattcacacaatgagcataatggtgctgtggaagttgatgaagtggagattgaagttcacaataacccaggtggtggtgttgggctacagccagaaagacagactgtcctagaaaagctgaaaggattatctttcctacgacagcaggatgccataacttccaaggattgtactcattctggttcagatcaacgggtacctgatgaaacacagatcaatccaaacctttcctgtggcccatttgatgctacaatggaagataaaacctcttttgatgagtgcagccatggaaatgctgaggtgctgcaaatcatcactgatttacagaagaggactgaagcactggagaagaaactgattgggtcagacaaagaaatactttcattgagggaaatttttaaagactcaggaagaaaagtccagcaactggaatacattgtagatgagttacagttcaaacttgactcttccctggctcaccttggaaacatgtgcaatacactagccaccccatcaatattcctgattggtggttataatggcgtgacttggttatcatctcttgattccttttctcctgagaaagacgcggtcctaggtctcacaccaatgagttctccccgctcatatgcatctgctgctgtgttggatggacacatatttgcttttggcggtggcgatggcatgtcatggtataacacagtggaatgctatagctcaagaaataatgagtggacggaatgcccctccatgaaccagaagaaaggaagtcttgctgggatctgtcttaatgagaaaatatacgctattggtggaggagatggaaatgaattttattcagaagttgagatctttgacccctaccttgggaagtggatatgtagcccatctatgctaacctctcggtttgctcttgctgcgtccggactaaatggagtcatctatacatctggtggctatgatggaaacatgtacttgaaatcagcagaaaggtatgatccaagggagggcttctgggtccggcttccaagtatgagtactaggagaggatcccacaccttaactgtccttggagacaccctcaaattgcaacgatgatcaagactgcccaagaagctg

SEQ ID NO: 25631 - DNA, 1005 bp, Zea Mays
ctagacttgaccggaaacacatgttctggagatccgtccgagcatcatgtgggacaagggcaaggccttggagtttctgctcgaatcgctcggattcgccagctgcagcgacgccctcccggtgtacatcggtgacgaccgcaccgacgaggacgccttcaaggtgctgaggaagaggggccaaggcgtcgggatcctcgtgtccaagtgccccaaggagacgaacgcctcctactcgctgcaggaccccggcgaggtcatggacttcttgctccgcctggtggagtggaagcggaaatccacgacgactcggccgccggtgtagctcttgttcttggtcgactagtcaatcgatggaccgaccgatcgatcgaatgggcgtccaatcatgcgcgaaaacataccccaccactgcaagaccaatttttttttctgtctctctctctccctctctctccactctctctgacgattcttcagcttgtggtggcctccgaaaccgacgactcgtggtggttgctgtgttacatgttcttcgattccctgaccaccgtgtgctgccggcctccgccaccaccgagcgaggaaaaaggaggccggccggccgcacacaaagcacagcgtcactgaaagtgttttgagcatgttggcgctactgtcgaatacagtatcagtaaccggttctactccaaggcagtgtactgtccccccacccccattattctctcctgttgtttttggccctagcttgttccccatgactctggaaggcatcgtcgtctatctgcaaagctacctgacgtccttgaattgaagaacctttgaaagaaacagagaaggttcggtaatttcacttcacccccaattaatataagtatgtaactatagtagctgctgtatgtctaggcactgtttacgcaccctctctgtaagatgtgtactcctggtgaatgaatgtgagatcccaagcaatggaattatattctgcaaattatttcgtgccaa

SEQ ID NO: 25632 - DNA, 2149 bp, Zea Mays
gaaattccgaattcaactcatgggttgggtttcttcgttctgtaagacttgttggttggactgtcagttgttggtgtctgtctgaccccttcgtcagaccccttcgatctactagggcggctgaatcagtttggctgagcaggaagataacacaaaaatggacaaagcattagagcaattatcttggagttgcagatctgtacctgaagattcatattgaaatctggaagcttctgctgttgagtacagagaaatatttcttgccttttgaggaagactgcagagcccctaaatgtgaaacttgtttcttttcttgtctactcctgaatgctgacgaactcagcctctcacgttacttagctgaaggtcgtactggtacagacaccgaggatggagcaagcaacaggtgtaagtggtcctgaacacataattgatattccaagggaaattggtcctcctgcttcggtttctcgtagtgctggtagagagaaccatgaagaatcgaatcctgtggacaggccttcaacaagagctctagtacctgccttgcaggcaccatcagcaataggtgctgtacctattacagggcatacttcaggcactaggagaaatgacaactatgttcgtcggcacagaagcccattgaattctggactgtggatttcaattgaagttattgttaactttagccagattgttgctgccattgttgttctttgtgtgtcaagaaaggaacacccacaagctccattacttgagtgggtcataggttacactgttggttgttttgcaacgttaccccatctctattggcgctatatacaccgtaatattgtaaatggtgagcatgagtcatcacatacacctcaagggtccgctcataacaactcaaatgaagcgactcatgctgcaagtgcatcagaacgccgcagaaatgctgcccgaaatgctgtgcttgctaatcctaggatcaatgcgctgtttgaccacttcaagatggccctggattgtttctttgccgtctggtttgttgttggaaacgtgtggatatttggtggccgttcttctgctgctgatgcaccgaacttgtacaggttgtgcattgtgttcctcacttttagttgcattgggtatgccatgccattcatcctatgtgcaatgatatgctgttgccttccctgcattatatctattatgggttttagagaagatacaaacaatacaaggggtgcttcctcagaatctatcaatgctttgcctacatataaattcaaaatcaagaaacgtcgccatggttcaggcagtgaaactgaaggtcaggaaggagggatattggctgcaggaactgacaaggagcgatcactctctgctgaagacgcagtttgctgcatctgtcttgcaaaatatgcgcacaatgatgagctccgtgaacttccatgtgcacactgtttccacaaggactgtgttgataaatggctcaagataaatgcactttgccctctgtgcaaatctgagatagtgagctcgtctggtacttctgatgcccgccaatcagaccagaacaccgttcctgtgcaggagatcgaaatgcattaggttggtctgttcccgcagcttatcacataaggatacatctgatttgtggctctcaatcttcatgtataaagttggagattgatgtatggattgtagagacgcgtaggtttttttttgtatttaacactgctatcttggagaagttacagctattctcgctgtcacccaactatggcaagccaatactacccaggttttcccccatagcgtgggttgcaccttatgttctgctctttatgacattgcatgacttctttcgagtttctagagcgaaataggcagaagatgttggagatagtctaatcaagtggttgtagtgaaacattttcgtgcatgcaacttttgaaatactccctccattctaaactatactataggacggttggttttttctatatatatattgtttttgctatgcacttagatatatattacatctagatatatcatatatagttataatgtatttagatgaaattgtcttatagtttgggacttggaatggagggtgtattttcatgctacaaattgaagttaccgatatcagtttatg

SEQ ID NO: 25633 - DNA, 359 bp, Zea Mays
gcccttcgtcggcgaggagtatcacaaggtggacgaggcgtgaggctgacggtggcgctggtagtccgcaaggaaccggatttggacgcgctctccctcgtcgctaggtaagagacccaggtaaggaacatataagtggttgttctgattttggatattagccaatttccccctccaatctgttactgatttatatgcccttctagggatcagcagatcccacacctattacatgatttgtccttctagaatagaatccgctttctatcttctgaaccggcactgccttcttcaatatcggccaccggtcggtccacctcttcaataatcgtccttcacttcagttgtgagttgtgaca

SEQ ID NO: 25634 - DNA, 1698 bp, Zea Mays
ctgcccattattaactctccctccccccacgcagaagacgacgaccggaagcaaaacagccagccaaccaaccaaccagaccagggatggatggtgcgcaccaagaaagggggcaccgcaccgagccaatgatctgcaagaagagaggtaggatttaggcacggcacctatagcccctgacgagagagagagggagagagatttggtcttggataagagtggagagactggagacgggtgggtggagtgagagaagtcactcggggagcctccagattctgaatctcccgcaacccgtctcatcgccggagtggagttccaggcgagtgattatcgagccagtaagccatttgcaagcactgaactgaaccctcagagcgttgttgcgatggaccaaatcgctacccccgacgaaacagcacatgcctctgcaccttcagttcataagctgtttgatgctaaattaggccaccatagcgtgatggatggcaccttggcatccacgagtcagtcatcaaacatcaagacccagctgatccggtcatcaagcttgtcaaggagcatatcagttaaccttgagaagaggagccctgaatctgatcctgaaagcccacagtctcacgtctcgcatcctaaatttgcagaacccatgttctcgaattcttcgacgttctgcacaagcttgttttcgtcatcttcgacaacagagccatgccgtcaaatgggcactttacctttcctgcctcacccccctaagtgtgagcagcaggtttcagctggtcactcatcgagctcctctctgcttttaagtggtgataccggtttagatgtggctgaacagtcagatgatctgaacgacttgctcaatctttcgggagatgcttctgatggcagcttccatggagaaaacaatgccttagcttttgacgaacagatggaatttcagttcctgtctgagcagctagaaattgccatcactgacaatgagaagaatcctcatttagatgacatatacggcacaccaccacagctgtcatcacttccagtatcatcttgctccaatcagaatctagggtcaccagttaaagtccagcttagctcatctcagtcatcttctagctctgcaacagctaacaagtcaagattgaggtggacacttgagcttcatgagcgttttgtggaggccgtgaaaaagcttgaaggtcctgaaaaagcaactcccaaaggtgtgctgaaactaatgaaggtagaaggtctaacaatttatcatgtgaagagccatctgcagaagtatcggcttgcaaaatatattcctgagcctaaagacgataagaaggcttcctcggaggataaaaaagcacaattaggaaagggcagcattgattcaagcaaaaacaagtgcaaaggcagttgcagctacggatagaggaacatgcaagatacttgcagaaaatactagaagagcagcagaaggccggcaatgtgccactaaaagctccaaccaaagcacaagcaacaaagtcgtcacctgaatcgacgtcagacgagagaactgaatccgaggtagacaccatttctccgcggccacccaagaacaggaacccgggtgtagacgcagaatgcaaatcgccgggaaggatcaagcgaacgaaggttcaggctgatcttgaaaacgagggcctgtgttcatagcgaggg

SEQ ID NO: 25635 - DNA, 310 bp, Zea Mays
cttgcttgtggcataatttttgcaggtactccttaggatgattggttgatggtgtgactaggcctccatccctaccaccgggatagacggtcgagtgggttactgctaccgcaggagaggaccaggaggagtagcgtggccaagcttcgccatgttactcgggttttctccgttagttatttctgctgcattaaaatttatggttgttatttcagaaactccgataatgtaatcactaatgatacttactaaatttgtggtattatgttttattgtatttctctgtgcctcaccttcgtgtgagctagtg

SEQ ID NO: 25636 - DNA, 1494 bp, Zea Mays
cgtccgcgtccgcgctctccaaagtttcgtccaccatttcgctcccgcaagcaccgatttgtttactgctctctccgacgcgcggcggcggagctccctacgacgactgaaccatgtgcggcggcgcgatccttgccaaccttcgcgagccggcgccgcgccggctcacagagcgggacatctggcagcagaaaaagaagctcaagaggggcggcggcggcgggaggcgctcgttcgcggcggaggacgatgaggacttcgaggccgactttgaggtcttcgaggccgactccagtgattcagatttggagctcagggaggggactgacgacgacgtcgtcgagatcaagcccttcactgccaagaggactttctccagcgatggcttaagcaccatgactagtgctgtagcaaggtcagccaagaggaagagaaagaatctatacaggggtatccgccagcggccttggggcaagtgggctgctgagatcagagatcctcagaagggtgttcgtgtttggcttggtactttcaatagtcctgaggaagctgcaagagcttatgatgccgaagcgcgcaggattcgtggcaagaaggccaaggttaactttcctgatgcaccagcagttggtcagaagcaccgttctggctcagcttctgctaaagcatccaagtcaagttttggacagaagcctatcgtcaaaggaagtaactcctttggctgctcagacttgggctgggagaatgataccaagacaccagacatcacttccattgctcccatttccactattgcggaaggcgacgagtctgcatttgtcgacagcaattcaaacagctcatttgtgcttcctgccctggagaacagtgctgttgatctcactgatgggctgacagatttagaatcctatatgaggtttcttctggatggtggtccaagtgattcagttgatagccttctgaaccttgatggatcgcaggatgttggtagcgacatggacctctggagcttcgacgacatgcccatcgtcggcgatttcttttgaggattttgaagcttggtcataggagtatgtacatagggactaggggaataaagaccgggggagattgggaagcacctgcttggcaccttgggggtagcatttgctcgtgtctagctcagagatgcagaagttgcattctgaaactacttggttatcgacctgttccctattttagctatctctttatgagagccatttatgagactgaaccattttgttttgctttcttttcgttgttacaatatatggtttaacattatgatttatggatatgtgccaaatatggtgctcaacagtggtcaaacatgccttttagatgctcttgtttctcgtattgttgtgtaccttgtgatatttcattcgttgaaattgagttaaactagttatctgctgaaacttttcttgtacaagcaaaagtattcaagatttaatcttattggcatttggc

SEQ ID NO: 25637 - DNA, 2362 bp, Zea Mays
cgagcagtcgagcactcgcgtcgcggtggcacctgcgatccgaagcgagtccgagtcacacggccacgccccttggtctccttcctccgcttgcggcttgcctttttcgggccgcctccgctcctctctctctctctggctctctccctctccaatggcccgccccaggaagccgccgccgccctcgccgcctaaggcggcggcgccgtccatcgctgacgcgctgctgctggccacggtctgcatggtgggtctgcccgtggaggtgcgggtccgcgacggatccgcctacgccggcgtcctccacactgcctgcgtcgacgccggatacggtgtcgtgctaaagaaagcaaagaagattgcaaacgggaagggagatgtgaatctctcgctgggatcgtttgtggacactcttgttgtttgcccagatgaccttgtacaagttattgcaaagggtctttcactcccccttaaaggtgtctgtaaacctcttgattccaacgtggttgctgccagtggatccttgaagcctcaaatttcacatgcaaatgacccaaaaatgtctaataaaactaaaaatatgtctccacttatgcaagctgagaaatgcacctcggtgggtcaggagaaaaatacttctgttaagagaaatggtcaagataatggtattactacaagtttaagttcttcaaccagacatgtgggggcatgtttatccaataattgggattctaggtctggaagtatggtgcctaaagttgatgttatcacaagttcagcttcagctgtgcccgtggtggcttcaggtgttaaaccctctcagccagtcaataattcagttgccaagattgtcacgtcaagcaaaactgctgctaaggaattcaaactcaatccttccgcaaaggtcttttctccatcttttgcaagttctaggcaagtacttgcagctgcggcccctgttgacacatactacatttcacactctgcccctgaagtaccaatgggtgtgcctgtatatgaaccaaaatctgtgtcaggtgtttcacctctatccaacaaggtttattgtagtaatctatctcctgcaaactatgccatttcacctcagtatgtgccgtctatcatgggccataatgcatcaaggctagacccatccagaattggcacaccataccatcctatgcaggtgggggcaacttatactacccctagtcctcagcctgtaatggctgggaagttcagtcctgttgtttatgttcaaccaggtcctcaggtgagtgattcacaattattgtttgccttgagacttgaagtggataaatatcaagaataggaggaggatgcagagtattgttcactattttatttatacaacctagaccttgggtaaagtatgttagcttgtatgctccagcaactgagtgttcttcacatctgatgtgattgaccttcgctgccaatcctgatgttgcacagattgttctatatatcaagttagtttgttaactggaattaactgttttattttgtaatggttcttttctgccatggttggtctgttcttatctctggcaaggaaccaaccttgctccatagaaatgatatatagtctaaatataagttaactcacatattttccccttcctcctcttggctcatctattcttggtttccattgaaggatgcaatgcatggaacaaccgttggttttcaaggatggccttgccctttgttattgaattcgtaccaagctagcatgcagaaattccaaggcaaccccccggtgtatttagctcctccagtcatggcaactgggaaccttccattggtggtaccaagccctgcatcacttgtgcagccgttcgaggccattcatcccataatggtccctgctgcaagcagcatggtcccaggaaaatacatgtaaacttgtcgtaccaatgacaatctccttttgttggaagaatcctggcgtacccattttgtctgaaaggactctagtctgttgattcacttgtcagttgctggtctgtgtccgtattttagttggaagggctttgcaacttcttgtcattcttcatgcttggtgtgggtttccaattttttttaggggcgggacagtaaaatgaattagggagaaaatgcagcgattctttgttatcttagcgacacctcttcttccaagagcagtatgtacaatgtgacattgtaaaagattcatatagtgaaggccttattttcacgaggctaatgtacatccatcttgcaagtgtaacagcttctgaagttctgttttgagaaaataaacttgttcgacaatattgtttaggtaatatcagcagtatatttttggatattagag

SEQ ID NO: 25638 - DNA, 2450 bp, Zea Mays
atcctgggctcctggcggttagccaagaattccatcaattgctctatacacgacgtcgtcgacgtgtaatgtaaagctacagcggttcaacttcgacggcggccccagcctcgctacactgtcgctatccattttccccgtcacgagctgccatgagcaattaagtcttcttcacttcctggttcccagtattggtcgaggcgatctgacggagggagcagccaagtcagcaagtaccgcagcaccaagcagtcgaacagcgccgaagatgccagggctcgccgcgtcggcgtccgcagctccggcgccgttctcgttggcgacctcgcgcttaaccccggttgcaagacctgctccaagtttcagaacgcaagcttgtggattgaggtgctggattgctgcaaagctgaaactccgcaaggcattgaaaaggcatcacggatggcaacttcaaagaaatctagatgctcgagggaatgataacgttccagattgcttggaggctgcatctctgactgaaaagagaagtcattggaacatgcatcttgcttatgattctggaggtgaaatggccaacacaagctctgatactttggatagttcaactgttcaggaaaaaccagtggttccgggacacatcatctctgaaatcagttctcatgttcaaaaggaagagtctgctgtgtccaaaagacgctctaacaatgaaccatctctttgcattgctgtaattggagctactggtgagctggcaagaactaaagtttttccagcattatttgctctgtattacagtggttttcttcctcggaatgttggtatatttgggtattctaggaagaaattgacagatgagggcttaagatctataattgaagccaatttgacctgccgggtggatcaccatgaaaattgtgatgacaagctaattgagttcctcaaaaagacgtattatgtagatgccggacatgacaaccaagaagggatggttagattaaattctaggatgtcacaaatagagggcattggtgctgcaaacagaatattctaccttgctgttccacaagaggcactccttgatgtagcattgccactggctgacggtgcccaaactaagcaaggctggaatagaataattatcgagaaaccatttggctttactggtttgtcctcactgcgggtaacacaatctatgctgtcaaggtttgaggagaagcaaatttacaggattgaccaccttctggggaaggatctgatcgaaaatcttactgtcttgagattttctaacttggtgtttgaacctttgtggagtcgaacttacatacggaatgtgcaggtcattttttctgaagaaacatcaaatgaaatacaagggaggtactttggaaattatgggataatccgtgacatagttcacagccacattcttcaaacaatagctctatttgctatggaaccacctgtaagtcttgatggagaggatatccgagatgaaaaggtgaaggttctcagatcaattcggaaagtgaaccttgatgatgttgttcttggtcaacttaaagatatgtctggtaaagttgacagatacacaaaatccatgataccaacctattttgctgctgctatgtacattgacaatgcacgctgggatggggtaccattttttatcaggacaggcatgggacttatgacgaatagaaattcgaattcagtttcgccatgtccctggtaatatctaccgtgaacgctttggccatgacatagatctcgacacaaacgagctggttctacgcgatcaacctgaagaagcaatcctgttgaaagtcaacaacaaggtcccagggcttgggctccagctggatgcttcagaactgaacctgctttaccgggataggtacaacaccgaggtaccagattcgtatgaacatcttctactggacgtgctagatggagatagtcatttattcatgcgcagcgacgaactggctgccgcatggaatgtgctcactccgataatccatgagatagatcagaacagagtagttcctgagctctacgaggctggggacagagggcctatcaatgcttaccatctcgctgctaaacatggggtgcgatgggatgacgactggtgagtcgatacatggcaaagattctcgatgcgcaacgagattcattaccaatttttgtcgttgtatcgcagtcagatgtacaatatgccttctgtaatcggcctgatcaaggactttcaaggagacatgcctttcaaggagatatgcaaacatggtttctttcctgtcctgtagactgtagcactgttgattcaagttggaaaaagaaaaaaaggagaaaagaaaatatgcttgcgacaagccgaggccccatgtcttgtgcgtttagcatctcgtttgccacaagtatggcagtgtttggaaaatggcaatgaaaag

SEQ ID NO: 25639 - DNA, 3294 bp, Zea Mays
gaaggagttgggaagactcaagtggtacttgttctcggagttggcgctctccttctcggcgtgggagagagagagagagtgagagacacagaaagggagaaaaaagtgtagaaagagagaggaagtgaagggagcccagacaattcaaatccctactagccgagggccgaggcttccgtttgaagactgggcgtgcggtcctcctccgggcggggctctcgcgcggagagatctccgagcatccttgctactcccgttatcaggtaaagggatgggtgggcaaggtacaggaaacactgtctctgttcccctgctagggaaggcactgtccctctccttgtaagttttcctgtgagctctctgctgctgttcaaggagctttatccggtgatagtatcaaagcaccaagatgaagtccagcgcggttactacaaagggcaaggctatatttgagctcaagcacaagctggtacaagctgttaacaagattgcagacagagacacttaccagattggattggatgagatcgagaagatggcggataccctggcccctgacatgattggccccttcttgtcatgtgtcattgacactgatgctgagcagaagagtgcagtgcggaaggagtgcatcaaggtgattggcacactggcacgactacatggaaacctattggcacctcacatggcgaaaatggtgtccagtgtagttaagcgcctgaaggacaccgattcagttgttagagatgcatgtgttgacacttgtggtacccttgcaatgtgcgccagaagttatggggatggtggtgcagcgttggtgacattggtgcgccccttgtttgaatcactgggtgaacagaataggtatattcaggctggggcagcactgtgcctggccaaggttatagatgagagcaattacttccctgggcctgtgctcccgcagatgcttgttcgtgttgttaagctgctcaagaacccccacttcatggcgaagcccgctgcgattgacttgataagaagcattattcaggctgaaggtgcttccacagagcaggcattatcatcagctctaacaagtattatggatgcgctgaagagtactgactggaatacaaggaaggctgcctcactagctctttcaagtattgcggtcagttctgggtatttggttacctctttcagaacttcctgccttcgctcccttgagcgtagtaaatttgacaaggtaaaaccggtacgtgacaccattatacatgcaattcagctgtggaaagctattccagggtctcatactcctgaaccatcagaagctgggtcatcaacaaaagagaactactttggagaccatcatgacgccagaagtatacatgatggaggatcaagagatacttcttttaggagaacagatcatgggccttctgtatctgttatcagtggtagttctctcagttcagcaaagcggaggtctcctttatctattaacaaagtagccataaacaatgctgcaaatttgcaacggatgaagactggtgattggcgtgttgaggtgtcagttccaaagcagagtatgataccgctggttaataatgacgagaagggatccagtaaagcctgcagcctaaaagatacaaagagaaatgcatatgaaagtgttgatgtagacagtaagtttgactatgacattgtagatgataaacaagaatgctcctctgtgtcagaagtagccagcaggagttttgagacaaagcatgtcactactgctcaggaatgcactgaagattgtgattcagcagaagttacagaacaatgtcccaggggtcgagaaagtaagagcataggctcaacaattacagatgttactactcatgacacacatagttgttgtctgaatactatgaatgaattggcccttgttaggaagcaacttcaagagatggagaggaagcaagcaaatttttttgatttgttgcaggaatttatggccagctcagcagagaacatgtcagtgctaaatttgaaggtgcacaacttggagaatgctgcagacaaaactgtatatacaattactcagagcgaaagccggtatcatcttcctggctccaagcattttaagaaccaaagcgtctcttctttgcctaggctttcgacttctacacctagatcatctatggatgttaactacaagccaccaccaatctcagagttgaaacatgagaagtggatgcgtgatctaccatctcggggctcaaacatgtgttgtaaagagggagctgattttcgaaaggatcatgttcgcagtaaagttaggaagcttgggcctgtgagcttagagggtaacttgggaagatgtgatccaagctcagcaagaagtcgaacatcaggggttaaagggacttatccagtttcatttaccagttcctgtgaacaatctggactgcgaaatgcattgtgcacctcaaatcaacctggtgagtttcaagatactgatggcatggaacctgcatacatggaagccctgaactgtggtgattatgatgatctgattgacctaatggatagaactggaccagttctcgaaaagttgtcgtgtgagacgacaaatgagcttttgagggttatagctgaacaatttcttaataagaagttctttgacttggcactgccttggcttcaacagttagcagatttaagcacgatttataagccaactcaactttttgcatctgtgagagcacaaaaggagttcctttctgcattggaggaagctgcaacgggtggatctatggaaccagccttgaggattgcaattgcacagctcggatttaaactatccaaagcttttgaggttggcccatgcaggaaaatctcagccagaatgtgcagagaaaatgaaactatcatgaccaatgcaatgtgagatgtttcttgtctagtatatgctcaggccacgaaaacagtgctttagggagcttaagttaatttcttgtagcagcacaacctttgtaacttgtcgtatgatctgtttaattagcgtgtgaaaggctagaagatttcaatagaggttgatagtttggtagtttaaaacatgcgtgctttggttctctactgtaggactggaaacttttgctgtgtagcaatgtggcatgacttatgtttggtgctttcagacggggccgtacagatttttgcttgaattatctcactctgaaacactatcgtacctaacacaatgcttacaatggaaaagaaatgaaagaaaaaaaaggataaaataacggaagctgtttgtca

SEQ ID NO: 25640 - DNA, 2195 bp, Zea Mays
tgctgatcaatcagggcattaaaaagtgctgtttgaaccgtgaagatggcggcgatgactgcttacaagtatcaagctcaggccttgatgagggactatctgctagctgatccactagttccgtacacctctgtgctcattggcattgtcctctgcaagatggtaggttgatttactattctggtgcccaagtaattgacttatagttcacaattgcattgagtaatcaaacttgatgtgaatgccgatccatgcttgcagcttactagtttgcccaggataattaccttcttagagattatttataacaaatggaagaccttttctactaacccaaatgagttgcatcagcttttatacccaatgatgtgaaaggctaactaccatgaattagagtgactagttgctgggttattaatacgatagtaagaagatgaactaagcatacgatattctaaatgtagtttttgtctaccatattcttggttcagttattgtattatcggtagttttgcttctaattgtaattccctaaccagcaatgttgactgaccattttgactttctcccttgcaaggcttatctatagagagaatgaactgcaaccacaatatttattaatgattccttctttaaaccattgactattgattctaatgtaacttcgtcgccaacattgtttacaaccatcagacctctcgctctcacttaagttattgtactgtggtgaattaatgctaactgtaattttctaaccaacaatgttcactgagcacttccattcttgacataaagatatactcgaacaagttctaaacaagtggtttaaatcagtttgcccaaagttgaacaatgctgagtccactatgtcctccatttcatgttatttttcaccccaagtcaaaaatgatcatgcaaattaaggatatagatgacaaacagaatgtgtggcgccagttataactcttatccaactctcactatgctttggtaacaacaaaacaagcctttagagtaatttatgtatgcgacagcatatatggcgggccttcacatttctggaccttgtgtgtcacggtaatcagttctgcattattcatagttatgcttctagtttgttgttttgacaaatggcatgctttctccttcaggcttacgatttcactcgaatattgagctccttttatttcaagggctacactttactgacaaaaatacagcgcatcgaatggaacaatagcgctcatgcaatttttatcacggctgtatcattatatcttgtcatgtcaactgatcttttctccgaccgcgtcaagggacctattacattccgttattcgataatatccacctctgcgttgggggtttctgtcggctacttcatcactgatcttgcaatgatcttctggctgtatccttcccttggtggaatggaatatgtcctccaccatactgtttccctggttgcaatagcttacacaatgttgtctggggaagggcagttttacacatacatggttctcatttcagagacaaccacccctgaaatcaacttgcgatggtttcttgacactgctggactgaagaaatcaagtgcttacttggttaatggaattctgatgtttgttgcatggctggtggcaaggatatttttgttcatgtatgtattttaccacatctatttgcattacggtcagataatgcagatgcatgcctttgggtactacctgacatttgttgtgccatcagtgctctttgtaatgaacacaatgtggttcatgaagatcttaaaaggtgtgatgaaaacactggcaaaatggccatgacgtggatgacgccaagaggatctcagaactatcaacaggatttcgtctttctggcatcattacgtgaccttaatctgtgaagttatggatatcagggtaactagagaaacataatatgtaaagtattagcaaacaagctatattaggtgaaattgccctattttcagtcgagctggaagttcataaccggtttggtttgtaccggagatccagcacgctgttctgcttaccccacctgtgccatgtgtatatctgaagagaattttaatgggtggtttgttcaacagtacaatcccagtgctgtgtactccctccgtttctttttacaagtcgtttccaacagccaatctataaatatcggcgacatct

SEQ ID NO: 25641 - DNA, 4158 bp, Zea Mays
ggcccggccaccccagcaggcttgggccgtggtctgctactctgctcgccctctcgcctcacttccactctcacccaccaccgcctttctccttcccccgcgccgatcacgccacggcggccacgccatagggctagggtcggagatccgctcgcccggtgatcgattcgcacctcctcctctacccggatttggaggttagagtaatgaaataaaatgctgctcaaaagcaagtttaagttggccacaaccattggcatcgtgctgtcgatgctatcgctgctcgtgcacctttttattgctaattattcagctgggggcattacaaattacagcatgcacatggacgatatccttccatttggactgaggcctcgaccacggaggctgtggggtccattggtcccactcgatcacttgcatccttttgcgaaacctagcaaaccatatgctgtccgaagttcaaaagcttttcatatatatacgatgaagatcatttcatacatgcactttccagtgatgtggttattgtgcatggcttgccaaaggatctcagagaggctaggaaaaagataaaatttcccacactatctcctaggaattctgctactccagaatactacatcgaagaagtattacccagacttgtaaaatcgaaagttcttgggataattgttaatggaggtaattgtcttcagtcaattctccctgcaagcttggaggaatttcagaagcttagatgcagggtagccttccatgctctaaggttgcgccctcaaattcaggctcttgggagccaaatagtaggaagattgcgagcatctggccgtccttatgtggcctatcacccaggactgcttagagatactctagctttttatggttgcgctgaactgttccaggatattcatacagagcttattcagtatagaaggaatcagatgattaaacgaggaacagtaaaggagcagctagcagttgattcagtgtccaggaagatggctggtttgtgtccactcatgccagaagaggttggacttctacttcaagcagtaggttacccaccaactacaataatattcttggccggttctgagacttttggtggacaaagaatgcttattcctctacgagctatgttcgctaacctagtagaccgcacttcattatgtagtcagagggagctgtttgatttagttgggccagaagatcctcgaaccccagatttgccacagcctccacctcccaaaagtgaaaaacaacttattgaagaatggaggagagcagggcctcgtccaaggccgctgcctccacctcctgcaaggccattctatgcacatgagaaggaaggctggtatggttggattggtgagaatgacacagaaccggatgcttcactgatcgagttcaggaggcaagcacaccagttgctctgggatgcacttgattattttgtttctgttgaagctgatgccttcttccccgggtttcacaatgacggtagtggttggccagactactcaagtttggtcatggggcaccggttgtaccaaacaccttccggtataacctacaggccggacagaaagattattgctgcactgtttgaagatgttaatgatcatcggtatcatccacctcggaattggacaattgctgcacgtgagcacctcaacaggagtgcaaatgtggagggcgtagtgtcatcagctatgttatcaagacctgtatcttttctcgcccaccctttgccagagtgctcttgcagcacatcgaagtcacctgctgttgaaccggtgaaagatagcaatggcagattcctatttggaggtgaggaagagtgtgctggttggatggcacgcagccctgcgatggcgtctgccaggaataatgaacctcaaattgaggactatgaggataatttgcctgaagaaggctctagttcagacatgcaggaatctgacagaagtgactcgaataaatcttcggagcaagatgaggagatggatctggatgattagagatatgtggagcatggatgtatggcacacctttcaaccgctaccagctccaggtccaggctactcgaagacaagcatacatacgctcagaatctcctggacaggtgggaatcatcttgcatcgcgcagcgacacatcagcatctggattagtcccaggatcacaattcacaaggtcatccagcgtgggagcttgcctggaccgtactcgatgtgcacctgtatacaggacaacattgcaattgtttgtgagttttattgatcgccgaagagtgtgcttacacggatggagttggttcttctgcatgacctgtgctatggatcagaaaatcgtgtatatctactttggctacacgaaaagtttgtgtttcacatgagaagtttttgagtgaaaaaccttctctgaattcggctggctgctgtagtcggatcaaactgttgcatcttacttgttcttgttcatacagggagtgaacagaatgcatcgctgttcagtatatcgaacgcaggattccaaagtttggacatttcaatgcttgtaataaccagtggcagatcttaaaaaggaggccatgtctcctccccagttttaaaacacacatctttgtcaagctccgccactgcctataactgttaaatacatctcaataatcaacattggccatgagacttgacaaattgagattcttctgtctgccaggtcatcatgctattcatttcaatctcttctcatcccaagagcatcaagtgtatgttgctgctttgtgtgaggaccgaattgaaaatggtgtgccacttatacaaatctggatgggtatgcttgctgtcttagatgtcaaaagtgagcttctcgttgttcatggcagctgctacaacacaatggcactataggaaaactgaatataggaacacgctactcgtcgaacacaaagttaggatcctcaacaacaaatacaaagtctaaggaagagtgtgaatacctaattggattggccaagcctcacatggtaaaatcaacagttgtcgacagcactactggtaaaagcaaggacagcagggtccggacaagttcgggcatgtttcttcaaagaggaagggacaaggttattcgagtaattgaaaagaggattgcagactataccttcatacctgtagatcatggagagggactccaagtactgcattatgaagtcgggcagaagtatgagcctcactttgattattttcttgatgagtttaacaccaagaatggtggtcagaggatggctactcttctgatgtatctatcagatgttgaagaagggggcgagactattttccctgatgcaaatgtgaacgtcagttctttaccatggtacaatgagctttcagagtgtgccaagagaggcctttctgtcaaaccaaagatgggagatgcacttcttttctggagcatgaaaccagatgccaccctggacccattaagtttgcatgggggttgtcctgtgattagaggaaataaatggtcgtcaaccaagtggatgcatatccacgagtacaaagcttgagccttcaagactcgagagtcgagcgtaccaaagatggatctctatgcatgtgacttggggctgtctactgggttgacacccatgtatgctttacagacccactgaagctgtattctttgctcctttgttggaggggggagaattgcagataataggggccaataagcaggggccttgctcatccctgcagtatttttgggtctgatccttgctgacttggcttttgtcttttcttttctttttcttaccttgccgtaccccagctatagaggaatggtgtagtgtctgggggcatagagtttgagattttgttttgtgccacacctgtgttactagtataagctttggtactaatgaataacgaggcctaagctcacatctactacatgaatggtgtaatattgttgaagatagaaagcatctaatgttcggtggttttcgttatggtttcggttattacgacacaagattattgtgacaaaaagtgtgttttgagagataatagagctcacatctagtacatgaatgttgtattactgtttaatgatgacacgagattatttgataattatgactgaaagtcgcctagag

SEQ ID NO: 25642 - DNA, 157 bp, Zea Mays
cttgcctttaatttaacacttagatagtgtttgctggggaggtactcgcttggcgagcatccactcgttaagtccatcattcctcaggtcgtccaccaactgcatcttgtggttgcaaccacaccacttgcatgagcgtcatctctcggtcctaaat

SEQ ID NO: 25643 - DNA, 1669 bp, Zea Mays
cgggtttccagtgaaccgcccaaaggttatttcggtcaagtcgcttctctcagtggaaacccaaaaaccctcttcgaagttcgatcccagggccgctccggcggcggcggcgcgttgagatggctgacactgacagcgcggagaccgagaaagagaagatggtagcggatgatgggggcaagcccgcagagctctcgaagagcgcgaggaagaagctgcagaagcaggagcggcaggcggaacgtaaagcggcccgaaaagcggcggagaaggagcgacggcgcgccgacatagagcggcggaggcgtgagtgggaggacgctcttgccgccgcgccgtcggatgaggcccgggccgagatggtggcggcgcggcgggagacgcggcgcgagcgggtgggccggcgggcggaggagcgcggggcgcgagctgaccggctcaggcgcgcggctgagggcgcgggccagaaggtggtgctggacctcgagtttgcggaccttatgaggcccaacgagattcatagcctcacgcagcagattatgtactgctatgcagtgaatgggagatctgcaaacccagctcacctgtggctgacaggttgcagtggtgaaatggcgacccatcttcagagaattcctggcagatgctgagacagtgcttgatgatctagacatgtcgaaaatatacatcatcggcggcctggtggatcgaaacagatggaaaggcataacactgaagaagtcagctgagcagggaattcaatctgcaaagcttcctattggaaactacctaaaaatgtcaagttctcaggttcttacagttaaccaagtgtttgagataatgttgaagtttgtggaaacaagggactggaagacggcattcttccatgtgattccacaaaggaagcgaggagaagctgagaccagagatgacgtggaaaaaggaggcctggatgacaacgatggcgccgccgaaggggctgcagatggagaccattccgaggaagacctgaacaagggcttcggtgaggaggaggacgatgatggggacgaagagctggaagaggaagaagcagatgtctccaacaagaggcagtgtgttagagttgaaaacggggaagctggggatgccaccgtagcagaggtggaaccaaacaacggcggcggcggcgggggcggggaccgctgaacagtgaacagcaccaccacgtttgtcgctaactcgctattttcacaacagcatcggtattggatttttgagcgttgtctctggcatttttcatgtattttagggctagtttggcaaattcatttttccaagtgattccgattttcctaaggtaaaatgaactaatttccttggaaaaatgaaaaaaaaaatcactagtaaaaatgggattgccaaactgtcctttattagacaatttctgccgtactctactcggaactgaataactgaccagcttagttaaagttaaagcaggccaatgaatcgagcaatggtgacaggaactgatgaacagcgaagctcacgtttgtttctctttcgtatatgacagcattagtttttgttttccttttttcagcgttttctctggtatttatgtattttaaacaatttatgttgtgtatttggaactggcgatcttgttgctgtcattttactatag

SEQ ID NO: 25644 - DNA, 2305 bp, Zea Mays
ttacatggtcctatgcattattgcatatttacattggacaattgtatttatatggaatatccttgatgcatcattctgaagggcaggccttgtgcagtggtgagagctgtctcactgagtcaccaggtcgcagattcacagcagtctctccacatttgcggggaaagattgacttggtttatttttccctagatcccacttgtgggagtctccaacactgggtttctggaaggttgtttaatagcgatgcaatgcctcgaagaagtcaaagacttaaagatacaacaacaaattcaaatacatctcaaattggaggaaatggaacagatcatttgtcaggtaaattgcgagtaaactcgtccacacaatcaaaattgtgttcaacagccatacgttctgtgcaagttaggaaaggaaaaccacgggctacagaaaattttgatgaagacaatatgtcaggaacttcatcttctgtaagtacagctgatggaagatcctttgagcaagatagagctgaacgaattctgttgcaagactccaaagtggcacttggtattagggagctattgggacttttccgaacactgggggaaggttttaggctttcttgcttgtttaagtgccaggaagcactggaagtctacagaaaactccctgagtcgcagtttaacactggatgggttctatgccaggttggtaaggcatattttgaattagttgattatttggaagctgatcattattttgagctggcacaccgactatcgccttgtacgcttgatggaatggacatctattctactgttctttatcatctgaatgaggaaatgagactaagctaccttgctcaagagcttatttccattgatcgactatctcctcaagcatggtgtgcagtgggcaattgctttgccttgagaaaagatcatgagactgctttgaagaattttcaacgttcggtacagcttgactcaagatttgcatatgctcacactctatgtggtcatgagtattctgcactggaggattatgagaatagtatcaaattctacagatgtgcactgcaggtagatgaaaggcactacaatgcttggtatggccttggggtggtgtatcttcgccaggaaaagtttgagtttgctgagcatcatttcagaagggcatttcagataaatcctcgctcttctgttctcatgtgctatcttgggatggccttgcattctcttaaggttgatatcattgatcgacaacaatagactactccctctgattccaaatatagaggaatgaagaggcactggaaatgatggagaaagctatagcagctgataagaagaatccactgcccaagtatcagaagtccttaatccttctaggactaatgaagtatgaagaagctctggatgagttggagcggctaaaggagattgcaccccatgagagtagtatgtatgcactgatgggaaagatttacaagcaactcaatattcttgacaaagctgttttctgcttcggcattgccctggatttgaaaccacctgctgctgatcttgctataattaagtccgcaatggagaaagtacatctccctgatgaactgatggaggatgacctataagttcactcaagcatcgtgagaaatgaacatttacttcgggttcatgatgacccgcctgtgcttcgtgttcctggcctagtggcctgcttgggcttctcaagtggaactcggaagtcggagctgtaccattagccatccagtttggaatgaaaagaaaaaaaaattaaccatccagttttgtagatttagttttagcctgtaatcagagaacacatgcgcagaagctgcggtagtttaggactctgtacaagtgttggcgaaatgacgcctgtaccattatcaaataacggaaataattaaaggatgaggatccagctgattcaagcagattgtttgtcgcatctacaaaccttttaaaggtgtcacattcaaaggttgaaaacatttcagcccaagtaaatcgatttgaagaagagcggaggaaaagaggatgcttccgcgagtcagcctcctactaactactggcttggaggtgggggataaagctaggctcttcatgcaagcaaagtgtaaccatccgttttcttgctagtagcctgtatcattgctgcatatcctggcatcattaagaaaccatccaaaggagagtgtcagtgatgagcaatttctggaaaagttttactttgcattatgcgatgtgatatatatattttatttacatggtatgttgcatgggcttgagataat

SEQ ID NO: 25645 - DNA, 1241 bp, Zea Mays
ctcggtggtgccgccataacatatgcccgtcgctccccctccccttcgtttctctttccctccgcttccgctcccgtccttcctcccctcaccgggacccccagacagcgcgcgccggcgcaatgcggtgggacgcgtcggaagcagaggtagcccttgagcggatctgggaactccatgaccgcctcagcgacgccatcctcgccgcctcccgcgcgcacctcttcctgctcgctccccagcctcctcccgtgccgtccgcgccacccgtcaaaggggcccaccgagtcagcggcggtaggaacggctgcgtcttcgtcaagggcggaggagaggcgctggccgccgccgcggagtccgtgtccgaggtcaggagcctgcacgccatccgctctgcgctcgaggacgtcgaggaccacctcgagtttttacacactgttcaatcacgacatcaggcagagcgagattctgcaattgctagactggagcaaagccgtctagtccttgctacgaggttagcagaacatcaagggaagaagcatagaatcatcgatgaggtcttggcatttgttggtgaagtgagtgacaagagtcaatttatctcatttgaagatgtttgtgctacccatagccgatcagaggatgatgcagaggacaacaggggcaacggttcaaggattatgtcaaacatgttatctagcagtttgtctttagccaagaattcatttcgactggacaagattggtggtgctctcggtaacgctgcaatgtttgcagtaagtgtgcttgctttcttccagctgcatcaaattacatttggaagtaaaactccagccatggaatacaggaagagaatcgagtacagtattcaaccaaggagctcacaatcgaatgggaaaggaaaacttctggaggtttacctagcaagaggctgaagaattattagatcattctgtttggctgtacagagttttaaccaaagttcgtttttgtcggttttattagggcgctgatcattctttacaatggactggaccctgttccaggcaattagggaacttactgtctgattcttataaatagagtttgaagggaattgcgtattctatctcaaattgtgaatggctttgtgcttagagatggtcagatggattgtttgtaaaccatgttcaagctaacttgaactgccgttatgcactactttcttgccagttttgatcatattcattctacgaaagaca

SEQ ID NO: 25646 - DNA, 3591 bp, Zea Mays
tgatgtccaatactgctatagtagcttctccaagttatgacactgttaggaagatggttcaacttctctcgaaatgaagcttctgtcttcctatgtatagacaagttgttcagttaggaggtctagattctcttaaaatggtgctatctacgagttaggaggtctaggagcacactgaatgttttagaggttgatgaaatcgttgttttcctaaaaaagcattttttctgctttgtttgaaattgtttgggttttcctccccaactttcataattacctatttctattgtatgtttgatcatttggacttctactccatccacaattttggtttattcagtgaggaactatgtttttaaccactctatagtttgtatagacatgcaacattcatctcagggtcaagaaagaagctcaacttggcatgcttcctgtttaaagcaaggagctactgacaatggaaagcaacgattagagtaacttgatgagtgaggactattcattcagttgcttcgatcaataagtgaactaatggatgcatgtttcttttgataagtgagctaactactttagtcacaaagttcgtgttgatttctaaacatggtatgatggttttgtcatcctattcgattgagtttgggaaaaagcctgcacattctgaaaacaaacagactgcacattgtgtggctgataaggttgagtgggtaaataagatcaaagctattatttagacatactgaaaatatagtgaaggaagcgtaagcaatttttctgctatatttatgcattgtatccttgtaaaattatcaatattgttctgacttgtggggaaaggtatgagagtattcatttttttgcctcttttctgtttgcattccttcttcagtataatgtttgttagaataaccaggtgaatttacaaatttcatatccatatactttcttcgatgacaaatataaatctacctaggtttgtcataactcataggtcaatcattctaacttcaattgacattttttataaaaagtatcataaggaaaataatatattatcataaaagtgacgtccatctatatcaaattttagatattgatggtggtcagagttaaaaaacagtttgccttaagacaaaccaagatgaacttgtatttacaatcgaaggaaatattgcacattgcctagacatttaatttattagataaattcttttgttagttgttcaactttgtacgtcttataagtcacaggaacaatgtttatctagaacttcggtctcaaattatacagtagtgttcagccatacctgccatgtcacaagaaagagagataaaaagtatttaatagtagacctaatgatgctcatttgtaattgtagatattcgtatatcctttttctgcaaccttgtgaaacatgtgatggtttgacttggaacaaactttgggtctgatatagtaaaatgcaatgtatgtggagggaagtagtagaacaagacagaacaagtgccaaataaggttatatagtagaatacaatgtgtggagggaaatagtagaacaacacaaaacaagtgccaaataaggttacaaggtttatagtagcgattgcttagctgctacaacgacactcatagattagcctggcatttgcaatgtcgctcttgtatttgccataacctcacttaaggtcacacattgcctctgggaccttgacctccgctactgttgtcgcctggccgcgtcgacttcaccaatgccggggtgtccaacctcatcagcttcaccgtcgtcgactgctcccacacaaccgagctgtgggtcctggtaccggtcgcgccccgcctctgctccttctgcttcagcgagtggcagactatcgatacactcgatttcaattgttttttacgctatttactgtattgcaatgggacaatggatgattaggatttgttttttaagactggcccatgatttatcgtcgtatactatttctttaatagattgttcgctacatctactgatctacatgttcacatgtttcaacttctgtcagcatccgtagttactatatgaatgctcattctgtgtcaccttttaagtttacaaatgctcttttccaggtcacatatggaaagtgaagaacccaaatgatttcttcacaggaaggtgcttacatcttgcttccatgcctcggtagtttcggtcactattagttttgctatgcctttcctacataaataattttgctacctcaaaatgcttctaaatatgatgatttatgctggagactgctaaccttcacacatctaataagatgaagcaacaagctagaaaatgtggaatttgtcatatgtccggatgcaaaacgggtaacttcatgctttccacaatgtgtgtcgacatgatgcttgtagagatggttcgttcctttggttccatgctgacatattcctttctgtgttatcctaagatagccacattattttgatgatatgaggatgattcaaattgattggttgttttttctaatttagcttggaccaatcttcaactcatggggcgcttcatcctcggcctcctacgcatgcacttctcctgcttctcctgctggtcatcgcccaagtgtgtcagatgtgccgtaacagatgactccaaaatggattgcatgctcttcaaatagctacagataactatcttcacataaaatggagagtacaatgtttataaaagaaggaatatggataaggatccagattctcctatagcatatgaagaggcaaaggaaatggcaagccaaagctgcacaatttctgatgatcactcgttgttactgttatccattatctcctcagaggcattgcttttaaattcaacagcagacatggcagcctttcaagatttggcacattgacataatgacatgggttggtcacggattggatgtcaattttgctccctgtaccttgtagattatcggttatgtcaattttcgaaatttctatcgtgatggataacatttgaataaaacatagttaaataaacatgactactgtttcagtctttcgaaattctgatgctatagtgtcagtatactatgtcattttagggaaaatatatgtcatgtttattttgataaaattatatgatttctcactcaattcttgtcggtggcttcaggatttgttattttgtatatcgatctgtgtcatttgacaaagtactttgacttggtataatatgagtgttacttcgaccaaaagagcttggtaaagtgtgagaaactccgcaaacttcttctgcagacgatgactagcaacagttatgacgagggtcaagatagccgccatacatgatacattgagtacaacatcaagataaacactccctccccacacacaacttttgccttccgttcactctgtatgttgtgtttattacggttgcatatgttgtgtttattatggcatcaacacgttccattagaaaatataactattgtttgtcaagtacaaaatcataatcacatcagcttgtaataatattgcatcactgttttgtaccaaattgtaagttgttgtagcaacgcacgggcacc

SEQ ID NO: 25647 - DNA, 2474 bp, Zea Mays
aggatccatcggttcgtgagagcgttgctccgtgtagctacaattaaggaaccgtcgccgccgcgcgcccctgccctcgccgccgcccggtctcgcctcgacgcctcccatagcgatctgcttactcttttaagccggtggccggagctccggcggccctctccctcaccggattcggcgccctcttcagaggattcggcgccctcttcagagccctcgctaacctgctcgaccgctccccaccgcccgcggtcatctcccacctcgcgcgaccgccgtcctctcttcacctgttggtcgcccctgtcctcgcgacgaagacgccgccgccaagctatcctctctatctctctatctatctatctatctcatcagattgatatcagctgatcatccctggctgtgtagttccatctgcaatggtttactgcactcattgcgctgattactgcccctccataaaggatcctgacaaaggatacatatgttgtggtacatgtgggaaggttcttgaccaggaggtatacactgatgagcctacttttgttaaggataacaaagggcagagtcgcttagctggaagtattcttgaaagcattgagtctggatattcaatgtctcgtcaaagaaccttagacaaagggagggatgagattaggcagattgtcaataacttacatatcagcggtggagaaactatcgttagcaaggcatttcgcttctacgagctagctctcgaccgtaattttaccagggggcgtagaacaacacatgttgcagctgcttgcctttacattgcctgcaggcaaagtaagaaggcttatcttcttatcgatttctctgaccatctccaaataagtgtctacgtcctaggtgctgtttttcttcagctctgccaagttttgcaacttgcagaacatccagttgttcagaaacttgtagatcccagtcttttcatccatcgttttacaaaacttttgctgggaagaagaaataatgatgtctcggacacagctttacgcattgtagctagcatgaagagagattggatgcagactgggaggaagccaagcggattatgtggtgcagcattatacattgctgcactctctcatgggtgtaattacaccaaggcagatattgtctctgttgtgcatgtgtgtgaggccactctaacgaagcgattgatagagttcgaaaatacagattctggcagcttaacactgatgaatctaatgaagagcctgtttcaaaacattcgcccaagtctggagaaattctctgcaaacacaaggataaaggttttgagcattttgctcatggactttgtgaaaaatgctacaataagttcactaaactgtcgggtggactagaaggtggttctgaccctccagcattccaacgagctgaaaagaaaagacttgaagctgctaaaagggctgaagaagctgcagcagctaaggaggcagcgctggaagaatctctttgcgacacacagaattctgaggttgagagtgccatgactcctagaaagggtttaagtggagataaatcttcgaaaatgggatctgagggactcataaatgactctatgccacccaaggatcctgaagagggaggtgaaaattgtgaaggcaatgcagatccagaaagcctttctgacattgacgatgcagaggttgatgggtaccttcacaatgaggaagaaacacaatataaaaagattatctgggaggaaatgaacaaagagtaccttgaggaacaagcagccaaggaagctttggcagctgaattggcagctagagggattgatccagaagcgggaaagaaaaaacgaaaacgtaatgaaggcacgaagagctcgacacctgctgaaacaccagcagaagccacgtgcaacatgctgaaacggaagggacttggttcaaagatcaatgtgggagctgttgacgaattgtacaagactaaagatgaagttggcagcgcaaacaatgaagaagagatggagttcgacgcactgtttgggccggacaatgctgccggtgagacggtcgatgacggttacaattacaactatgggggatacgacgacgatggcgcagaaggctacaatggccttgatgacgatttcgatttctaggatgtaggagtagggcatttgcagaacggcaacgctgaccagcacgggcaagattcttcacgtgcacattatatatagttttttttggttaagtttcgacgattattatggagctcgattgggtagtcattgtatatttatgtttgaaactaggttctgcctggttgtagttgtaacggactaataagggcccgtttggtacagcttcagctcctgattctaagcgaggatctggaggagccgtgccaaacggatattttttaaactgattctcgtgtggagccgaaagattgagagtcgtttttgtgaagaaaggtgggatctaaaaaaaact

SEQ ID NO: 25648 - DNA, 304 bp, Zea Mays
ggaacaccccctgcgtccctttcctcccctgaactaacctcttgcgcgggcgaacaccgaaaccaaatcgccagtcgtgtctagggcggtcaaagcacgccaccgtcgaccgcgtgctacgctgtagccatgacctggggataccgcccaggaggttcgccttgttgtgtcgcgcgtgcgcgaccaccttgggagggcggaaaccagccgttcgttcctcaattgctcgccgacgccaaggatccctgggctttccgtcgtgcgtcgtggtcgggtcgtctgagtgcataatccgcggtatagc

SEQ ID NO: 25649 - DNA, 2045 bp, Zea Mays
atcgtcctcgttgcgtacctaacgcccgcctaatcgcggcagtaaacaaagacgggtgcgggacgggcgcacaggtccgggcgcgctgcgctgtcgccatcgatcgcacgcggcacccgttgtgttgttggaatctcgcgcgcgggggcacaggcaccagcagctttgcttccattggaagcgcaaatgtctgctccatcctccgcctcatcgccccctgcacggtcacggattactggtttcttattgccaccagatcgaaaaggggggaggaattaaattgtggagtcgggtgcgcgggctctataaatacgactcagatctgagaggccttctcctcgtccgccccagtctaatccgattcaaaccgcccgttccccgtgtccgtgccaagcaagccgagcccaacccccaagagccagctgctcggtgctccacgcgatggcgcagaaggagactaatggcagcaacggcgatcacatctccacccgcccgccgccgaccccctcgcccctccgcttctccaagttctttcaggctaacctgcggatcctggtcactggtggggcgggcttcatcggctcgcacctcgtagacaagctcatggagaacgagaagcacgaggtcattgttgctgataactttttcactggttcaaaagacaacctgaagaagtggattggccacccaagatttgagctcatccgtcatgatgtcaccgagccgcttcttgtggaagttgaccaaatctatcaccttgcttgccctgcttcaccaatcttctacaagcacaaccctgttaagaccatcaagacaaatgttattggtaccctgaacatgctaggacttgcaaagagagttggagctaggattttgttgacatcaacctctgaagtttatggtgatccacttgagcatcctcaaactgaggcctactggggcaatgttaacccgattggtgttaggagttgttatgatgagggtaagcgtgtagcagagacgctgatgttcgactatcacaggcagcatggcattgaaatccggattgccaggattttcaacacctatgggcctaggatgaacattgatgatggccgtgttgttagcaacttcattgctcaggctgtgcgcggtgagcccctgactgtccagaggccaggaacacagactaggagtttctgctatgttgccgatatggttgatggtcttattaagctgatgaatggaaacaagactggaccgattaacttggggaacccaggtgaattcaccatgctggaacttgctgagaatgtgaaggagttgatcaacccagatgtgacagtgacgatgaccgagaacactcctgatgatccccgccagaggaagccggacatcacaaaggcgaaggaagttctgggatgggagcccaagatcgtcctgcgggacggcttggtgctcatggaggatgatttccgggagcgcctgaccgtgcccaagaaaaccaaggcctaaattgccctgcagttggggaagaatatccacacggggaagcatactcatagtcgggctcgtcattatttgtggccacatttcattacggaatttgagttccaataaacttaatattcctttgtcgttcaccttgaaggattgtattattagaattttcatacagggctggccattcgagtctctgcctacgcagatcttgtggtacttgtgtttgtagccaatgtgtgagtaaaagtcgattatagcaatgttgatgccattttgggcttattgttcgctcctttttgctgcttgagctgagacaagtctcgatccaatgagagcggtactgactgtgtggaggcgccatttcccatttggtatcgatcggtctggtcctaataatggcctgtcgacctgctgaccgatcgggcgttggatggttggtaccagcatgaaccgttaccagtcagatttaaccacgtggattgttcatacatgtgtcacgttagctgtctgtttccaaaccatttgaagtctaaaagattcaaagaaaataaaaaaactaaaaa

SEQ ID NO: 25650 - DNA, 2036 bp, Zea Mays
gcgtcctacccgggccgctgcctccaccaaaaagcgtaaccgcacaaattccaccgatccccctcgccccggtcaaatcctctagcctccctgtgcccggcggcgagccccatggatccttccgtcgcccggcggcaggaggcggagcggtttatgaacatcgccgagaagctcctgatggcgcgggacctcgagggctgcaagcagttcgtcgcccaagccctttccttcgacccccgcaccccgggcgccgacgacctcctcgccgccgccgatgccctcctcgcggcccagcgtcggcgcctcccgtccgggcccctcgacccctacgccgtccttggcctcgactccgccgtcccggcctcccgcgaccccgacgtcgtgcattcccattaccgccgcctctccctcttgctcaaccgctcccaccccgaccgtccctgctccctcgccttcgccgaagccgcccgcctcgtcgccgacgcttgggccttcctgtcagatcccctccgcaaagcctccctcgactccgacctcgacgccgccgccgctgcaactaacgcagcggcagccgccgccgccgccgccgccgctcgtgtacccatcgatccccatccagagaagcagaatcagctgcagtcacagcctcctccgccgccgccacttgctccgcagccaatgcagactgtgtcaggcacgccgccaccaaagcgcgggcggccgccgcgggctgccaaaacgccggcgacgccgcctgctccgcagaccgtttcgggcacgtcgccaacaaagcgcggccggccgccgcgggctgccaaacaatcgcctgaggttgaacggaaccaggagggggaagctcaacaggcgccagtcttctggacagcttgtccctcctgctgccatttacaccagtacgaccactcctacgagtcgcaaacgctgctttgccctagctgccgccggccgtttgttgccactgcaatgtccacgcagccgcccatcgtgccaggcacagacatgtattactgctcctgggggttcttcccaatgggtttccctggtggtcctgcattcgctgaaccactcaattccccgcagcagcaggcacctgctgctctaggattttatccaatggggccatacttgccattaccaagcctaagtggcattgtggaaggggaaggcaataaggcagttgatgctggcactggcattcctgtcatcccaacagtggcagcaccagcatcagcatcatcgccagcgccgacagcggcaacaccagtggagttcttacatgtgaaggttggggcaaagaagcgagggcggcccaaaggcagcaagaacaaaaaagctgtggttgaggtaaattagggctatggaatgacacatgtgaaggttggggcaaagaagcgaggatgccctgactgcctgaaggcagcaagaacaagaaagtggtgattgagatcgattagggctatggcatgctgatcgctgcatcattcgacatctgcatcagttgtaaactacattgtgtatgtgtatgtgtatggttcttttcttgcttgcagatgacttgggcactggcaaaggaagagcattttctgctggaggtgatgttgctgcagttgtctgatgtatacataaagttgcactggatgcctccgaggttggaacaagtgcatgacgaagctgttgtagaatatttctccagaattgatgacccacagtgggaagatttggacctacctgccagacgttcccatggaagaaccatcgagtccaagctctgattgaaggtcacgggagaagggtggaacactggaacggagcctcggtagtggtcagtcagaataacacattacacacatcatctcgagtttgaagagtctgcagactgtttgatagaataaacatgaatgtttcatataggtcaaacttttatcacagaagaaactctttcctgtttatacgtgggagtcatatccattttaaaataattataaagaataaaatggaaacaaaaaaagtactggaaa

SEQ ID NO: 25651 - DNA, 4718 bp, Zea Mays
ccccatcctggggctccacggccctggctcgatttgctgtgagggtggttgctccgagctcttagccatccgtcgccgctgtagcccactgctgcgggggtgctcgcggctgccgctggtgtcggagactagggttttgggtctgccaggcggaggagggtgcattggttggcgtgcgcatggggatggtgcccaacgggctcctgcccagtgcgtccgccagggtgacgcggcgactggaccccgagcgctgggcggttgctgagggccgcacggcggagttgatcgcgcgcatccagcccaacgcgtactccgaggggcgaaggctggccgtgtaccactacgtgcagcggctcatcatgaactgcctctcctgccaggtttttacctttgggtcagtccctctcaagacttacttacctgatggtgacattgatgtcactgcttttagtaatagtgaagaactaaaggagatttgggcaaatcttgtccgggatgcattggagcgcgaagagaagaatgaaaatgctgaatttcatgtaaaggaagtccaatatattcaggcagaggtcaagattataaagtgtcttgtggaaaacattgttgttgacatctcatttaatcaagttggtggactatgcacactatgttttcttgaagagattgacaacttgatcagcgaaaatcatttattcaagaggagtatcatattaataaaggcatggtgtttctatgagagtcgtattcttggagctcaccatggtcttatatctacttacgcattggagacgcttgttctgtacatatttcatatattcaacaactctttcaccgggcctcttgaggtgttgtaccgcttcttagaatttttcagcaactttgattgggagaaattttgtttgagcttgtggggcccagttcctattagttcacttccagatatgactgcggaacccccacggattgacagtggtgaattgttgctgaacaagtccttcttggatacctgtagttctgcatatggagttgtgcctcacacccaggagaaccacagtcaaccatttatttcaaagcactttaatgttattgatcctttacgtacaaacaacaatcttggaagaagtgtcagtaaaggaaatttctttagaatacgcagtgcttttgcgtatggggcaaaaagacttggaaaattacttgaatgtccaaaagaagatttaattggtgaattaaaccagttcttcacaaatacatggataagacatgggagtggcagtcgtcctgatgtgcctaccccaagtatagttgatgtgcggcctctgaaggttgttccttctgtagtttcaagcagccagagaagtgtaacatcattcaagaaaaaggctgaaaatcctaagctccatgctactcaggataatcttcgtctgaatcaagataatctcactgaagatggtcacatttatactgacccttctcagccaattcacaaaagtgacatacattatcgtaatctaccaagagcagttaatccatctgtttctcatgttcagcaccaaaaaagttacacagcacaaggcagtgctaaggtctctgaacagcttgaaagaaataattcagctggattgatgcaaagtgaaagggataagagagtgccaaatggtctctttgtcaatgacagaaatgggcagaacaggtctagatttgcaagaacccgatcaagtcctgaactcacagactcttctgcagaaggatttcgtggcaggcggactaatgcagttggtatggaaaaatctttgggtgttgattacagcagcagaagaaacatcctggttccagaaatgtctagcaaccacagcactaagtcttcacaggatgaatcagtgtcttccttgaactgtttatctcaccctagtgcagcagcttcggactcaaatagtgtttcaagcagctatcgtgatgataatggttttgtaatgaatgaagaactcccttctgtttctgaatcgtcggatatgcaccatgacgaacaagttctggttaatttaatggaatccgtgaagttgcatggattcaatggacagattcaattgccaatgcaaataccttctcatatgtctgtagcgcatcccccactgttggctccaacatctttttcacaaaagcatttgaccggggttccaccagctaacttaattgggacaccatggttacccaatatgcagttcctccatggatttgttccacctcctatggcccattacatacacaatccaaattttgcaccaaacattgaggatggtactgagactgaaaagcctaatacatcagatgtgaatcatgatgctggcaaaacctggcatgagtatggtgttgggttttctggacagttcgatcctgaagcaagagatcctcacatctatgatattgatggcaaagaacatttgtctttgcctaatggtgtagcaggtgctcccttggaaaggcagatgaaatttacagttgagaataatggtgtagatgatgaaacctatactggcatgttccaaaatcatacaagtagagaagctgctgtagattactctaagaggagtggctatgtaaatgttccttcttcacatgccagttcatccaaaggcaaaactctggattcgagtccatgggatgaaatgactgcacatacaacaagaccaccaagagaaaaatggggaaaaagatctgcctttgcagcacctgccacgaccacacatgtcaagactgggtggcagatgggaaataccactgagcatctctcgaccgaagttaatgatggccccagaaatgggacagtggtaccaatcattactgaagcttctgagatagtaacagggtctgattctttttcaacacaatcaagaactagtcaagtaccaaatgattttgatccatcacaaattggcatgcctaatccagtgtttgcaccttttcttattggatccccacagcataggcaagctgatagctctggacttacttttgttccaacaggtccaccagttccttttgttgtgctcccgtttgtctcagggaatagcgatggttctggtccccagtttgagagaagcgaaggaattgatcagcttcctgccaatactgtaggtcatttcgttggctcacttcatgatgttcaccaacaagattccagtgctacctcaacagtatcatccagtactatgactgagccatctggtgatcacaagcctgacatcttgaatagtgattttgtcagtcattggcacaatttgcagtatgggcgactctgccagaatcctcgtcccatgggtcctgttttataccctgttccggtgccgccaatgtatttacatggccatgctacatgggatggtcctggaagaccagctgcaccaaatgttaactggacacaaatggtgggcggtcaacgagtatttcctgttatgcctgtacaacctgctacagaaagaaccggtgttcttcagcactatagtgaagatacaccaagataccgtggaggcacaggaacctacttgccaaatcctaaggttcattttagggaccgacactcaaattcaagaaactacagaggaggttataatggtgacaggggtgactatagtgataaggagggaagctgggtaaactcaaaacagcgaaatctgaaccgcggctatggacgtagtcagtcagagaggtccagcatgaggtctgatagacagactactgatgagagccagtctgatagacaaaggcgaacttatagaactgactcgtaccggcatgaggcaagttctcagtatcttgtgcagggccaaccttttggatccacaagttctatgcgcaaacaaggaaacacatcacatggggtttatacaccaccatctacgtcttcaaatggtcccagtgctttatctggccctccaggaccaccattttttatggtgtactcttatgaacaaggctcaaatcatggtgctactgctacctcatctgaaccaattgaatttggatctcttgggccacttcctgcagcagatggtgatgacataccaaggtcgacacgccaaataatggctaatgggttttatgggcaaagacgtggtccatataggggcggttcctctcattcgtctcctgatcaaccatcctcacctcagcctcgtcggtagttgagtcttcatatgatggcttgatcacttggtttctgtcattgaaaccttgcgatagcaatattttggttcacccctcgtgatcatattctgcatgggtgaagatggttgggccatcagcagccacaaaaaaaaaaacacaagtatatgccctagttggttcttggtgctttgtgatctctcagaagcactgaattgtgaataccgtcaaaagcaattatcggcaggttattttaccagtcacaatggtgcttcttggattcaaaacaattatcttcagaagaaatcatggaaccatcaaacccagaatatcttcacacagaaatcagaattgaatagaagattatgagcaaggacgaactctgctctggccgtctcattatatgaattgtgtcaagggtaataacaatattagtatggatggagcaggaacaagcattgtggcgctgcatcagaaacaatctggaatgctttgggttttaatgtgtctgggcgtgcgactgaatgtgcgctgtgtgttgggatgtccgcatgtttctc

SEQ ID NO: 25652 - DNA, 2178 bp, Zea Mays
ccgcttccagaaccagtggagtcacccgcccccgccctagctcacacgccaagccccagtacaaacaaagcctacggaatttcccccagctccaattcgcgctgttcgttccctttcagccagaggccgcggcgaccatgggcaactgctgcgccgcgccgtcgacggagggaagcggcaagacccgccccaagaagcagaaggagaacccctacaacgtcgcctacaaccgcggcgcggcggcgccgccgccgcccccggcgcgcccgggcctggtggtgctgcgggacccgacggggcgggacctcggcgcggagtacgagctgggcggcgagctggggcgcggcgagttcggcgtcacgtacctgtgcacggagcccgccacgggggcgcgctacgcgtgcaagtccatatccaagcgcaagctgcgcacgcccgtggacgtggaggacgtgcgccgggaggtggacatcatgcgccacatgccgccgcaccccaacatcgtcagcctccgcgccgcctacgaggaccgagacgccgtgcacctcgtcatggagctctgcgagggaggggagctcttcgacaggatcgtcgcccgcgggcactacaccgagcgcgccgccgccgccgtcatgcgaaccatcgttgaggtcgtccagaagtgccacaggcatggcgtcatgcaccgggatcttaaaccagagaactttttatatgcaagcaaggacagttcccctctaaaagcaattgattttggcctgtctgtgttcttcaggcctggtgagcgatttacggaaattgtaggcagtccatactacatggccccagaggttctgaagcgaaactatggccctgaagttgatgtctggagtgctggagtgatactttacatacttctttgtggtgtaccaccattttgggcagaaaccgaacagggagtagcgcaggcaatcatacgatctgtggtagatttcaaaagagaaccatggcccagagtatctgagcctgctaaagatcttgtcaggcgcatgcttgacccaaatccattgacacggtttactgcagcacaagtacttgagcatccatggctacatgactctaaaaacacgccagacgtttctcttggcgatactgtccgagcaagactgcagcaatttgctgcgatgaacaagttaaagaagaaagcactaagggtgattgctgagcatctgtctgcggaggaagtagctgacataaagcaaatgttcgataagatggacgtgaacaagaacggcaagctaacattcgaggaattcaaggccggcctccgtaagctgggaaaccaaatgcatgattcagaccttcagatactgatggatgctgccgacgtcgacagaaacgggaccttagattacgaggaattcgtcacggtgtctgtccacgtgaggaagataggcaacgacgaacacatccagaaggccttcgcatacttcgaccggaataagagtgggtacatagagatcgaggagcttagagaggcactggctgatgaactggatggcagtgatgaagacatcatcggtggcatcatccgggacgtggacacagataaggacgggaagataggctacgacgagttcgcggcgatgatgaaggccggcactgactggaggaaggcctcccggcagtactcgcggcagcggttcagcaacctgagcctgaagctccagaaggacgggtccctcggcgccgacacacggtaggccgccgagtgtagtggtggtgctggtgttcgtccgtctctttgcttgcttgcttgttttgctgtgcggggtttttgttggttggtcagacagtcagtcaggtcattagattccacctccacgttctgtttccattacacggtgaaccctcagctggagctgtgattcttgggcttgtgattgtagaagaaagatgcacgtacaacgtacgtattgtagatgggtgcagcagcgtgtgctgacaaagaatgctggagtagcacaagacacgagtagtcttgctttgcttgtaacttgtaagtagaatttgttttgtgtgcttgcaatgcatgacgatggtgattgccctgcaaaaccgtgtgaatgcctgcacgcaagctgctcgcgtcgcgaccctcgctcttgctggctgtaaagaaggacggtgtggttttag

SEQ ID NO: 25653 - DNA, 2046 bp, Zea Mays
taccactacgcggacatccggtcgtcgtcgtccgccagacgctttaaaacggtttctgctattctgggctttctgtgggttttcgcagcatgggcgtatgctgaggttctcttccataggaagaatactgcttctattaaaactagacattcagatgtcaatctagcagtgatggatgacagttcagtcaaagcagaagaccagacaatgttattggaggagggtggtcaagcaatggctgcaaagccagcttatacttccctcacatcacaaatactcagacttatattcatggaccagttgcttcttctggagaatcgtttaacactgagggcattatctgaatttggaggttatctactttatttttacatatgtgatcgtacaaacttgcttggagagtctgccaagaattacagccgagatctgttccttttcctctactttcttcttatcattgtagcagctatgacttcctttaaggtccatcaagacaagtcatcattcacaggaaaatctgtactgtacttgaataggcatcaaactgaagaatggaagggttggatgcaggtgctattcttgatgtaccattacttcaatgctaaagaaatctacaatgcaatccgtgtgttcatcgctgcatatgtctggatgactggatttggcaatttctcttattattatgtgaggaaggatttcagtcttggaagatttgctcagatgatgtggcgcctcaatttctttgttatattctgctgcattgtcctgaacaatgattatacactctattatatttgtcctatgcacacccttttcaccctcatggtttatggtgctcttggaattctaaacaaatacaacgagattagatcagtgatggcaatgaaatttgttgcttgcttcttggtagttgtcctggtttgggaagttccaggtgtctttgacatagtatggagcccattcacattccttctaggctataccgatccttctaaaccagatcttccccggttgcatgaatggcaatttcgatctggactggatcgctacatttggatcgtggggatgatatatgcatattaccatccaactgttgagaagtggttggagaagctggaagaaactgaaatgagaaccaaactctatattaagacctcaatagttacagtgtcaatgatggctggttatttgtggtatgaatacatttataagctggataagattacttacaacaagttgcatccatatacatcctggatccccataactgtctacatatgtctacgcaacttcactcaagaattcaggggcttctccctcacactatttgcctggcttggaaagattacactagaaacatacatatctcagttccatatctggctcagatcaagtgtgcccaatggccaaccaaaatggctattgtcaataatcccaaattatccactgctcaatttcatgctgactactgctatatatgttgcggtttcccataggctcttcgaattgactaataccttgaagatggtatttgtaccaaatcgtgacaacaagcgcctctcatacaattttgtggcaggaacagccatttctgctgccctgtactttgtatcgtttgttctaattggcattgcaggatactaggaagtctagttattgcctttttctttgttcgattagttacaacaaggcctgatctactgatcaaatttaaggcgacacagcacgcagccacgcactgctaaggaacctgcaatttcattcactggagtcaggttttatctgggtttcatggtgaagaaaaaaaattgctgtgcaaggcagaagatctcgaagagtgtaacatatgagtgaaccccaatcccaagaggggatatgataaaaatatctctgtataggcgttggaacacataccgacttaccgagtggtcacgtcgtctgtgaaaatcagattttgttccttgttttgtttaaaagcttgaaatagacagaattgttccttttttttgtttaaagcgtaaaatagacataatggtctcatgcgtt

SEQ ID NO: 25654 - DNA, 734 bp, Zea Mays
aaacagggcctcacacgatatcatcaccgggactgcggcgatgtcgtcggccgccgcctcctcctctcccgccgccggtagcgaaggaagcggtggtgcggtggaagggcgggagatcgcgtacgtgagctacggaggggagcatcacctgccgctggtaatgtcgctggtcgacgaggagctcagcgagccctactccatcttcacataccgctacttcgtgtacctctggccgcagctcaccttcctgcaactgagctagttactagatcaattcgggtgatgatggagtctggctgtgaggaggtgacacttgaagcagaagttactaacaagggtgcccttgctctctatggtcgcctggggtttatccgagcaaaaagactgtacaggtactatttgaatggtgtagacgcttttcggctgaaacttctgtttccacgccctgatcctggcctgcctccaatgatggttggcaatgacagggatgaccagaagatggattctccctacttgtgacagtaccctaatcagtatgtagaattgagttggagaccctgatcattcttttttgctctgtttcatgcttttatagctagcatgtaactgcatattgttgtactaacatataaattttcgaggtgttttatttcctcctgttctttgataaggatgtattaatcaacttcagatcaaacaataagaccgtgcagttcttttgctcaataaacaaa

SEQ ID NO: 25655 - DNA, 3785 bp, Zea Mays
agtccatggcaggccagtcctcaagcctccacctcgacctacggcctgctgctgtctgttgggccgaacgggaggcacgaggcggagagcggagaggcgttccgttccatccaagctgatggcaacgagttctccagggcggcggcgcacgggcacctcctgcctaccagaaggcctccgcaccgagctcttctcatcgccaccatcaccagaaggcttccgcccctctctccagtgtctctttctctctccatcgcatggctctcgcgtgcgccactcacgcgcgccgcttcctcctcgctggcccggcgagatctttccacgcccagccctaccaggccaaggtcggcgtggtggagttcttgaacggcgtcgggaagggggtggaagcgcacgccgcgaagctggaggaggctgtgggcggcgacatgcagaggctcctcgaggcccgcacgctgcggctcaagaagcttggcatcccctgcaagcatgtaatgccctgatttctcttcatttggtacctgtagtccaactgcggcgactcccgcgtcgtgctcgtatgcgtggatgaggataaggcaggggcaagggcaaatggtctccctgtctcttctatttattttttgattttattaatcgaagaaatggcattataacgtttgtgtcaagtttgataatggtatttaggtgaagcccatccgatcgatggcaaagtagcgaatcccgtttttcataatggcagaattccaaatttctcatttttttgtcaaaggctttgctgctgttgtacatttattaggttgttgcatccactctgagttagtagattctcctcaattgttagtgaggagagccggagaggtgctgcattattttttcgttgctgacatacaaattatttctcgccatatagctaggttgcctaacatgtaggcaatttgcacgtctatagttgaacttgacatgcttttaggacaaattagtcaagtctaatatctagtgactgttttgttccaatggtatccttaggttgtattaaatcctatatctagcgagcagccatgatatctgaaaaactctgatgaaaaaactaagttaatgggatattttgcttctgactgatattttgtccgattggggttaaaaatactaaaactatagaccataattttaattgcatcctatcactttacaagttcaaggggccaacgaggttacaatattaatattggtctcctaacataatctaaactttattaaatacttaatgctgaatgaaaaatgtgataagttattgacattcgttaacgctatgagcaattcttttttgtctttaaattctccagttattttctcgaatattatttttttgctatgatatcttgagagtgcacaggacccaaatttatattcaatatgattgtaaggaatatatggatgccaataatgtgctgtaacgttgcgctgctagcctgctactttgagatgaacttccgctcatgtgtatgttcatgagttcatgaccatgaccaatctgggttttcataatgatgtttttgaagcacatgaaagtcaataacaccagtgtctaagaaatttccatgcatttttgtttcaggcactaggaacttaaacttgaattgaaatccacatcacggcatgaatgttttagaattgaaacactgaggtctaaataacatgctagccattttcattgtttttttctaactccaaggcaataagatgattgctttagtcatttcaattctagcataatgaaatacgtgtggtattccttggattattttggatgtttccaaggaaatgactatctgtactctaaagaaaggaaatgcattactttataattttgtccatgaaatttaacacctccttactgacattgccatcatttgtgagatattttcagttctgaagtaatgtgctgagcaatgtttggagcagtagcttctacagttacatgtgtacctactgaagtttcaaatttactgcacatatttagattgcgttgtttgggccctcaacatttcaattggttttggattgattggtttaggaagacatgttttaccttctaacaaaactatatatatatatatatatcttacttactgaaagtttttaggtttgccacatactgttttttaaatctaaaaatgatactattaagtcttcatctcactgggatattgtttttcatgtatattttttgtatctttaaaaaccagatagaaatgggttagaacaccttattttactacttgtaaaaacacatggtaaacagttggccacctaatgtttagccattattcgggttaaatggttgattaaatgggttaaacagtaaattaaacaggataaatggatgattaaacagaaatggtgtaccatcatgtagcgttagtatagtgttttaagagactagaccatttagactaacaataggaaaaacaggcttttaatgtcaatgtttcttcctatctatgtttaaccaaatcttgttttacttggaccctaggttaaagcaaaatccatttaacatgttgctatgtgctaatttctgtttgcaacatttactggtggattaagacatgttggatctttattgcaaacattggttcttgatttaaatattgtttaccgtttagttatgtaaatattgttttataaagcatcaatgttaagattgagaacgagcatctttactaatctaaattattaattattcccctacaatgcagaggaagttgattttgagttttgctcacaagtaccgtcttggtctctggaagcctcaagcagaacccaggaaagttgaataaaattggtttgttcttgaaagctagtctactgttggactgaggcttgtttgggacattttgaatatttccttttgtaatttaggagccacaaatctttgttctctgtctctggccatacttatttgcatccattgtgcaattttttctagaaaatttccaacttcgcgtggaataacaaaccgcaacaggtgcagccccctgtgataatctatcacttattgtctgtattgttcctttggattcttaccaacaacattgcagttgtattaatgtaatctaagcaaattgattaggttcagattctcagaaagatacattactgtgcattagagttccagtcaatttatatgtagacaagtcaaacatgttgtaatgctatggttgtttctgtggttctacactgccctttcaagatgtaattgcattaccttttttgattatgatgctttttagttgaatttcatgtggttggcagacgcaacaaagtgaacactcgagcttggaagtttgtcctggttccagtgcggaaggacaagaaggtcatgtaacagacggctgtaaaacgaaaaatgcagtgcccgtttcattttaaatatgcatcacaagttgccttgtttttcagtgagaatatcttcagtgtaccatggtaaataggggttttacattgtagatgacattatttgcactttgcagtgtttgtagagtgaagattaaggtagtgtttggttgaagagctaagtagaacggaaccgttctgtcccagttttgttgttgtttggttacaaagtaactagaacggaatgactctaattagagaatattctcctcagatccggaaccattccgctccaaaaaatcaatgggacggagccgttccgttccaatcccgctctcacagtcacgctccgttccattcactctgcaaccaaacaaaaaacagaa

SEQ ID NO: 25656 - DNA, 1694 bp, Zea Mays
ttgataataataataatagttcggtgcctttttctagcggggaggaggcaggcggcgcaatctggcaccggccatcacgttccctccggccgcttccccctccctgccctccctttccccagatccgaagccattaaaaccagcggatctcacctcggggcgcgtccgcggcatctgggcaagcgagtggtagagccagcagccatgagatggtatgcatcggtagcctcctgagggcgctggtcctgagtgcggcggcgtctgcgggcaggcgccgggggcccaggatcctgtgtggccacgaggcggatgtacgcgtgactcctcggcacggacacggctggcgcggattccgggcagtcacgggaaggatgatgctggactcctctgactgtgcctctgctgccgccgccgcggagacggggcaggtgcagccgcagcgccgcgcggtgggggccgtgcccctggcgcacgacggcggctacgccagcggcggatgggagagatggcaaactgagttgtggatactcaagttttagaggcaagagagctacgatggaagatttctatgatgtaaaactaactgaaattgatggacaagctgttagcctgtttggtgttttcgacggtcatggaggatcacgtgctgctgagtatttgagggagcacttgtttgataaccttctcaagcaccctgatttcttgacagatacaaagcttgcgataagtgaaacatatcagaaaacagatacagatttcttggaatcagaagcaagcgctttcagggatgatggttcaacagcttcaactgcacttttggtgggtgaccatttatatgttgcaaatgttggtgattctcgtgccgttatttcaaaagctggcaaagctatggcgctttcagaagatcacaaacctaacagaattgatgagcgaaagagaattgaaaatgctggtggtattgtcatttgggctggcacttggagggtgggtggtgtattggcaatgtcccgtgcatttggcaatcgtttactgaagccatatgtggtggcagaacctgaaattcaggaagaacaggtcagtggtgggctggaatgcctggttcttgctagtgatgggctttgggatgttgtggaaaatgaggaagctgttttccttgggagatcggaggacacgccagagtctgcagctaggaaattgacagagattgcttactctcgcggcagcgctgacaatatcacatgcatcgtggtccaatttcaccatgacaaaaccggatgagccgtatggctgccaatttcagttgtaccctgcttcagtctattattatcctgcaagctgggtggtgggcttctcccagatttaccctgcttcatgctattattatcctgcaagccgggcggtggggtttctcagatctatcgctcatgtagcaactttcaagcactcgtccattgattcttttgttgtcttgtaggaaacatttgttccgacaggtgtagtagacacttttaaactgataattcaataaacgtatgtttacgattactgtttagtggaaattggttttcattttgccttatataagaagattttaactagtctgtcatgtgcgtgtgccatccctaattaggtatgaaaatggatacttttttggatattatttttttgtctttttctttgaccgtgaataaata

SEQ ID NO: 25657 - DNA, 1752 bp, Zea Mays
caggctgcgaaagagtactctgaacagctaggggttgatgcttgtatcaaattatttgagcaattcaaatcttatgagggcctttactttttcttggggtcttatctgagctccaggtaatttctcatgctgacatttaatgcctttcttgaaatttgtgtctttctcaaaatgtgctatgcacctgaggtttctttacatgcaacagtgaggacccagagatccatttcaagtacatagaagcagcagcaaggactggacaaatcaaagaagttgaacgtgtaaccagggagtcaaacttctatgatgctgagaagacaaagaactttttgatggaagcaaaactacctgatgcccgtccactgattaatgtttgtgaccgctttggttttgtgccagatctcactcactatctgtacacaaacaacatgcttcgatatatcgaaggctatgttcaaaaggtgaatcccgggaacgctcctttggtagtgggccagttacttgatgatgaatgccctgaagattttatcaagggcttgatcctctctgttcgttctctccttcctgttgaaccactggttgatgaatgaatcgcctacgtttgctcactcaattcctggagcacttagtgagtgaaggtagccaagatgtgcatgtccataatgctcttggtaaaatcatcattgacagcaacaacaatcctgagcatttccttactaccaacccattttacgactctcgtgttgtgggtaaatattgtgaaaagcgggatcctacacttgctgttgttgcttacagacgtggacagtgtgatgatgaacttattattgtcaccaacaaaaactcattattcaagctgcaagctaggtatgtggttgagagaatggatggtgatctgtgggataaagttcttcagcctgagaatgaatatagaaggcaactcattgaccaagtggtttccactgcattacctgagagcaagagccctgagcaagtgtctgctgctgttaaggctttcatgactgctgacctgccacatgaactgattgagcttcttgaaaaaattgttcttcaaaattctgctttcagtggaaatttcaatctgcaaaacctgctcatcttgactgctatcaaggcagatccatccagagtcatggattatgtcaacagacttgataactttgatgggcctgctgttggagaagttgctgttgaagcacaactgtatgaggaggcttttgctatattcaagaagttcaacttaaatgtgcaggctgtcgatgttctcttggacaacatccggagcatagaaagagctgaggaatttgctttccgtgttgaagaagatgctgtttggagtcaggttgccaaagcccagttacgtgaaggtcttgtcagtgaagcaattgagtccttcattcgtgcagatgatgctgcacacttccttgatgtcatccgtgctgcggaggaagctaatgtgtacaatgatttagtgaagtaccttctgatggtaaggcaaaaggcacgggaacccaaagtcgatggagaactcatctttgcatatgctaagattgacaggctcagtgatattgaggaattcattcttatgccaaatgttgccaaccttcaaaatgttggcgaccgtctgtatgatgaagaactatatgaagctgcaaaaatcatctatgctttcatttcaaactgggctaagctggctgttaccctggttaagctgaagcagttccaaggtgc

SEQ ID NO: 25658 - DNA, 2170 bp, Zea Mays
ggcgtccccacaaaccgctcaaccttccctccctctcccctcttcatcgctccgctgcgctggccacgagatccacgccgcctcctctccggcgccccgccctcgcctctggtgggccacgctgccctcctcgcgacctccgcgcggctgcgaacgaccgacgaccgccggtttcgctgagcactgcgcaggaggcacgaggaggtggattccccgacaggcgcggtgccggcctgagtgacagggcggccgggcgccggtgacctgctcggcttcgccaaatttgcgggcggcgtcttgcgccgtgctgctgtcgctggaggcgtggagcaagggagcccggaggagggggaggccttgctcgcagccgcattggccggtaatactatctccgaccgaggaggcaggcggccgatttagtagttccctccccgctccggacgcgccgggcgccctaggtgcctctcgcccccgcttggtccatggtccatggggtggaaggttaagtcgtcgccggcggcggcgcccggcgacaagctcaggttccctccctcctccgccgcgcggtcgcggatgaagctctggctggtgcccgccaccaccacggtgctgctctggacctgcgtcctgcagctcaccgccgtcggggacacctggggcccacgtgtgctcaagggctggccctcctgcctcacgccgcacgaggaggcttccgccgcgcgcccgcaccctctcgccgtcgacaaggccgcgctcgcgctgccgcccaaaagaatatataggaacaatggttacttgatggtttcgtgcaatggtgggcttaaccaaatgcgagctgcaatatgtgacatggttgtaattgcaagatatttgaatgtgactttagtcgtgccagagttggataaaacttcattttggaacgatccaagtgagttccaagatatatttgatgttgagcactttataacctcattacgaggtgaagttcgcattctgagagaattacctccaagggtaaagagaagagttgaacttggaatgtttcactccatgcctccaattagttggtctgatatctcctactatcaaaatcagattcttcctttgattcgtaagtacaaggttctccatttgaatagaactgatgctaggctagcaaacaatggtttaccaatagaaattcagaaacttcgatgccgagtaaattatgcctccctcaaatttaccccacaaattgaagagttgggcaagagagtaattagaattcttcgccaaaatggacctttcttggtacttcatttacggtatgaaatggatatgttggctttctctggctgtacacaaggttgcagtactgaagaggcagaagaactcacaagaatgaggtatgcttatccatggtggaaagaaaaagtgattgactcagacttgaaaagaaaagatggcctttgcccattgacgcctgaggagactgctcttgtcctcagagcacttgacatcgatagaagtatgcaaatatacattgctgctggggaaatatacggtggaaagcgcaggatggcttctctaacttcagcatacccgaatgttgtgaggaaggagacacttctggaaccttctgatctgatgttcttccagaaccattcatcacaaatggcagcacttgattacttagtatccttagaaagtgatatatttgttccaacatatgatggaaacatggctaaagtcgttgagggtcatcggagattcatgggttacaagaagaccgtcttgttagaccgaaaactcattgttgagctagtggaccggtacacaaatggttctctgctgtgggatgagttctcttcactgatcaaggttgcccatgcaaagcggatgggatcagcttcaaagaggatggtgattcctgacagacccaaggaagaggactatttctatgccaatccccaagaatgcctccaggatcgtgattttttgcaaacatcataatctgagttcgtgatctacgggccaaagcattggtgaaagtgtttctgtcggtactgatgatttcttcatgtgggctgggcaaaaacaacgcagagcgttttatcagtttgcatgtgtccgttggcattgtgccaatgccaacgtacttttatttcaccattggcagctttgtcagctg

SEQ ID NO: 25659 - DNA, 2078 bp, Zea Mays
ctgcatccggatctgatctagtacttactagtgcgatccagtggtgtgtttgggaaggtttccgcggtcgggcggcgccccccagtggcgaagatgatccgactaccgacgtacgcagcgttcagcctgctggcgacggcgtcggcggcgtactacgcgttcagcagccgtgagcagttctacccggcgatggtgtacctctccacctccaagatctgcttcgtgctgctcctcaacacgggcctcgtcgccatgtgcgtcgcctggcagctcgccaggcgcctcttcctcggctcgctccgtgaggccgaggttgagcgcctcaacgagcagtcctggcgggaggtcatcgagatcctctttgctgtcaccatcttccgacaggatttctctgtttcctttcttgccatggttgctgcgcttctcctcgtcaaggcgctgcactggcttgcacagaagagggtcgagtacattgagaccacgccctctgtgcccttgctctcgcacatcaggatcgtctccttcatggttttcctgcttaccgtcgactgcctcttcctgtcaaactcgctcaggtcactcatacagaagcaggaggcgtccgttgccatcttcttctcctttgagtatatgatactagcaacatccacagtatcaacattcgtgaagtatatattctatgttagtgacatgctaatggaaggtcaatgggagaaaaaggcagtgtatacattttacttggagctcataagtgaccttgtgcacttgtcattatacatgctcttcttcatagctatcttcctgaactatggtgtcccgctgcacttgattcgtgagctatatgagactttccgcaacttcagaattcgcattgcagattatgtgcgctacagaaagatcacttccaacatgaatgaacgctttccagatgctacatcagaagagctcgatgtgagtgatgctacatgtattatttgccgtgaggagatgactacagcaaagaaactgctctgtgggcatctgttccatgtgcattgtctaaggtcgtggctagaacgccaacacacttgccccacgtgcagagctccaatcattcccgcagataatggacatgctgtatcagcacgacaacatggagcccaggctggggttcagcctgctgcaggtactgccactccatcctcagaaggagcaccaggtgagaacatgagcaggcaccaagcaaaacttgaagctgctgcagcggcagcttctttatatggaaggtcttttgtttatcctccagcaaacaccctaaaaaggtctgttcctcctcagcctgcatcaagtacaccacaatctgaagcaagtagctccaatcatcagtcacaaaaagaccaagaaatgcagtcccgaaacagcagcgatggtttagtgcctctgcctcttaatgcagatggtgctgttggttcaggaacaagcacaagggaccttgaaaattcacttcagaaggcacaagaaaactttattaagagccagattgagatgttacagatccaactgcaaatggtgcagcgtggcgctgctgggccgcccagtaacgagaatactgagcacacagaagaatgactgaatctgtgaacagacacttctgcatcgtggtgtaataataaggagaatactgatgagcacacagctgaatctgtaaataggcggcgatgaggatgggacaaaagaaagccaaggattggcgatacctggggctgggggaaactgttacatgatgtcttgcctggatttttggcaggcctgttaatttatgcttcactattagtgccttgttgccagcaccagatgtttctctctctctgtgtgtgtgtggtggtttctgtacatgaaagccttttgacgggagaaccaaccatggctagtttaattatgaagttcacttgttgtacccgagggaaaatagaaatgactcttgtttttgcctatctatccatgacttgttgtaccgaggtcctttgattgcagaggcgactgtgagcaacatagacggcaggggttgggaaaagatggccctgttgatgctacaactg

SEQ ID NO: 25660 - DNA, 3241 bp, Zea Mays
gcctaatcgatgatctgttttgacactgagacagtcagacagagacccgcaggcctgcaagcaccgagcagcatcgcccatccggccatcccccatcccgcatccaaggcctgcctcgcctgctcgttcgacctcaaccagtccgccctgtatatccatggcaggatgaagacgaggatagtgtactccagggagtttctgctgtcgcttggcgagttggagcattgcaagaagctgccccctgactttgatgcagcgctgcttagtgagctgcaggagctgtcagcgggtgtgcttgagagaaacaagggctactacaacacatcccagggacggccagatgggtcggtgggatatacttactcttctcgtggtgggaacactggagggaggtgggatactcgctcatctggatcaagtgatcgggatggggaacctgatcgtgagtctcagacacaggcagggcgtggtgcaaaccagtacagacgcaattggcagaacacggagcatgatggcctacttggccgtggtggtttccctaggccatcaggatatactgggcagttgtcatcaaaggatcatggcaatgcgcctcagctaaacaggacatcagaacgctaccagccaccacgtccttacaaggctgctcctttttcacggaaagacattgactcgattaatgatgagacattcgggtcttctgaattatcaaatgaggatagagcagaagaagaaaggaagcggagggcatcttttgagttgatgagaaaagagcaacataaagcagtgctaggaaagaagagtggtcctgatatcctgaaggagaatcccagtgatgatatattttcaaagttacagacatctactgcaaaggcaaatgccaaaactaaaaacgagaagttagatggttctgtagtatcctcatatcaggaagataccactaaaccatcttcagttctactagctcctgcagccaggccgcttgtcccgccgggttttgcaaatgcattcgctgacaagaagcttcagtcacagtcgtctaacatcacacatgagccgaagctagaggatgaccagtcagcaacagggttcacatctgaaagtaaagagaagggagtttctggtaacgatgctactatgggtccaaagcacacgcttccacctggtagtgttacctcttcagctgaattggcttctagcgttctgaaagggagcgaggattgggatgctgatgtaatggataagtattctattggaaaagaaggcaaatctaaaaatattgatccagttaggaaggatgattcagtagcaatcttagaacagttctttggcaatgttttatcgaaaagcggcagcaacctaccaacttatgttgagaaccagccattgaaaactgatgatgacatgatcacttctgtgccagaatcatccaaatttgctcattggtttcttgatgaagacttgaaacctgcagaagacttatcttcaaagagcctgctctccatgattgtcaaaaatgaaaatccagagcttatctcatttacatcctctacgcctgccaatggagttcttgaacaatgcatccattctgatgttccagaggcagttcctattatgacatgtgaggatcttgagcagacgatgttagcacaggttagcaatagcagctcaactcagataaatgctacaaaggagcaactgactgttatggatgaaccagttgccatgcagaaagtaactgtagataatcatgcatcacaacatcttctttcattgttgcaaaaaggaacagataataagggagcaccttccctgggtttccagagagaatcaactgatgaacctctgagtgttgacacaaatttaatggcaaatggtggaatatctggaagtgatccggttaacagtgttgaaaatgttcctacttctgggaaggacttgacattggaagcgttattcggggctgcatttatgaatgagctccactcgaaagatgcaccagtttctattcgaggagccacaactggtggtcctactgagtttgcagagatgggtaaaactctgttgtcatctagccatgaaggatactaccctgttgaacagaccgtacacttcaacaatactaaagatgctgctgtccgtagagaaccaggtattgagcattcagcagtacctggtctaagtcaggggagtgctagttttgacaagaaaggaatggaaattcatctgcctgaagaagataatttgtttaccatgagtgattctctgcttggtcaaaattctgatattttggcatcagtaggatccagcagggttgaagggctattgcctgaaaaggcacttgataacctcagctataggtttcaaagtcttgtgcctggtgatgcagaacacattcaagtatatggtcctgatgcacttggatctcatcctcgtgattctcagaatatgtatcatcttctacagggggtccctcacttggaccctgctggacatattatgcgacaacacatgtccatgcctggaagatttcctccagaaggcttgccaagaggtgtccctccatctcagcctgtgcatcacatggctggttatagacctgaaatgggtaatgtaaataatttccatatgcaccctcgccagcccaactatggagaatttggattgatgatgccaggtccagaggtgaggggcaatcatccagaggcgttcgaaaggttgatccagatggagatgtcagccagatcgaagcaacagcaggtgcaccaccctgcaatggccgctggccgtgtgcctagtgggatgtacgggcacgagcttgatgcgaaattgagatacagatgatggatgcctggatgcttcactccgtacagaggacctggagggttgtagcatgtacatctgaacgggtgatggaacggagtgggtctaagatctgtaggagcggaagtctaccgggaaaaggggttatggtgtgctgaatggaagacgtggcgtcgacgtcttagcagccacatgtgtaatgacgttttctgtctactgtttctgacgactatgcagtttccattttgtataagctctgttatgcaaaaggaaaaaaaaagaagaaaaaaaactgagtcagattaacagattggcgacagtgtccgcttgaccctatatcttcaacttgtttgaaaggaaatgaccacgcgtcatgccgagacgtttgtagctgatagcactgtttgagacgttttgc

SEQ ID NO: 25661 - DNA, 2323 bp, Zea Mays
ctttcctcaaaaacctcgggcttcccctggcttccatgcagcagtccccccttcgtgtcgcactcgcacagtcgcactccataaggcaaggaggaaaacagagagacgaccaccgctccgcgccggccggccattccatccggcaatggcctccgccgccggtgctgcgttcgccgccatcaccctcctcatcctcgtacccctcaccgccgcttcggactccgaccacaagtaccaagcagcggagcctgtgacgctctgggtgaacaaggttggtccgtacaacaatccgcaggagacatacaactactacagcctcccattttgccatgcgtcagaaaaccatgtgcataagtggggaggactcggcgaggtccttggtgggaatgagctcattgacagccagatcgacataaagtttggaaagaatgttgataaggccacaatttgttcgctagacctcgatcttgtcaaggctaagcaattgtcggatgcgattgagaactcatattggtttgaatttttcattggttttgttggagaggcagacagaaacaatgataacaaatatttcctattcacgcacaagaatattgtcatcagatacaatggcaatcagattatccatgttaatcttactcaagaaagcccaaagcttattgatgtgaataaggcattggatatgacatattctgtcaaatgggaaccaacaaacataacatttgctcaccgttttgatgtgtatctggactatcctttctttgaacaccagattcattggttctcaattttcaattctttcatgatggttatctttctcactggactagtgtcaatgatactgatgcggactctaagaaatgattatgcaaagtatgcccgtgatgatgatgatattgaaactctggaacgagatgtcaatgaagaatctggatggaagcttgtacatggtgatgttttccggcctccttgcaatctagttcttctttcagctcttgttggtattggtacacagttggcagcactgattctactagtgattttgttggcaatcattggaatgctgtacattgggcgaggagctattgtcacaacattcattgtttgctatgctcttacttcattcatctctggatatgtcagtggtgcattatactcacgtcatggaggaggagcagggaaaaactggatcaaggcaatggccatgacagcatcacttttcccatttatgtgctttggaattggcctggtgcttaacactattgctattttctatggatcgttagctgccataccatttggtacgatggtggttgttttcatcctgtgggccttcatctctttccctcttgcacttttgggaactgttgttggtagaaattggagtggtgctccaaacaatccctgtagggtgaagactattcctcgccctattcctgagaagaaatggtacctcacaccatctgtcattgcgcttatgggaggactgcttccttttggtagtatctttattgagatgtactttgtcttcacatcgttctggaactataaggtctactatgtttatgggttcatgttgctggtctttctgatactcatcattgtcaccatatgtgtaacaattgtcggtacatatttcttgctaaatgcggagaactaccactggcaatggacttcattcttctctgctgcttccactgcggtgtatgtttacctctactccatatattattaccacatgaagaccaagatgtctggattcttccagaccagcttctatttcggctacactctaatgttctgcctaggcttaggaacactatgcggtgccgtcgggtatcttggatcgacattgtttgtgaggaggatctacaggaacataaagtgtgactaagtgaagataatatcgccccattttgggtcagcgcagagaaaatgtatggcagagccttatttgattgagcgatcactgattctaaaaccaagaacgcaggtcattttgtgaaatatgatcgttgcttggcgccgagctgaaagccatgtttttctattcttgtcctcgtttctctctgatttcttctggacttggacaggcaacaaattttcatgttgaattagttatatatatagcggtggttgtagttgttgagtagttctgtagtatataccacaattgttatccttggccccaatgatacctcagattgatgggtataaactgtaacatttacattacctgatgtttgacgatgaacacagttccaaataatcatgttcggtactggaggatcgagatttttgagaggcaacatcaaagaaaaaa

SEQ ID NO: 25662 - DNA, 3222 bp, Zea Mays
atggctcgtgctagttatctccttcccctcttcctgatactgatacaccacctccgctcatcactagcttcatccacttggtatggtaacctcacagctccttggtgccatccagaccatgctgcagcactcctccagctcaagcgatcctttctcttcgactactccaccaccacccttgcttcatgggaagcaggcacggactgctgcctctgggagggtgttggatgcgacagtgtctccggccatgtcactgttcttgacctcggtggccgtggcttgtacagctacagtcttgacggcgcgctcttcaacctcacctcactccagcgactcgacctgagcaagaatgacttcggtggatcccctattccggcggctggctttgagaggctttcgctataaccttttggtcctacaagaaccaagtttcgagacactattgtcaaacctcacaaatctgagagagctctaccttgatggcgtggacataagtagtagtggcagagaagattggggcagaactcttggaaaatacgttcctcatcttcaggttcttagcatggaggaatgcaggcttgttggtcctatccatcgacattttctacgtctccgctctatcgaagtgattaatctaaaaatgaatggaatttccggcgtggttccagaattctttgcagattttctcaatttaagagttcttcaactcagctttaataacttgagaggcacctttccaccgaaaatctttcaactgaagaatctggcagtattggatgtgtcaaataacgatcaactctcggggcttattccaaaatttctccatgggagctcgctggaaactttgaatctacaggatacacatttctctgggccaattccacagttaattggcaaccttacgacattggaatatttgacaatctctgattgtgcttttactggtcaattactctcttcagttggcaatctagaaaacttaagattcctgcaaatatcctataaccatcaaggtttatctggccctataacaccgacaattggacatctcaacaagttgacagtattaatacttcgaggttgcagcttctctgggagaataccaaatacaatcgccaacatgactaaactgatttttgtggacctttcacagaatgacctcgtcgggggcgtaccgacatttctattcactttaccatcattattacaattggatctttcatcgaatcaactctctggacctatacaagagttccatacactatcttcgtgcatcgaagttgttactttaaatgataataaaatcagcggaaatattccttcagcactcttccacctcataaatttggttattttggatcttagctcaaataacataacaggttttgtagaccttgatgatttttggaaactacggaagctcgctcaaatgagtttatccaacaacaagctgtatatcaaggagggaaaaagaagtaactccacattccggttattaccaaagctcactgaattagatctgaaatcatgtggcttaactgaaattcctagtttcttggtacaccttgatcatatcactatattggacctttcttgcaacaagatacttgggactattccaaattggatatggcacacatgggaccatagccttaggaatttgaatctttcaaacaacgcattcacaaatttgcagctcacttcatatattctccctaatagtcatttggaatttcttgatttgagttccaacagaatccagggtcaaatcccgattccgaacatgttgacaatggaaagcaattatgaacaagtcttggattattcaaataacagtttcacatctgttatgttaaacttcactttgtatcttagccaaactgtgtatctcaagctatccgacaataacatagcaggctacataccacccacactttgcaatttaacttatcttaaagtccttgacctggcaaataacgacttcagagggaaggttccatcttgcctgatagaagatggcaacttaaatatattgaatttgagggggaatcgcttcgaaggagagttgacttataaaaattatagtagccaatgtgatctgcggacaatagatataaatggaaataacattcaaggacagctgcctaaagctctttctcaatgcactgatttggaggttcttgacgttggatacaataacattgtagatgttttcccatcttggcttggcaacctttccaatcttcgtgtccttgtattaaggtccaatcaattctatggcacactagatgaccctttcacaagtggaaatttccaggggtacttcttggggatacaaataattgatattgccttgaacaatttctctggctatgtgaaaccacaatggttcaagatgtttaaatctatgagggagaagaataataacactggacagatcctgggtcattctgcatccaaccaatattaccaagatactgttgcaataacagttaaggggaattacgtctcaattgataggattttgacagccttaactgcaatggacttatcaaataataaactcaatggtactattccagatttggtcggaaaccttgttatactacatttattgaatatgtcacacaacgccttcacaggaaatattccactccaattaggcaggatgagccagctggaatcactggacctgtcatggaactacctttccggggagataccacaagaactaacaaatctcacatttcttgagaccctagatttgtctaacaacaatttggcagggatgattccacaatcacgccaatttggaacatttgagaacagttcatttgaaggtaacataggcctctgtggagcacccttaagcagacaatgtgccagttcacctcagccaaatgacctgaaacaaaaaatgtcgcaagatcatgtcgatataactctatatatgttcattggattaggatttggacttggatttgctgttgctattcttgtcatgcaggttccacttggcaaattctatagaactataagcattttgcgaaacttatcctaggtcacaagggatcaatatctgcacagttcgcatgtatgtaatactggaaaggagaatgacacttagatggatgtgtcatgtgtgattgtgattattcatctctatattctagcgatacttgtaaagtatgtcatgctgcattttttaagatattgttttgg

SEQ ID NO: 25663 - DNA, 2707 bp, Zea Mays
cgccggccggccgtcctctccacctctccattctctcctctcttctccccgctgcattgatacatacatccgtccggaacccatacgctgcacccacacacactgcggccagcagcacagcagagaggggagaggggttgggtggggggataagctttgccgacaccacactgcatccctcggctgcctgaagcaagcaagcgaccgcttcgtcctaggcagcgcgtatctgagctgtcgctgatggatgatagataaagcggtggagcagggtgagagggaggtgctcctcgtggttaccatcgccaccatggccgtgtagtgtacaggagcactgcagcccgaagcccggaagaggtttttcagatacagagagaaagaaagagaagggggtgggcacagcgcaggcaggatgaagtcgagaactgcgacattggcggtcggcatcctcctcctcgtcgcgcttgtggtggtggcggaagccgacaccgacgccggcgatgtcgcggccttggggaatctctacagctcctggaacagcccggcgcagctcaccggctggtccgccagcggcggcgacccctgcggcgctgcgtgggcgggtgtctcctgctcgggctccgccgtcacctcaatcaagctttctggtatggagctgaatggtactctgggttatcaattgtcaagtctacaggctctgaaaacaatcgaatacaggaatctggcaaaaaataacttctccggtaatcttccatactctatatccaacttggtttcacttgagtacctcaatctcagccacaactcgttatttcaggaaattggtgaactatttggaagcctcaattcactttcagaactagacgtatctttcaacaacctcacggggaatcttcctttctcaatgggcgctctgtcgaaactttctagcctttatatgcaaaacaatcaactatcaggcacagttgatgtcctcagcaacataagccttgcgacactaaatattgcagacaacaattttagtggcatgatacctcaagaattcagctcaattccaaatttaatagttggaggaaactcatttgtcaatatgcctgcctccccgccatcaactctgaagccacctctggaggaacctcaaggacccgttagcgctccaactagccctgatacccctattgatcaagacgacaggaagatacagacaggtcctcttatagggatagctgttggctcaatagctgctgcctcatgtgttcttttcgtcttggtgttctgcctccacaatgcacgcagaagaaatgacgatgagatcagcgaaccaaaagatcttgtgggttctcttgcagtaagcatagaaacagcagcatccagtagggaagtcctgaacaacaaccatgaaaatagtgctgtagcaacttcagatctccaacatgctgggaagatgatgatgactccggacagagtactgcatgatacgacgaacggttcttctactgccaaaaggccaaaggttcctgtgacggtgacttcatatacagttgctgatctccaagtcgctacgaatagcttctgtgaagactctctcctaggcgagggttcgcttggtcgtgtttacaaggctggttttcctaatgggaaggtacttgccgtgaagaaggtagacgacagtgccttgctgtctctgtatggaggaggagaagacgccttccttgagctggtctcgaacgtttctcggctgaggcatccgaacatcgtgcccctcacaggctactgcgtcgagcacggacaaaggcttctcgtgtacgagtacgttgggaacggaacgctgcgtgatgtgctgcagcactgcttgtctgacgacgagggggcgagcaagaagctcacgtggaacacccgcgtaaggatagcgctaggcaccgctcgcgccttagagtacctgcatgaggtgtgcatacccccagtggtgcatagtaggaccttcaaggcatctaacatcctgcttgatgaagagtacagcccgcatctatctgactgtgggcttgctgctctcactactgtggtctccccggaagcggttggctcctttggatatagtgctcctgagctcgccatgtcaggaacatacactgcaaagagcgacgtgtacagtttcggagtagtgatgctggagctgctgacaggccgcaagccactagacagctccagagagaggtcagaacagtctctcgtgagatgggcagccccgcagctccacgacatcgatctcctcgccaggatggtcgatccggcgctggacgggctgtacccttccaagtccctctcccgtttcgccgacatcatcgccatctgcgtccagccggagccggagttccgcccgccgatgtccgaggtcgtgcagcagctggtgcgcctgatgcagagggcggccatcataaggcggcaatcggacgatctgggctactcgtacagggtccccgaccgcgacggcggcgcagcagcaggcgacgtcctctgactctgagaggctaggaggagacccaagttggttcacgttttgtttccgtccgtcacctgtaaatgacatttgacatgtactatagggttcggagtgtacctggacttttcgtcagctgcgagtgtcatgtattgtgtgcgctcttgcaagtggtagatatatagatatatttgtactacttattatgaa

SEQ ID NO: 25664 - DNA, 1606 bp, Zea Mays
tcactgtcttttcatgataatgctgcaactgtgaaattggcaatggctatggtgtacctggaggcggtgcttattatgctgcaaacttgccaagtcctcaaatgaataaacctagagatgaaactgataaagctaaatgtgcaaacgatctccctgattttttaaagcagaggttaagggcaaggggaattctcaaagatgagactacaaataagaattacacgagtacgcagactgtggattctcaagaaatcgagaacaaatctgcacaagagttgcctcctggttggattgaagtgaaggacccgacaactggagcgccatacttctacaatcaaagcactggagtgagtcaatgggatcgccctgacagtgttgtgaatatcatgcaacatcaagtttctccatccttgccagagaactgggaggaggcaattgacaaatcaacaggccacaaatactattataacacgaagacacagaccacacaatgggaacctcctacttctgtgaacaccagtgttagacctccagcttccaccaacactgcagttgagccagtcgctcaagctgcagatatttggaactctcaaatgcagagatgtttgggctgtggtggatggggagttggtcttgtccagccttggggatactgcaatcactgcacaagggttcaaaatcgtccttttcaacagtacccatcttacacaaataatacgatgcacgccagtggtaacaatgctcccaaagctcaggggaatgtttcagctaagaacagatcaagctcaaagccacctttagggaaaccaaacagaaaagaccaccgcaaaagaaatcgccccgaggatgatgaacttgacccaatggacccgagttcttactcagatgctccacgcgggggctgggttgttggtttgaagggtgttcaaccacgagcagcagatactaccgcagctggacctttgttccaacaaagaccatatccctcaccgggtgctgtgttgagaaaaaatgcagaggtagcaacccatggcaagaaacgtggtggtatggctccgataacaaaaagaggagatggcagcgacggacttggggaggcagattagtcttttggtgaactgaaatgttgtgctatccgaatctccttggtggttgtctctggagctgctaaactatcattgcacgcctgaagaaaatcgaaaaaatattggctgccagatctggaatgaggaaactcactacagttcgcgagtttttgcagcgattaacgctagtgtactcgctggacctcgaggctagagcaatgcgagctcaccccggcttgctgatgacacattcactgagttcactgcggtttgccgatgacattcaatgtgcccttggtgtgaattttatatgaaaatgaactataatctgtaattggaaagagtgatttcaatgtaaggaattaacttttgtggggtgatgaaccatactagcgatgcacttagccaaacaagagaaatttggatttgtaccattaaaagattacaactttagatatatagcattgctatctcactaacatgtgtggtccacatgagacatgagtcaataacatgtggag

SEQ ID NO: 25665 - DNA, 1607 bp, Zea Mays
ccattttcacaaatttctcctgtggaaatggccagtggcggagcccttcggcagcccattggcccaggtctgctctgagcctctgagtgaccccgaacctaggcgacggccgacgaggcttccgcggtctgctcgggactccgcacccgtccgcgccgcatctgcctccaggcgattcggctcccggcctccgcgtccgcacagatcgcgccgcctcgccacgccgccgcctcccgactgcccatctgccgcggccgcgcccaccgcccgactgcccgtctgccgcagccgcgcccaccgcccatcgccctctgctcccggccacacctgagcggccgagcccgacaagcggccgcgacattgccacactcctccgcgacaaacagtaggacaccgcacgcatcacgacatcagggctggctccaccactggaaatggcggcactggtgccggagtgggctaccaaggagccctgcctcatggggatcgatgaggctggccgtggccctgtcctcggtcctatggtgtatggatgtgtgtactgcgcgtgctcttacaataacactcttgcgactctcaaattcgcagattcaaagacgttgaaggaagaacaaagagaggagctatttgaaagtttaaaggccaatagctctattgggtgggaagtggatgtcatatgcccaaaggatctatctgctaaaatgttaaaaaggtcgaaagttaatctgaatgaaatatcacataactctgccatgggtcttgttagaaaagttcttgacatgggagttctactggcagaagtatatgtagatacagtgggagatcctgaaaagtacagaaccaagctgacagaaaagtttccaggggtcaaatttgtggttgccaaaaaagctgatagcctttaccctgttgttagtggagcaagtatagctgcaaaggtcactagggacagagcgttgcgaaactgggtgtttgatgaaacagctctgagtctgcacatgagaactggatcaggatatccaggagaccctgatactaagcaatggttagaagatcacaagcatccggtatttggcttcccaactttggttcgtttcagttggggaacttgtaagcccttcttcaaggacgcagttgatgttacatgggagtctgatgaagttgatgaagaagggactgacaatggaggtgccaagcgacaagtcaagctttcaagcctaggcttcactggtttcaaaaggaaaaccgaggatatcgaatcaagcggaaaaggtcgttgcaaattcttccaggctcgcaaacttgagttggtcaggaagtttcagtgatgtgtcctaatttggtagtacgtacttatatttgtggtagctggagtgtttggtttagtttgttgtagagcctaatttgaaactggtctaaattggatgttgagattggaatgggaagataatgattttccccacattgctacttctgccatttcctacgtgccgcagtagttactggatgctactgcgagtttatttgctaaactcgctttactgtttctttgcaatattgacggacgtttatttggaggatattgtcttattgactattgagtcacc

SEQ ID NO: 25666 - DNA, 2012 bp, Zea Mays
cgggctcggtctcctctggaagctcccctacggccgcgcgccgtcccgcccgatggacgcgctgccgcctctgcagcgcgccacgtcgccgccgccccagccccggccccagccgcccgtgccgtccaggaggtacggcgtgcacttctcggcgtccagcttcatccaggcgccgctcaccacgctgctcgagtactccggcatcctccgccccgatccaggcggcggaacccagcaggatggggccggggctgggccgggcgaggtgtcgatccggattgtggcgcccggcgaggcggggacgtcgtctgagaggcccgaggaggtgatcgtggaggaggaggaagaggatggacacgcaacgagaacgcgcccggaggacccgtcacctgcggctggtggcggggagggcggcagggaatcctcctcatcgtaccagcggtacgacatacagcaggtggccaggtttctttgtgacaatttggattgctgcggtgatgttcaagtccaatgatatcctgcgtaagcagactgctctgaagagggagagaaaaattccagttcttgtcgggattacaatattatttgttgttcacgtatctgggttttattggtgttacaagaacggggaccttataagacctctcatgatgcttcctccaaaagaaataccaccattttggcacgcaatattcatcatcttggtgaatgatacaatggtgcgccaaactgctatggttgtcaaatgtttgctgctgatgtactacaagaacagcagaggccgtagctatcgtaggcagggtcagatgctgacgattgtggaatattttctacttttgtaccgcgcattattgcctacacctgtgtggtaccgttttttcctgaacaaggagtatggaagcttattttcgtctctaaccactggcttgtatctcactttcaagttgacatcagtcgtggaaaaggttcaatcatttttgacggcattgagagcgttatctcataaagacttccattgtggctcatatgcaacaagcgagcaggtggctgttgctggagatttgtgcgcgatatgccaagagaagatgcacgttcccatccttttgcgctgcaaacatgtcttctgtgaagattgtgtgtccgaatggttcgagagggagcggacttgcccgctgtgcagggcactggtgaagccagcagacctccggtcgttcggtgacggttcaacaagcctcttcttccagctattctaatctgagagagccaaaagagctgggcaagctggggcgctccaccctgtgcagatgttaggtgtgtgtgtgtgtgtgagtgttgctgctggcaacgcgtgcgagcagtgcggccctgatgcggtgctgggagagtgtacaccgagctgaagctgaaggcgtacatggttttgtattgtgattgtgcatattttcatcccatgtataggcactcgcgggatgcttgagcacctgaggatttttacctgaccttatacgcacaaactactacgtaaatagaaatggtgagtatatacaatggttccggatgcgtcgataaaatcctcacggtccttgcttatgctatttttgacaggcaccataccttcaccattctcacaaaatggtgttagcagttgctgtataacgtgcgtgctgccctgctccggtgatcagcaaaggcccaaaataattgcagagaggaactggaaaggaactccaaggaacaagtaaaatagtgcaggagattctcaacgcccgacgccgacagtcgacagatgatatggttatgcacgcggcagtggaaccaaacatacctgcaccgtagcctgtgccgtgccgccatgacagacggggccggcttcgtcctgaggtgacagctcacaaatgaacagtaaacagatccagcgtgtctttttaatataatgacgggtatatgtttgattggactatggacgtgaaaaatattgttgtggttgtgagctataaaaaaaccgttgtgag

SEQ ID NO: 25667 - DNA, 1350 bp, Zea Mays
atgcagcgccatatccgtgcagtctactccatttttgttcccctctccggtggcggcctagcgggggtgtggtcttcctcgcgtcgcctcccctcgctctcatccggtcatcagtttgaggtttcaacctatttcaccagagctgattggactcatggatgggaacaaagatgaggcattgagatctgtcaagcttgcaaaatctgcatttgcatctggggataggcagcgcgcagaaaaattaattaaaattgctcaaagattggaccctggtcttccacttgatgatttgctgagcccagttgagaaggttggcatcctgaatatttctacttgcaaagacaagactgaaagaggacaagctcttttatacccaaaaacaacaaaagaatctgttggtcctttaaatgttgataaggcttacactgaggagaatattagagtggttcaggatatcaggaaaaagaaggattactatgcagttctcggagtagagagaagatgcactgtggaggaaattaggaaggcatacaggaggttatcactgaaggttcatcctgacaagaacaaggttcctggggcagaagatgctttcaagatggtaagcaaggctttcaagtgcctaagcaatgatcagtcgcggaggacttatgatcagacaggcaccactgaggaccatgaattcaatgagcaatatcccaatgtcatgaggcggggagctgctaggcggagaaggccagcaagaagtggcttctataactatgaagaagattttgatccagatgagatattcaggtccttttatggcacccatgataatatgttccatccccagtatacctacagggctaggggaacaggcaggcaacagcaacagagaagggagcattcagtggagggtggttccagcataaatctaacagtgtttattcaccttgtagtagtactgtttattgtttcgcttgcatttattccagcgcgtcaagctgagtattcgctgcaacagacaaattacttccccatttcaaaggtcactcaaaaacaaggagtggagtacttcgtcagcaaacaagattttgatcagcagtttccacagggtagtcagtctagagagaatcttgaacggcatgttctgatggactataagagtatgcttggaagatattgccatgtggaactccaacgtcgtcaatgggccaaggactaccctacacctcgctgtgacaagctaagggagctgtctgtggcgcagaatgtgcatatgccatcagtttgatctcccgttttcatcatggaagaatattgctcatatttgcaggttatgaaaactcctgaaattcgcttcaccct

SEQ ID NO: 25668 - DNA, 898 bp, Zea Mays
tctttcccacagttgcttctttctcttgcaacccttatattctaccatcagttcctcctcactccctcttgccttgcagtagattttggtgtgctgaatccaacaccagctcctcctctctttgttagatttgtcctgaggcaccatgtcattcatgtctccattcccggggatggatctaagtaaaatggatcccgggactctgaccctccttggggcagctggttgtgtaatgctgactatgcatttcactgtgcaattggtgtcacaacatctcttctattggaaaaaccccaaggagcagaaagccatacttattattgtgctgatggctccactatacgctatctcttccttcgtgggtcttcttgatatccagggtagcaagacatttttcacattcttagatgctgttaaagaatgctatgaggcactggtgattgctaagtttatggcattgatgtacagctacttgaatatatctatcagcaagaacatagtccctgatgaaatcaaagggagggtgcttcatcattccttccctgtttctcttttcctgccccgcaatgtccgattggagcacaaaacattgaagcttctgaagtattggacctggcaatttgttattgttaggccagtatgttccattctgattattgcactccagcttcttgggctgtaccccagctgggtcagctggacgtttagtattatactgaacttttcagtctccatggccttatatgcattggttctcttctaccacttgtttgctaaagagctggcacctcacaagcctcttgcaaagttcttgtgcatcaaagggattgtcttcttctctttctggcagacaactcactgagatgattaatgtggattagatagtacgtgcttggca

SEQ ID NO: 25669 - DNA, 3129 bp, Zea Mays
gaaggtgtatatgtttaaacccccgtcctcagtcacgccgcacctaacccttcgtcagtttcagtttggcacctccgaagcttccgtccgaatctctgctgcctccttcctcggccaggcttgcgggcgatggcggcggagcagaccgccgagcagttccggggccaggcgcggctgccccacttcgcgtccccgcggcgctacgacctgcgcctcacgcccgacctccccgcctgcgtcttcactggctcggtggcggtttccatcggcgtggccgcgcccacccgcttcctcgtactcaacgcagccgagctcgacgtcgcgaccgggggcgtcagcttcgcgcctcagggctccgaccaggtgctacaacctttggaggttaccaacgtgccagaagatgagatcctgattattcgcttcaatgaggtgctttctatcggggagggaactttgacgattgcattcaaggggactttgaatgataagatgcatggattctacagaagtgtgtatgagcttaatggagagaagaaaaacatggctgtaacacagtttgaaccagctgatgcaaggcgctgcttcccttgttgggatgagcctgctttcaaggctgttttcaaaattactctagaagttccttctgagacgattgctctgtcaaatatgccagtaattgaagagaaggtcaatggccctaccaaaatagtctacttccaagaatctcggataatgtctacatacttagtggctgttattgttggcaatttttgactatgtggaagatttcaccacagatggtactagggtccgtgtttacacacaagtcggtaagagtgcgcaggggaggtttgctctagaggttgccttgaagacattggtcctgtttaaggagtattttgctgtgccataccccctccccaaaatggacatggttgctattccagattttgcagctggagccatggagaactatggcttggttacataccgtgaaacagcattgctatttgatgagatgcactctgcagctgccaataagcaacgggttgcagttgttgtagctcatgaattagctcatcaatggtttggaaatcttgtcacaatggaatggtggacacatctgtggcttaatgagggctttgcgacttgggtgtcttacttagctgcagatcagttctttcctgaatggaatgtttggactcagtttctagaggaatctacagtaggtttcaagttggatgctcttgcaggttcacatccaattgaggtggacataaatcatgttgatgaaatagatgagatatttgatgctataagctataggaaaggagcttctgtcattcgtatgctgcaaaactatcttggggctgaggtctttcagaattctttggctgcatacatcaaaagatttgcgtattcaaatgcaaagactgaggacttatgggctgcccttgaagaggggtctggtgaaccagttagaacattaatgcattcatggaccaaacagcaaggttatcctgtcattaatgtgaaactcaaggatggaaagttccaactggagcagacacaatttctttcaagtggatctacaggagttgggcaatgggttgttcccatcacactatgttgttgttcctactcgcgccaagcgaagttcctttttcatgggaaacaagaagattttgatttgtcagcgtccgggtttacggactgccaaaagaaagatggcttctggattaaacttaatgtcaaccagactagcttctatagggtgagctatgatgaggaacttgcagcccgacttcgatatgcaattgaaaccaacaaactgggtgcagcagacagatatggcgtacttgatgatgcctatgccctctgtatggctggcaaacaaaagctagtctccttgctgcatttgatttctgtgtacaaggatgagactgagtatactgtgcttgcacacataatcacgacaagtctgcacattgccgagatgatggttattgctgctccagaggagttggttcatctgaagaagttcctaattgatttcctggagccatttgcgctgaaacttggctgggatgctaagagtgacgagggccatctgaacgctttgttaagaggtacactcttaaccgctcttgcagaacttggccatgaggctaccataaatgaagctgttcgtcgatttaatgtctttctggaagacagagagacaccactcctccctcccgatgttcgaaaggcagcatatgttgctttgatgcagacagtgagcaaatcaaacaaaactggctatgaatcactactgaggatatatagggaaaccgatctaagccaggagaaagttcgttctttggcatcatcccctgaccatgatgttgtccgtgaagtattgaatttcatattgtcacctgaggtgaggaatcaggacgcaatatttttgctaagaggggtgagttcaggggcacacgaggtagcatggcaatggctgaaggaaaactgggattacatattgggagcctactctggaactctgctcacctatttcgtcaacataactgtctcgccactggccaccgatgaacatggtgatgaggcggaggagtttttcaagagcagaaccaaggcgaacatcgcgaggactgtgaggcagagcatcgagagggtgaggatcaatgcccaatgggtcaagaacatcaaggccgaggctgacctcggcaatgttctcaagaagctggcttacaagcactgatcagagacggtccactttcatttctgtgttaatcctagtaccgagatgtaactttgttctctggaataagtggattaataaagggcactttcgtttgtgtgtcgtcctgagctgccttgtccgtagattcttacaaactgttctgtgcgaaagctaccatgatagatatgcgtcgaattgattgattctatatcctgataattgattgtgtatcgcccatgtcgcacaggagaacggtaaatttgttccaatgattgtctgactgcgagttggcttccaaacctgcacttcatcattattttagggtctgactctattactccctccgtttcgttttagttgtcgctggatagtgtaaaattaaacta

SEQ ID NO: 25670 - DNA, 1518 bp, Zea Mays
ttctataattgcgaaaatatcccgaatccgtggcttcccttccctggcgcgcgagtgacgagcgtgcgcagaagctagccaagcgatgccgctcctcttccccgccacgccgccgctaccgctgtgccgcgccgcgcgcgtctcacgccgcgccacggcctccgtggcgtccgcggccaggagctcgtcgtcgtcctcggcctcgttcgacgcggccgccttcgaggccgagcggctgcgcctggacgccgcggcgcgggccgggatggagtccaccgccgcggcagcggaggccggcccgcgggcctggaagtgggcgatacggaagcgggtgtgggacgcgctcgaggctgagggcatcgcgcgggacccgcgccccgtccaccaccgcatccccaacttcgacggcgcccccgccgccgcagacgcgttggggaggcttgacatatttcagaagtcccattgtgtaaaggtcaatcctgacacacctcagaagcaagttcggttcttaacattgtcaggagagtgcgagccatttattgaacaggaaagagtatccaagtgtacaacaccactcacacaagacagtaggtcctagaaaaggtttcaaatgtccctatagccctgactccctgagtgcgcactgtgataaaaagctgttgactccgcaacctcggctaaggacaggatttttctcagttatggactctcagatgatacctgttgggtgcattcctgaagcatgcacttctgttggtgcagctaaatatgggaggccaattggtttagatgaaagccttaaggtggatttgattgtgattgggtcagtggcagttgatccaagttcaggagcacggttagggaagggagagggatttgcagagctggaatatggaatgcttcgctatatgggagctatagatgattcaaccatgatagtaactactgtgcatgacaagcagttagttgatgacattccagtggagaagctgctagttcatgatgtgccagttgacattatctgcacccctactcaggtcatcttcacgaagactacgatcccaaagccacaagggatttactgggaaaagttatctccagaaaaattgggccaaatccgaattctaagagagctgaagcaacgtatagagcaagagacaggaactatgcttccttgtggaccttcggagaagctaccgccaacagctcagagaaagcagaggtggcagcggcgacgatgagacttttgtatgcttctcttaactgtttcttttactcaataaagagctatgtgcacccttttctttcttagggcaaatcaaggtcacaattcaaaactgctagcattagactataggaacattaccagatgtaatagaaatgccaaaaaaaactttgtttgcacttaagaggcaatgaggatagatagtatagctctttccacacatatttaatttctttgcaagtatgaagttccatttggaaagtggtacttaaaatttgtatcttggatgtagc

SEQ ID NO: 25671 - DNA, 2741 bp, Zea Mays
ccggttctcacgccgtaggtaggtaggggtcgatcccaactccttccttcccctttgctgctgctttaattccttgcgcgaagatccctcttcttcttcttcgtttacagccgttctttgctctaacctctggactttagccgctcccacacggcctccatctttcggcatcgagagatccaataacatcaggaccaagaaagtaaaaagacgcaatcattaggaactactttctctccgtttctttttaattgtcgctggatagttcaattttgcactatccagcgacaaataaaacgaaacgctacttatctgcattgcgcagattctctgctagctaggctgttggctcgctccttcaattctcctctcctctccttccgcactccaccccctcctccgtagtagtagcagcatagcatctggtggtgtggtggtcaaggttcaagaacaaattcagctggaggccggcggagattattttattcattcccctccgagaggctgcatcgaaaaggggagatcaaggatccccggaggcttgtagccgcaacaaccacaagggaggcggagggcgagaggcttcttctctgaccagcgaccggctcgccgtccagagaagaagaagaagaagaggaggaggaggaggaagaagaagaagaagcgctcttgggctccgtcgtcgcatgaagaaggaaaccatggaggggcatgtgccattgccattgccattgctcccggacggagaaactgcggtgggctacagcaaggacgacgcctcctcgcctctgcaagaggagatttcgagcctgcggtcaaggcagcggcgtgttgacaggagacggcgggaggcgctcgacaggctcgttgaactgaaaggaagcgttagggtcttctgccgggtccggccgctggctcacacgaacagcttgcatgcccagtcatcacctgttaccgtcgagcaggagaggatcacggtcaagcagccgggatcaagagggagttcggcgctgatagggttttcggccaggagtccacgcaaggaaggaaccggcggtaataagctcggcgtcgtgcctcgggctatccaggagctgttctctcgcgcttcggaggacggctcatgcgcctactctttctccatgagcatgcttgaggtctacctggggagtctcagggacttgctggcagcaccgaggcagcctctcttcaggcgaacagagtgcaaagcagcggcgtgtagtagtagcctcagcatactggcaacgaaaggtggcgccgtggaagtggaggggctgacggacgtctcgacgccggacctcaagaacgccagccagtggtaccgcagagggcggcgagcccggtcgacggcctggacgaacgtcaacgacgcctccagccggtcgcactgcctgacgaggatcaccataaggagaaggatgaggcatggaggaggaggaggagtcagcaagctctggctcgtcgacctcggcggcagcgagcggctgctcaagaccggcgcgtccgggctcaccatggacgagggcaaggccatcaacctctccctgtcggcgctcggagacgtcattgctgcgctcaggaggaagaggccccatgttccttatagaaacagcaagcttacccagattctcagcgactcgctcggcgatggttcgaaagttgtaatggtggtgcacgtcagcctatccgaggacgacgtcggcgagacggtctgctcgctgaacctggcgaaacgagccagatcgatcgagccgaacagagaaatcccacaggatctgaaaacgctgaagcagaagagggtcgcagagctggacagggagatccgcgccgccgaggaagagctgaagcgtctcgacgagcagataaggagagcggaggagaaggagatctcactcgaggaggaggaggaggaggaggaggagaagaagctcttcgcctcgtcggtctgccaggctctcagcgacgacgagaaggggtcgccgaggagcactctggtggtggtggggcacaccgatgccgcggagagcccgcgcgcgacgacggagaaggcgaagggcaggaggccgccgccggctcgtggccatggtggctcagcagctccccacttcatgtcctccacggtgtgcagccggcagagacggtacccgccgccggctgctgagctgagtgggagccagaacgcggcggccagggctagcaggtcggcgtcagtggcactctcgtccggtgtgcacaagttgaggtgcttgcgtgtcaacaagtccgatcaggtcaacgtaataagcaacagcagcgtcgactcgaccgctgcgtcggcaccgccgccgcggcggagggaaagctgcttcggctccaggccggttctacaaagagcggcagcgcccctgcatctgcacaggaggaggatgtctagcctgacatgaacaccgattgcacagttatgatttttcttaacttaattgtttttattagtggtgaaagggttctgaaagatgtttgtgtatgtatggttgttagcttcgtagttcttgactgctgtaactattggttggaggccccttgggcttttgttttttttttgggtttggcttggaaggggcaaaatgatgcgaggaataattgttgatacatggaataatggaatttacctgtggttctggttgcgatggattttgaatggaatttgcgaggtagcaaaacaatctaacaagttacgtagg

SEQ ID NO: 25672 - DNA, 1820 bp, Zea Mays
acatatgctgtttgcctgttctgcaacaaagagctatgataccgtgagcaaagatgtaattcaaaggtggacatatcctatggtgcctgatgtagtatccagtcgtgattcctcggagagtagacttcataggcagggaatatacaaggcatcagatgtaacattgtcaccttctgcacaaatcggtgcaaattctgttgttggtagtgtgactagtattgcaggtcactgcaaagttttaaattcagttattggacaaggctgcaagattgggaaaaatgttctgattaacggctcatttatatgggacaatgtcataattgaagatggatgcaaagttagtaactctttagtctgtgatggtgtccatctaagagctggtgctgttgttgaacctggttgtgtactgtcatttaaggttgaagttggaaagaatgttgttgttcctgcccactcaaaagtttcattacttcctcagccttcaaatgaagatagcgatgaagaacttgagtatgctgacactaactctggaattgcagatagtccaccattttccagtatgaggagtaatggtgatcaagcaactgttccttcagaagaagatgagttgggaacatccgagactggcacctgtggtgttgtcggttacatatggacaagtgttgatagtgggatcatggaagaatggagacaatcaattgcccctattcctaaagaaaagcttgaagagctgcagcatgctgtgcctgatgatgataggtcagaagatgaatccaacaatccaactctaccagataaagatgattcttcagacagtctggttgaggatgatgatcatatttctaagtttgagaaagaggtggaagagacattccaacgagctctgggtggcggcgttaatcgagataatttgatactagagattaatggcctaaggttagcctacagccttcaacatgcagattgtgctggagctgtgttctattctgtcatgaagagtgcattactggctgcacaatctagtaatgatactcttttgaagacaactgctgatgcacttggcaagtggaaggatcttttgcgcaattacaccaagacagttgatgaagagatggagatacttttaaagtttgaggaaatgtgtcaagagaccacaaaagatttttctccgctgtttccaaagtaagtgaagatgcaattttgagatgggcggaagagaaagaacatgctgatgagtctgataaagtttttgttaaacagtcagaggcttttattcagtggctcaaggaagcggaagaggaggatgacgaagaagaggaataaccctggagttgagctggcactcgaattctttcatgcattgtgagcgcaggatctgatttgagtgggtctctcgcaaaaatcgaaggacgatgaaaaaaccagaagggccctgggggccaaaagaagaggaaaaagccggcaggagtagcagtggaaggttgcacttgcactgctgggctaagcaatctcgctgtgcgttcgcacatcttctgcagcatgtgctgtttcgagtttataagctgcatactgtgactagtgtgcattgtttaatgttggtgatggttttactatgaccatgagaagagaaagcatgcagttttcctaatactgtttgacctttgtaatcttctggtcgtaaagagttaccgcggaatcacactggacaattcgtcgataagaggaatcgcattttggacttgggatgtgttctgtgcggataagaggaatccatctttagttctggttctgacctcacagccacgctggtcgatcgagat

SEQ ID NO: 25673 - DNA, 4317 bp, Zea Mays
tctccccctctgttttcttgggtctgatttcagaaagaagaagcttgccagcgctgtggaaaaagtgataatctagtctcttgttcaacatgtacatacaaatttcacagaaaatgcttggttccttgcttaaacatcacatctgataaatggagctgcccagaatgtgtaagtccattaacagagatggagaggattctagatattgaagtgctggaagcacctcgtgaagattctagttccacagagcctcgatcaaagaagatggagcgatatcttatcaagtggaaaggattatcatacattcactgctcttgggtttcagaaaaagaatattcagaagccgcgaatatacaccctcgtctgaggactaggttgaataacttcagaaggcaaaaggaagccatgaaaatagaagcagaaagatctggtgaggacatcgttgcaattagaccggagtggacaactgttgacaggatccttgctagcagaaaaaacttagttggcgatcgggaatactatgttaaatggaatgaacttacatatgaggaatgtacatgggaaaatgagtctgacatcacggtgttccaacctgagattgaacgcttcaatgagatccagttcaggcgtaagaaatctggtgacaagggcaaggccactcgggagccacgccaattcaaggagagccctacgtttctttctggtggcacactacatccctatcagcttgaagggttaaactttttgcgatattcgtggtttcataacaaacgcgtaatccttggtgatgagatgggtcttgggaaaacgatacaaagtattgcttttcttgcctcactctttgaagacaagtttggtccgcatctggtcgttgctcccctctcaaccctgcggaattgggagcgtgaatttgcaacttgggcacctcaaatgaatgttgtaatgtattttggagctgctgcttctcgtgacattattaggaagtacgagttttactacccaaaagagaaactgaagaagctgaagaaaaagaaatcttctccatctaatgaagataagaagcagtcaaggataagatttgatgtcttattgacgtcttatgagatgatcaacatggactcgtctattctaaaaaatatagaatgggagtgcttggttgtggatgaggggcatcggttgaaaaacaaagattccaagttgtttggtcaacttaaagattataataccaaacatcgtgttctattaacggggaccccagtccagaataatcttgatgagcttttcatgcttatgcacttccttgagggtgaaagttttgggagtataactgatctccaagaagagttcaaggatataaaccaagacaagcaaattgagaagcttcatggaatgctgaagccacatcttcttcgaagattcaagaaggatgttatgaaagaacttcctccaaaaaaggaattgattctacgagttgaattgacaagaaaacagaaggagtactataaggcaattctcaccaagaattatgaagtgttagcccgtcgtaatggtggacatacatctctaataaacgttgtaatggagttgcgcaaactctgttgccatggattcatgattgatgaacctgatcttgaacctgccaatccagaagaaggtttaaggaggcttctagattcatcaggtaagatgcagctgctggacaagatgatggtgaaactgaaagagcagggtcatagagttctaatttattcacagttccagcacatgttggacttgctggaggactatttaagttacaggaaatggacttatgaacgcatcgatggcaagataagtggcgctgataggcagatacggatagatcgcttcaacgctaagaattcaactaggttttgctttcttctttctactagagctggtggtctgggaataaacttggcaactgcagatactgtaatcatctatgacagtgattggaacccacatgcggatttgcaagctatggcaagagctcatcgcttaggacagactagtaaggtgatgatatacaggcttgttagccgaggtacaattgaggagcgaatgatgcagcttacaaaaaagaagattttattggagcacttagttgttggtcgactcaccaaagctaataatgtcaatcaggaggagttggatgatattatacgctatggatcaaaggagctttttgaagacgagaatgatgaatctcgccaaattcattatgacgaagctgcaattgagaggttgttagaccgtgatcaagttgacggtgatgaatctgtggaagatgaagaagaagatggattcttaaaaggattcaaggttgcaaactttgaatatatcgatgaggcaaaggctcaggcagaaaaagaggaggcacggagaaaggctgcagctgaggctgaaaattctgaaagaaactactgggatgaactattgaaggatagatatgatgtacagaaagttgaagaacatactgctatgggaaaagggaaaagaagccgcaaacagatggctgccgctgatgaagatgacattcatgatttaagttccgaagatgaggattactcattggaggatgacatttcagataatgacacaagtttgcaaggaaatatttctgggaagaggggccaatattctaagagaaaatcacgtaatgttgattctattccattgatggagggcgaaggacgtaccttgagagttcttggattcaaccatgctcaacgagcaatgttcctacagacactcaatagattcggttttcagaattatgactggaaagagtatcttcctcgtcttaaaggaaaaagtgtcgaggaaatccagagatatgctgaacttgtcatggcacatcttgttgaagaaattaatgattctgactatttttcagatggcgttccaaaggaaatgatgcgtgttgatgatgtactagtcaggatagcaaacatatcccttattgaggagaagatggctgccacaggaccaggaaaaattacaaacatttttcctaattacttgctctatgagttccaaggcttatctggtggaagaatatggaaagcggagcatgatctactgttactgagaggcatactgaagcatggatatgcaaggtggcagtatatatcagatgacagagagaatgggctttttgaggctgcacgacgagagcttcatctcccttcggttaatgaaataattggtgctcagttgaacgaggggaatttggaaggtgcacaggaaggccaagcgaacacaacaagcatgtcgcattacaaggagatccagagaaagatagttgagttcttgagaaagagatatcatcttatggagagagccttgaatatggaatatgctgtgataaagaaaaaaattcctgttcctgatgatattactgaacaaggtgttccagcaggacatgctccttttattccagatatcagtgaactgttgcgggaattgcccaatcttgagccaatttctaccaatgaattggtttctgagggcacagctggtcagttacaagttccccatctctacaataagatgtgtggagtgcttgaagagagtggtgcttatgcgctcagttccttctttggagacaagtccgcatcttctagtttggccaatagccttcgacagtttgaaactgtgtgcgagaatgtcgtcgaggccttgcgaccacaccaaaatggtactggcagtgccatcaaagaggaattggtagatgcagccaccaaagcagcagcagcagcagctcctcaacaagattcaggccatgatgcaccgcatgggcagtcttcgacagccaaggcggacatggaaatcgatggttgatttgtaggttccagagtggtaagaaagggaatccccctctaatcattatgtatactgtggtcagaatgtgcgctatatattgtaacatcaaagaaagcacctccaggcctgagggtgttactgctaatgcgtttggtttacttgttgtccttgtaatatgcatacacatttagaactcatgcagccattttgtgtgctcgaaccggtggatcgctgccctgttgtcttgtactgtgtttagggcctgtttggatacgaatggttaattataagacggggctaaagataagtacggataagtacggattagctatagttggctagcttgttggttaacaattagctaaactttggctagctagatggtaaacaattagttaaaagtttagcaaaagaattagttcacctattaactcagtttgttgcctcctttttattatgccaactaatttg

SEQ ID NO: 25674 - DNA, 3413 bp, Zea Mays
ccttgcctcgcttcccctcccccgtctcctgttctcttctcccttctccgtctgcttcagcccccagaaatcgaagccaccaccaccatagagctccgagcccctcgccctcctccccgcctgttcgctgcgtggatctacaggcaggatgctcactcccgcgcgcgcgggcgccgctcggtgagcggctgtgaagaaaaggtgcctgatgagaattgagatagtgggcggccaaggaagcgaagtttctcgcactccacctgttgaatttaccaacttggtatgctggagtgtaaggataagagcagacccaattgcttcacagctcttgggttcttagtgccgactgtagcagcagcagatctggggcgagcagcgaaggcgttcatcagatgttatccagtgagcagccttcaggcccctcatgttccttcaagtctactggcccgggtgtgagcactgatccggcaacctccgtggccgaggggccgccgagccaggatcccagagatctggtccaaccttatcccaagttctccataaggttcaagcatatccacatgatgatattaacgaggaaacctccgaggaggagtggcatgcgcggaatccttttgaaagcaccagcaattgttgttccaggactatgcagcagtgggtgtgctccaaacgctcagatatcgccaagagtttaagcagaaaccatagtggtaaagcatttgataaagtgatacctggagcacagaaatcggataggaacaacatgcttggctttaatgattctcaagttccagaaagtcctgctggggcgttttcttcggagtcaccagaatacatggccacaacttcagaagccattggtgttgagcagagcaatggtccttcaaaagtgcttagatcgattcctacatggtcttcaaaaactcaccgtcttcagagcagtgtcatgccaaaaacacctagatcagctgctgctcttgcaaagagaaaaattaaggagattgggaggagagaagctaccaaattagataattacaatatagtgaggaatcccacttcagtgaaaagatctgaaactaggactctttccttcactgcagggccaagcaatggatcaaacaggttagcatctacctcaaagaagatccggaagcatcgatctctgttgaggaccggcaagcgtgcattttcaccttttagtactagagtagttcatggttttggtgaagagcgtgaacttgataccagacatgtaaataagaaattccggattactagtaatgaggttcccaagaagtttttgaagcatactgaagaggatactgcagataatgacttctctcttgcaagtgacatgacagtatcaggacaacagaatgatcaatatgatgttgcacaggaaacagagggtacacaaatggattgtgaaggtgaagatgctgaaactgatgtgccatatgattctgtatccagaagtgatcctgctgactgttgcaaccaaataagtgatgtttctctgagtcctgaaaataacagaacaacagatgatgatgttttagttgaaggctatagtgtagctgtggaggatccaaactccagtgagaaattagcacatgggcatgaatccaactgtgctaccaataatgaaatggatgaatggcagatggatccgacttcaacaaaggaatctagtccctgcttagttagtaacagggacatgggtcctggaggtcctcaggataactcatcaataacatcaaatggagaaaactttaatcaagagcatggtctgccactcggacaggactcactagattctcctgtatcaactgcctcaactatgtcccctccagctgctttgaaggattcaaggattaacgatgaagaacctggcccatctactggtagaactgttgaagagcaaatcactgggtgcttgaatcaagaagccaagtcaatacctatggccagagaaggtgaacttcccaaagagaagccttttcgatgttcttgccaggagaacatttccagagagtctcatcaaagtgttgttgccagaccaacgctgaattttactggaaagcaggttccgcaattgcacattggttcgagggcatcatcatctttcagcatgtaccaaagaaccagcgcaaagcccaacccctgcttagattcacatgaacatctttcagcggctaaggttgcagcggaatctgctgtcagcctcccttcttactcaacagattgcataagcccctcattacaaactcagcttccttcgccatcaaatcctatcttgaggctgatgggtaaggatttgatggtgatgaacaacgaagagagtgtgcatcctcaagcaccaagttcagactacatcttgagagggaattacgaggcacctgttggttttatgcctccaagctaccaacatctcggtaattctggatttatcagcatgccaccaaccgcagccagtcaccagattcctctaccaagtgttcaagctagcggccttgttgctcctccgttgcacagcgtttccatgatgcaacctgaacatcattcccagcagaagtcctacagaaatattatgcctgccatgcatcatccaacctacatgatgaaagaagtgattgtgatcaaggactctcctgagcgtagtagaactgagccacaagctagcatgcttttcccccctgctccacctcccgcactctcgataccaaacaatacgccaccacgtccattttactgccttccaccgcaaatcccaatcttgccaagggagagggctgctggatccatgcctgtgtacgcaaactttggcgcattggctggtgtcagtccatcaagtcaagaaagccaaacgggagtaaccaatccttacatgccgaatccgttcttcgtccagtcccgaactggttacatgaaccacccgccagtgtactactcacagaatctggggtgatgatttctcagtagctcaaatgaccagaactccatttaacttgccggtcgtcgctgtcgaagtttgtgggggatgagagtttcgtgatgggtcaaaaacatgctgagatcaatgaacctgcatgagatgtgtctgactttcatgaggattttcacataggttgctttagatttttccccctttctttctcccttaaagctacagcatgtttgccgtcaaaagtatcttaattactctctgcaaagctgcagtagtaaattacagtgtgcaattcccaatagctctgcaaaggaatatatctcagtatttatcgaaaaagctggcatttgatattcccagttgcatgtttatagtctgatgtctgttctttttacacactgttctgccggtgtttgctgcctcagcagtgttaactcgtgatagttaaggggtgtttggttccttt

SEQ ID NO: 25675 - DNA, 1804 bp, Zea Mays
aaaccggagaacgggaagcgaccagagggcggccgcggcacgcgggtcgtccccattccagtcttttcagaacgagattgcatcgaggaaactacagaaaagggaccaaatcgaatccgtggtgcactgcccctccccctccctcacaagccgccgccgccgtgaggactccggcgaatggcgtcccgcgtcgcctcgggcctcctccgccgccgcgccgtcgccactctagggctactaaggagtcatacacatgtcagaaactacagcagtcaactttcagctttgattccagctacttctcaatgctcaaatctgacaagaagacgctattacttacctaatccatctctgtaccaagtttggagtaggtcatttgcctcagacagcggagacaagttcgaggctgttgtgcccttcatgggtgaatctgtaactgatggaactcttgctaacttcttaaagaagcctggagacagagtcgaggccgatgaacccatagcgcagattgaaactgataaggtcactatagatgtcgcaagtcctgaagctggtgttattgaaaagctcattgctagtgaaggcgacacagttactccaggcactaaagttgcaatcatatccaagtctgctcaacctgctgaaacacatgttgctccatctgaggaagcaacttcaaaagggtcttctccgccgaaagttgaagagaaatcaagggtagaggaaaaagccccgaaagtagaacctcccaagatgcaagcaccgaagccaactgcaccattaaaaacgtccccttcagaaccacaactccctccaaaagaacgggagcggcgggtgccgatgccaaggctcaggaagcgtattgcaaaccgtcttaaggattctcagaacacctttgcaatgctatctacatttaatgaagttgacatgaccaatttgatgaagcttcgttctgattataaagatgaatttgtcacaaagcatggtgtcaaattgggtcttatgtcttgctttgtcaggctgctgtttctgcacttcaaaaccagccaattgttaatgctgtcattgatggcgatgacatcatatacagagactacgtagacgtcagtgttgctgttggcacttccaagggccttgtggtgcctgttatccgagatgctgataccatgaactttgctgacattgagaaagggataaacaaccttgcaaagaaggcaaatgagggggcgctctcgattgatgacatggcaggaggaacattcactatctccaatggtggtgtctatggaagcctcctcagcacacctatcatcaaccccccacagtcgtcaattctggggatgcattccattgtgcaacgccctgtggttgtgaatggtgacattctcgcaaggccaatgatgttccttgcgctgacatatgaccacaggctgatcgatggcagagaggctgtattcttcctccgtcgcatcaaggatgtcgttgaggaccccaggaggttgctgcttgacatataaagttacttaccagtgctttcccgccgactgttttgtgctttctggaaataataccatgcaaatttttgactgatgaaaaagaattgcttcctcggaaagacgaattctgagctgaggatacagtgaggtttttctctataatcgtagaagagagcagcaaactcaactcaatgtgaggtcatgtttcattttcgggtataagatgctccatttcgggatgcagttcccagtaattttatttgccatgcaagagcaatagaagctgctgcatttttgtttgttggttc

SEQ ID NO: 25676 - DNA, 1967 bp, Zea Mays
acctctggctcggcttccaaatccaaacggccgtgggctcgcctcaggccacttcggtccctcctcgagctccatccgatcctccctccccgtcgtgccggcatcgcgcgcagggaggaccggccggacggccggcccgcccgcccgccgccatgccgggatcgcccaaggtcttcttcgcctcctccgcctcgcgccgctccgggtcgctgcgccggctgctctcgacgccggtcttctccgcggcctgcctcctcttcggcctcgccggcttcgtcgccgccgcgctcgccctctcgcgctccccgtccgtcactcacagccgctgccccgattcctcgcgcccgctctccgtctcagtcgcgtgggaccgcagcccaggggatggctccgcagggggctccgcggagctcccggcctcgctcgccactggatcgcgcggccgccacaaggtcatggccttcgtcgggatcttcaccgggttcggctccatcggccgccgccgcgcgctgcgccggacatggctacccgcggatcgccagggtctacttcggttggaggaagctactggtctggcattccggttcgtgattggaaaaagcaattcaaagaacaagatggccgctcttaatagagaagttgaagaatatgatgattttgtgcttttagatctcgaagaggagtatagcaggctcccgtacaaaacgttagctttctttaaggctgcctatgcattgtttgattctgatttctatgttaaagcggatgatgacatttacttgcgaccagatagactttccttgcttctggctaaagagcggtcacatccacaaacatacattggatgcatgaagaaggggcctgtttttactgatcctaagttgaaatggtatgagccccaatccttcttactcggatcagaatactttcttcatgcatatgggccaatttatgctttatcagctgacgtggtggctagcttggttgctttgaggaacaacagtttccgtatgtttagcaacgaggacgttacaattggatcgtggatgcttgctatgaacgtcaaccatgagaacacacatgcgctctgtgaacctgactgcacggagtcttcagttgctgtttgggacattccaaaatgctcagggctatgccacccagaggtaaaaatgctagagcttcatcaaagaaaagaatgcacaggtggtccaaccgttgcagccgaggtgtccgagtccgaggactgatgatttctcggttggaacacaaactaacggatccgatagttgacctccgccctcactcagtagatgcgtttggagtattcgtttgattcattcatttatcagtgctcatgttcaccggtcaaccagccttcgctgtccggacaccgaaaggtttgttgtgatggtgtagcggcgatatggatgcaaagaaacagatgcttggagggctcttatgatatatcttctgcaaggacttggtgatggtgcgttggaggcttggagccaagcgcaaagaccctatcacgggccctcctgacgggcgatacggatagcgctttgttcagatatttggactagcgctcagttgcagttgcaatttaattgcaatttataaagacagaatacggtagaaaaagtagaagccgtttccgaataagtcgcagcagacaggctaccttggagagtgattgctgcaaaagttctctataaagccccgaccacatgccttggttccatgaaaaatctataccatttgatttgtaaatgaagaccaccagtataacaagttacaagaggcaacacatgcatgcagctgccgggacacttttttcccggcaacgtaaacacaggtataaataacatggcaacaataaaaaattaatcgccctcccctcgcttagcttagctgtggaggatggcggggcggcagtagggcccgttgagccagccgtcggtgatctg

SEQ ID NO: 25677 - DNA, 2686 bp, Zea Mays
caggcattcagcctcaccgcacttgtggcctggcacgtgctgcgcgcacacccaattctagcccacgcaagcggccgatacgagcgcctactacctctggcgctgccgcgcgctggcgaggccatcgaactagattctagcagcatctacgatgaaccctgctccccggcacccaagcactgcacagacacaaaatcaaaccaatgaaaggtatggaacatatcctgttgctgcccgtaatcttcgggaagatgagctaggaggagtgatttttggctgcaaacacaacacaatcggtgaatgcctctctaaacagctgtttggtttgccttcaagccatttctcatatgtgaagaatgtcaaacctggcatgcctctatttctgttcaattatagcgatcgaaaaatgcatggaatttatgaggctgcaagtgctggcaagcttaacattgaccaatttgcttggagtgatggtggtagaataaagacacaatttcctgcacaggtcctcatctctatgaagactgcctgccttccagttccagaatctcaattccaaagtgtgatcagtggcaattattacaaacctcggcacttcttctttgagctagaccatgaacaaacaagagctttgatatttttgtttaagcctgcccctgttcatgatgtttcaaacaaatgtcatccttccaaatctattcaatctccaatagtcgaagcatatgtcaatcctgatggtgaatatgctagtgagagtagaacgtcaacgagccaccttgacaaggaggcttctaactgggatgatgttacgaccaaggaaggaactgaatttgtcaataatgaccatccacatattaatccaccacataaacaacaagatatgtttgttttacgacagcatgaggctgaatcctccaaggacactgtggattctgcttcaaataaatcaatgcctcaagaagcacagtttgatgccactctccccacagacccatctaattccacttcagtgggtgatgtatgtattaaagacctgacatcactggggcaatctcgtggaaatgctgagctgcttcacattgtcaaagagttatccaagaggaaccaagcaatggagaaaaaactgtctgagtcagataaagaaatactgtttctgagggaatcaatgaaggacacaggaagaagaattcaggagctggaatatcagtatgagaaactacaatcaaactataactctttagtcccactccttggtagtcgacatgataatatggaagggccatcaataatcttaatgggtggctacaggggcagtacttgcctgtcatcactagattccttttgccctacgacagacagagtagtgcctctgtgttcaatgagctcagcccgtgcatatgcagccgctgttgcattgaaggaccatctctatatttttggtggtgggaatggcagttcatggtatcacacagtggaatgctacaggatgggcagtaataaatggatagcatgcccccgtttgaaacatgcaaaaggaagccttgctggaactacattgaatgataaaatatttgctattggtggtggagatgggtctgcagttttctcagaagttgaaatgtttgacccagcacttgggagatggatagacaatgtgtcaatgcggcaaaagagatttgctgctgctgctgccgtattaagtggcacactctatgtaactggtggttatgatggcaacacgtacttacaatcagcagaaagatatgacccaagggaaggtttctggactctgctaccaagtatgagtgcaagaagaggatcccactccgtagctgtcatgggggaatccttattcgctgtgggagggtacgatggaaacagcaatatttccaccgtagaaatctttgatccgcgtgccaattcatggaggataggccgttcatgcagcattgcaagaggatacggatgcgcggtgacgatggacggcaatctgtacttcattggtggggtcaacgatgctggagaaactctcgggactgtggaggtctacaatgagaggcaaggctggtcgatctctggctgcaaatccgtagggaagagggcctttgcctgcgctatcaccgtttgacatgatcgcggatctcataccctacctttttttttttttttttttttttgcaaccagcagtcactcatggttcgcagcctttgccctcctgctggtcctactcctaccacgttggtccgagtatacctgggttgagagaaattttgctgcctccccccccccctacttatactacttccgtccgtgaacaaatcaacttctagaggtgaattgagccaaacttttgcaaacgttagaaatgttgaacttaaggtaactataaaagttaatttatttgggggatggagagagtattagacaaagccaccaaatgttctggtggtgcatttgggaattgacaatcacagagcaccaccaaatggctaagggccacagtagcatgttctgctgtgtaatgtccaggcagtctgctgctgtttgcgcttttgagaaactagacatggtgtcatggtaggtgatgagacgtaggaagatggggaccaattgctgaatgctgccgatagctcaaattggcagccggttcataatcgtcgctgcaagggaatcgctctgatcgct

SEQ ID NO: 25678 - DNA, 786 bp, Zea Mays
agtctctccacaccagtgcggcttttcctttccgttccactccacatcgattcgcctcctccgctctttactcttcgtcgtactcgtctcctcccacccgcaaccgcagggagagaaaggggaagcccgccgccgccccggcccccagcaaccagcagatcgggacctctgttctgcgcaatccatccatggcggccgtcccttgccaaagtttggtgaatgggatgtcaacgatccggcttccgcagacggatttactgtcatattcaacaaagccagagatgagaagaagggtgggaatggtcaagacacagactcaccttccaaggaccccaggactgagagggtggagtcttatgctgcaaaaccaagcacgaaatggttttgttgtgtgacagccagccctacgcaatcctgaggaaggcaattgcatgcgctggaaatactgcccctttaattttctatacatactatccataagacactgtagaggtacccatggctctctgggctccaggatgggtgtctcataaaactctggcgtgcatgtatgtatgtatggtgtgagagttgtcggcatacatttgcaaagtggacttctgcttgtaattctagtcctgtctctcttttttttttcctgttggtctgctagtacgggtccgaatttgtgtgttcgtttcaaagtggattgagtgggattaaacccttcccgttcaaaattgaacatgaagggatataatcctcctcaatcccttacaatctagatgcaactgaacaaaggctccg

SEQ ID NO: 25679 - DNA, 1252 bp, Zea Mays
cttatctttaaactttagactttgaaacttgctagccaagctgaaaaacggttgcatataaccagaaagcttaccaaaaggcactaagcaaagctccgggatatactgattcctcgatctttatataggaagtgtacattgctttattgtttcattcagattttatttatgcgtagattagtgtcctccttcgggccagggttgagactttgaggcatagcccagatgattttagcaaagccaaaaggtagttccgtcgggaaagaagaatatctcgtcataccaactaaatgctttgttcatgtctgccatttggtttatcatagagccatagaggcgcatctgtccatcctcgtatgggtgtggtgtctgctcagagtaaatggctggtggctggttctcttgcttttgcagctatttggaagcgtgatgctgaaattatgtggtttttgctgggtgcggttggcaactctctgctttcgatggttcttaaaaagatgctaaaccatgaaagacccgcaccagctttgcggtctggccctgggatgccatcgtcccatgcacagtccatattctatgctgcgaccatcctggctctttcattgtactactggcttgggacaaattatctgaccatgattcttgggcctgcaactctgtcggtggctgcctatctgtcttggctacgggtgtctcggcgccttcatacactaaaccaggtcatggcgggagctgttgtaggatctgtcgtcggtgctctatggtttgtgctctggcattcgcttgtgcaggaggcttttgcttcttctctgctggtcaggattgcagtcgttcttggatcatcagcattttgtgttggctttgtcatctacatgattcgtcactggctcaaggatgagtaatgtacttcttagccgcaatgggagatcgactgataggcacggtgcgtttggatgagtgaatccgttccaattgttatcagaatcgcttgaaatggtgtcaaatgggttgtgagtggagcgattcacgagtgaaaccatttttaattaaaattcaatctagtagttaaatgatttcacgaagtgattctagttcgtgatcagaaacatttcaagaatttagatccaaaatgtttctatacccatcatggtgcaaagacctctaaacgcacatttgatttctgttgtgaattagacctttttatttaacactgaaggaaagttaaagcatggattcttgtggtaccgaataa

SEQ ID NO: 25680 - DNA, 4676 bp, Zea Mays
cttttagacatgaccaatgccctatgcacaatatgctgccacagtctaagctggtgcatgcgcagcgatggccgacggaaagaaaaataaggaaaagaagcaaaccaacgcgagcgtgtgacccagactggcagactcccagtcgcagaggccgcacgagagattaggatggtctgcccatccgtataaaaggcgcggccggcgattgcagccccctccgtcctcgttctcgtcttcgcgccgcctctcatcttccgtgagccgaagcttcggcggcggcggaatatggcggggaaaaccaagggtgggaagaacaaaggaaaggcgcagggcgctggtcagtccgcctctgctgagccagaggtgccggcgactgacggagccgaagtggtgaatccagagaatggggaagtaaacgaaccccccgtcacggaggatggtgtgaaaaatgttgagaaaggagacggggatgccctggaggttgtgcagcctgcaagaaagccagctgaaggagagcttcatctatacgctgttcctgtcaggacacaatcagatgggtcagctcatcagttggaagactacaatgaaatatctgaaatagcagatataacttctagtggatgttcactggagatggttgctgcaatatacgatgagaggtctattaggtcacatctccgacgtgtgagggagctactatctctgtctagtctttatgtttccctatcaacatccttagctctgcatcaggagtctgctcaaggaaaatctgcaggtcctgaaaaaggccctattcaggagcttgatggtttaaatttcatggaggatagtgctggcgctctcactaatttattggcttctgcaccagcagagataaaatgtgttggaagcattgttttttcgtctttcaatcctccgcctagttatcggaggttacatggagatctcatttatattgatgttacaacactagaaggaaataaatactgcattaccggaagctccaaatttttttatgttaacagtagcaaaggaagtatatttgactcgaaacctacaaaacaaggactggaggccagcactctcataggcctactacagaagatcagtaccaaatttaagaaaggttttcgtgaactcttggatcgcagggcatcggctcatccatttgagaatgttcagtctttgcttccagtgacttcttggttaggagcttttcctgtgccagagcatagaagggatgaagccagggctgaggactcggttgtgttgtcgtatggcaccgaattaattggcatgcagagagactggaatgaagaattgcagtcctgccaggagtttcctcatggcaatcctcaagaaaggatattgcgtggcagagcacgctataaagtaacatgtgattttgtggatgctgcagtaaaaggtgcagttggtgtcattaatagatgcatacccccaataaatccaactgacccagaatgttttcatatttttgctgtcgacgccgactatgaatacatttcaaaggaccacaagccagattgccaaaatgggtccagcagaagcaccaaggtttcctccccagatgtgatcactaagccagaccatgatgaatctgctgaggtagttgactcaaaatccgaagaggcacaaatcacagatagtgagcaggcaacatatgcttctgccaacaatgacttaaaaggaactaaggcctatcaagaagctgatgtttctggcctttacaatcttgcgatggcaataattgattacagaggtcacagggttgtagctcagagtatcatacctggtattcttcaaggagacaagtctgattctcttctgtatggctctgttgataatggcaagaagatatcttggaacgaaacattccattcaaaggtagtcgaggctgcaaagcggctccatttgaaggagcatgtggttttggacggttctggcaatcctgtaaaattagctgctacagtcgaatgcaagggcattgttgggagtgatgacaggcattacattttggatctgatgagagtgactcctcgagattctaactacattggacaagggcaccgcttctgtgtgctgagacctgaacttatagcatcatttgttgaggctgaatccatgaaacaatcgttgaagcagaaggttccagatgctccagttgcaagtacttctgatgctaaggctacctctgttgaagcagatgacaagtctgaagaaagctctgttcatacacacaaggaaaatgacaactcaagctccgagattcttttcaatccaaatgtgtttacggagtacaagcttgatggcagtccagaggaaatcgctgccgacgaagagttggtaaaaagggctggtacatatcttatagacatagtgatcccaaaaattgttcaggatctatgctcccttgatatctcccctatggatggacagactttaaccgatgcattgcatctccatgggataaatattaggtatctgggcaagattgcaggcatggtcaaacatttaccacacttacaggacttgttttctgctgaaataatagttagatctgcaaagcatgttatcaaggatatactgaggcaaagtttggatcatgatattgggccagctattgctcatttcttgaactgtttcatggggaaagttttaggtgcttctacagagggtagtctaagtgacatgcagtcaaagactctgaagggccatgaaaatagccaaactcaaaagtctactaaaggccataaactgagcaatgctgctgcttcaagaaaaagcttgtcagcttattctcatctaacctctgatggaatttggtttagcattaaggaatttgcaaaatcaaaatatcagtttgaagtgccagatgatgcaaggctttcagccaaaagggtagctgttctccgaaatctttgccaaaaggtaggaataacaattgctgcacgtaaatatgatcttgatgcttcaactccatttgaagcctcagatattttaaatctccaaccagtcgtcaagcattctgttccaacctgtacggaagcaaaaaatcttatggaagcagggaaagtcaggatggctgagggaacattgaatgaggcatatgcattgttttctgaagccttttcactgcttcaacagataactggtcccatgcacaaggatgctgcaaattgttgccggtaccttgctatggttttgtaccatgctggtgatacagctggggcagttgtgcagcaacatagggaactcatcataaacgagagatgtcttggtcttgatcatccagacacagcccacagttatggtaacatggccttattctatcatgggctcaatcaaactgagctggcactgcggcacatgtctcgcacactgctgctgctaagtttggcgtcaggacctgatcacccggatgttgcagcaactcttataaatgttgcaatgatgtaccaggatgccagtaatatgaataccgctctcaggtatcttcaagaagcccttatgaagaatgagcgacttcttgggcctgtccatgttcaaacagctgtgtgctatcatgctctagccattgcatttagttgtatgagcttatataagctttcaattcagcatgaaaagaagacatatgatatactggtaaaacaattaggggaaaatgactcacggactgaagactcaaaaaattggttgaatacatttaagcttcgagaagagcaggcaaaccctgcagttttacaagcaatgaaggctgctgcgatccaatcaggtggtgtgtcagcaaatgtcaacaggtcgctcaatgctgcagtcgttggagaaggtgtaccacgactgagaggagtggatgagcgagctgctcgagcgactgcagaagcacggaagaaagctgctgcaagaggccttaatgtccgtaatggccctgtggcaaaccatgcgtctgatgaactagctcagattctcaaactcatcaacgctgtttcggggtcttccactcctggctctgcaaagactgaggtatctgcctctgaagggcaggcaacgaatggatgtattcaaaatggaactgacactgaaccgaaggctgcggataccaacgggctatctgcatcggttaagtccactgtcaacgcaccatttggactggggacaacattggagtcgaagaagcagaaatcgaagcaaaagtcgtagaaaacctgtgcttggaatttcctttagcaacagttttggactgtagagtgatttgggtttttgacctttataggattgccacgttcacgtggtggaagagttcatttgtttttgttggaggttttttaggaggtctcaataatcattacaagaaagaagacaattgtttcgaatcatcattgatagaccactgatgagatattggctaatccttaagttaataaatcttcagtcgatacaatacctgtttaaagcatccttgtgatggctgctattgtttgtcgtacggcatatgctggtataccgttaatgtagttcttgatcatcgtatctttttctagaaggtatacccgtacaatgttgccaactattttattattgctatcgataattattgaactaggctgagcgctgttgcttggcctggccgtgaattatttctagcatcactttttgac

SEQ ID NO: 25681 - DNA, 2071 bp, Zea Mays
ctcttcccaaaactccacggagcagaagatgatgttgggaataatgatgcctcgccgagacgtctcgccgcagttgctggcttgaaggagtcccctgaacggtggtcagtggcagcagtggcttccccgtcagcgtcagcgtcgtcctcatccttcttcaaaagcctttcggagagcaggagtctaaagtttggcggcggtttcggttcgcctgcaccagccagcgccgctgctcatacggaagctttcagggtgtttgcagccacatggaacgtagccgggaaggccccggacaagggtctaagtctcaacgatttcctgccttctgatgactactcggacatttatgtgctagggttccaggaagtggtcccgctgaacgccggcaacgtgctggtgatcgaggacaacgagccggcgtcgagatggctggcgctcatcaaccaggcgctgaaccggccgtcgccgccttccgacgcctccgcggcatcggaagctccagcgaccagctgctcgttcagccggtcgtccctggacacggcggcggcggcggtggctgtgcagacgccggcgacgccgagcgccagccgctggacccatcccggttccacaaggcctccaacagggagatccggcgcgccgccatcacccgcgggcggcggctcaaggcgtgcacgtgcccgtcgccggaccaccagcaccgtcgccgccgccgccggcgcctgccgctgagggcgccctgcctgatgggctgcggcggcaggggcgcgagcgccgcagccgtcgagggcgacgacacgacgacgacgtccgacgaggaggacgaggaggtcagggccagcagcttcgcggcgtccgacgtgaccaagagccccgccgccgctgccgcctgggcggctgcgggtgcgggggcgccgggccggcgcgagaggtactgcctggtggcgtgcaagcagatggtggggctgttcgcgacggtgtgggtgaggcgcgggctggtgccccacgtcggccacgtccgcttctcctgcgtcggccgcggcatcatgggctacctcggcaacaaggggtgcatctcggtgagcatgtcgctgcaccagacgagcctgtgcttcgtgtgcagccacctggcgtcgggggagaaggagggggacgagctgaggcggaactcggacgtggtggagatcctcaggaacacgcagttccgccgcctctgcaagcgctccggccgccggatacccgagcggatcctcgaccacgatcgtgtgatctggctaggcgacctcaactaccggatcgctctgagctacacggaggccaagaagctcgtccaggccaacgactgggccgctctcttcgagaaggatcagctcaagactgaaagggagagcggggtgttcagagggtggaacgagggcaagatcctcttcgccccgacgtacaagtactcgtggaactccgacacctacgccggcgaggacgtgtcgtccaagaagaagaggaggacgccggcatggtgcgaccgcatcctctggcacggcgaagggatagtgcagctgtcctacatccgcggcgagtccaagttctccgaccaccgccctgtctgcggcgtgttcatcgtcgaggccgcggtcgtccccgacagcagccgcctcgtcaagttcgcctcgggccccaacatgaaagtcggcgcggaggagctcctgctcgcctcctccaagtatgatctatagcagcgcatggcaatccaaagcagcggccctactagagagactcaggaaggctaaccgaaaaaatgatcaaggaccacaccacacgccgttctgttcattgctattacttcaagaaccaagactgctcgctcccatccacagagtaccatcagtacagactacagagtacagcactgatacagcatcttcattctatatatgggccgtgattcatttgattttattaacttaaagttgatgtttttttcttctccatttcaagagggaaacaaaaatgcagtcttgtgcatgtttatgcaatgcccatacacgtctgactggcaaatgaaatagttgca

SEQ ID NO: 25682 - DNA, 4024 bp, Zea Mays
cgcatagggaggggaggaacattagcctggaccctggaaagagcaagcaagtcggcgacgggcaacccgtttcggcggcggcgctagggcgcggacccccagcaagtagccaccgcaggcaagctcctcctcccgcccgcccattggaatgcggagagatccacccgggagtgggtggattggtttcttcctctgttgatacttcaaatggactattatggactcagcttggtatctgaaaaagaaccagcatagctacactccctttgcaagactaatagactctaaagatgcctccctcaccatcacctaggagatctctgaaagaagtttgccacgcaagggggcatagttttgtcagtattctgcctgctaaatcgaaggatgatgaactcacgttgttcaaggatatgcagaaatatgagagggataacttcttactggaagcaacagaggattttgatgaatccatctcaaagttgagatattttcgagattcaaagattggtgtcaacattgctgcacgcggagaaaatcgtgatttacttaatactgatggtgaaagaaatgactatgattggctgttgactccaccagagaccccactttttcgttcattggatgatgaagatcaacacattggtatggctcataggggcagggcgcaggttaagccaatatcaatttcgaggtcttccacaatggaaaatactcaaagttttaacagaagaagtgcaagcccaagtaggcttagcccagcaccacgctcatgtagcagcactatgttgacaaggataagatcatcaaattcttcttcacgatgcagccctgcacttcatttgcaaccagcggcaccatcacgaaggtcttcgactcctccagcttctaggacatcaacacctccacaaaggtcaccaagtcctgcttcaaggaggttgagtactggctcaagtgacccaattttaaacagaaaaggaggaacttcgcctgttaaaaccagtaacaggccatcgtcaccaaaacttcaaggttggcaatcaagtgaccctggtttctcttttgacgcacctccgaatctacgcacatctctgtcagatcgtctagtatcccattcaaggggtggatctccttcatctttcagtggattggacatgaattggagaggtagaaggcaatctgtgtctcccactccatcaagaagagccagttcatcgcatagcaatgatcgattcagctcatacagcaaagcatctgcaacatcttctgctgaagacgacctagagtctatgcagtctgtgctgattagttactccagtagcccagctctaagaaagaacatgccagtaataaaatccagaactattgcatcacctaagaagccgtccaagagtttctcccctagttctggtccaaagaggtcctttgattctgcagtttggttaatggatcgtcgcaaagctcctcaagataagttcaggccacttctatcaagtgttccttgcaccacatttggtgttggcaaaggggataatgtacactcatctatgttgtctcataattcctcactcacaacaagcagtaatttaagctctgaccatggtgtcacttttagcccttgtatgggtaatgaacaaggaccaagtgatatagccggtgactgtgaagcaacacctacttacagtttgtctgctactcaaagtagcccaaaatctccaagcacagaaaaaaatgcggaaagtaacatggaagacctcaatatggaaagaagtagaatagtcgagacttcaggtaatgttgcaagtggttccaaggctgggctaactaaaatggcaacatgcactaggtgtgaaaagttatttaatgcgataaaagatgatggagaaattgatttgtgtgaagaatgtggtttagtagatgaggttctttttgtgaaccccaagatagagactttggaagaacatcaaaaagaccacaaaactagaatttctaaaccttgtgttgccttggaagctcctcacattactcccgatcatggtgaagataccaagaagtcatttcttgatagtcagctgttgaatgatgaacctccagctgattgtctgcaaaagtgtcctcagtctcagtcaacaatatatacaaccgacagaatgcttttaatgctgcatggagagaatgttaatgaaaatttaaggccagatgatgttggcaactcttcccaaggaagtagcctcgatatttcatcccatcaatgtaacataaataattatcaacaatcggaactagcatctgtagttgagtgtgataatttaagagatcaaactgccaaccaccagaatgaggtgttccaacgcctgccagggtcagtgtatcaaagcattgaatttgcctctaatacacttacctatgacagttgttgtaaacagggatcggctgggcattcaaatctaaaggttgaaaatacggagggtgctgggatttcagtactgctgcagaagtcaagcagtaacaaatggcctgttatagaagggcgacccttagctggtacaaatattatctgttcagaaccctactatacaagagatggtgttactatgctaaagcgtaccattggatgggatagttcatcagcgtcttccattgatcaagggtctacaaggcaatctggacatttggaacaccttaaaagtagtaatcgtcatgactttgagaagtctcaaataagtagtaccatgagttgtaaaagcattgcatccatgtcagacatgtcaagtagcaattgttcagtttcagtttgtcctcgggatgatgcaattgcagatactggcttcctaaccgacaattcagaaagcagtgctcctcgatccataatttgtactgaagaacttaatgagtcgtgtaagtacacactctcaagtgctatagagtgctggtctgctgcacaggctattgttaatgttggcattggttcaactgaagatgtagtgattcagaaactatgtacaggtaggatggttcacaaagattacacaagtgataactcatgttcatcagatactgaaacatgtagcaatatctcactctctctggctcctgaggaacgatgcatacagaaaattgaagaaggtacctcagttggcactccagaacacccagatggtgattgtggcatcagtaattatcaaatgcagcatgaaacaattcctgaggcagataggttggatgatggttgtgcgtctgttatctctgaggaggccaacataatggggcttcctggtaatgttgagggaccaagagaacaaactcaaagatgcttcaccttagaagaggctacggatacaattctcttctgcagctccattgcccatgacattgcatacagggctgcaacaattggactggagcatgaacagcattcagaacttgcttctgctcgtcgcccagcagttcccatggcaggacaatccattcccaggggtgatggttcacggaaaccaccccacagactagtgccaagacataggaaaagatcagaaggtgaaacagttacagaacctgacaagatggaagtggtcgctgaagatcctatacctgttcggccagttcctgaattttcaaggacatcaggcagcttcaagtctccaaaggtcgattcaaagtgcaactgtgcaattatgtagagttatgcatcaactcaagttggcaactatacttattatgatcactaaaatccatggttgcttgttattatttcagcgcatgtgagttaacaaatgaatctgcacccacctggttcagtaagcagcagcgacctacaattttttttggttgtggtgcatttgccctttatttctgggtcatagagtgctcaacgagccattcttttgtaaattcttgcttctccagtcagttctatggtttgtctatttttttttcctgagagtcaacatctcaagcttaagcatatttatataataaaataataacatttatgataccaaataagcatcattagatttttcgttaa

SEQ ID NO: 25683 - DNA, 664 bp, Zea Mays
aacaaactcaccacactacacggactttgttacaaccaccaccgagtaccgtccgtccatgaatcctctaggcgtaggcccatctatatgcccatgcctagcccttgccatgccccaccgtattatgggagaggatcaccaccacgcgcaggaaagcgagtacagggccaccgcacgcaatcttcgactcgccatcgattcatcctggatgagcgcactgtggatgtcaccagggagccatggaagctagtgcagacatcactcgggaccggagatgccctgctcacggtggattgcacaccgacggaagtctcagccatgaatctgccccacaccgcgagtcgatctcttcgtgacatcaccactggagaagaaaaggtatcgccagaggagactactacgatgagatctaggtgtcgtctcctagtcaattgttggcgccgaggaaataattatcttagttcaatttatttattatcaattattttgtaagacattttcattgtgtaataaagattatgacatttgtctctatacactgagtcattgtatgtgtggacctttacttggtgcacatatgagacgcacccagtttgcccttaaatcctggtgtgacagaagtggtattaaaggaatgttgactgaaggacataacctagataaa

SEQ ID NO: 25684 - DNA, 1643 bp, Zea Mays
gcaaggaaaaataaataaagcgtattttgtgtggggagtggcaatgaggaagatggcgggcacaaaaatgataaacctaacaagacggaggaggaacatatccaagacgatgctcatcgaatcgggaagaacaatcaatctgaagccaaattagagaagacaggtcaaccagcagcgaacgatgcaagtgacaggatggaggaagagcttatccggcaagaaatcgatcaaggcagcaacaagaacgataccatcatggagcctgcagctacggcgccacgcaagcctatctgcgacctttccgaccccaggtacgacatctgcgagatctccggcgacgcacggaccatgggagccaaccgcaccgttctgtacgtgccaccggtcggcgagctcggctcggacggccaggaatggagcatccgtgaccagtctcgcaagcacctcgagttcgtgaacaaggtcaccgtcaagtcgctgaacgcctcccagtcgctggcggcgccagagtgcacctcccggcacgccgtccgcgcgctggtgttcgcgatgaacgggctgacgtccaacccgtggcacgacttcagcgacgtgctcatcccgctcttcatcaccacgcgtgccttggagggcgaggtgcagttcctcgtctccgatctccagccgtggttcgtggacaagtacaggctcgtcctcaagaacctctcccgctacgacatcatcgacttcaaccaggacggcggcgtccggtgctacccgcacgtcaccgtcggcctccgcagccaccgcgacctgggcatcgaccctgcgcgcgccccgcggaactacaccatgctcgacttccgcctctacatccgcgagatctaccgcctgccgtccgcaggcgtcagcatcccatacaaggaggcgaacagcaacgctgcggcagctgcgcccggcgccccagctgagcagctgcagcggaagccacgactgatgcttatcaaccgtggccgcacgaggaagttcgtcaacttcccggagatcgtcggagcggtccagaaggctgggttcgaggtcatcccgatcgagccgcgtagagacctcagcgtggaggacttcgcccggaccgtcgactcgtgcgacgtgctcatgggcgcgcacggggccggcctcaccaacttcttcttcctccgtaccaacgcggtgatgctgcaggtggtgccgtgggggcacatggagcacccttccatggcgttctacggcgggccggccaaggagatgaggctgcgagatgtcgagtacagcatagcggacgtggagagcacgctctacgacaagtacggcaaggacaacccggtggttagcgacccagagtccatacacaagcaagggtggcagcttgggatgaggtattactggatagagcaggacatcaggctcaacgtcacaaggtttgctcccacgctgcagaaggtgcttcagatgatcagggaatagaggaaaatgagatcaatggaacatatgttacattacatttattattcatgcttagagatgaataggattaatcttgtttttttacatttggtatattggcctatacatggaacaattatccatatgcgtcaatcttaatccgtggtttctgttggatttaaatc

SEQ ID NO: 25685 - DNA, 1042 bp, Zea Mays
aaaagttaggcaaagtgtgccaagtgaggctgcaatccaaacatgcccacgtcttcgaagaaagcgacgggtgccggatccagacttcattccccaaaaccaaaataatcgccaccgctctccgcaccgaaccgaagcagcggcgatgtcggcggagaagccggctcccgtgcgcgtgctctactgcggcgtctgcggcctcccggccgagtactgcgagttcggccccgacttcgagcgctgcaagccctggctgcgcgcgcacgcgcccggcgtctaccccgacgacaaggacgtcgacaaggtcggggatcgcctccagggcgtcgggatctccgacggctccaccagcgccgcaggggatgcttccgcgtctaagccccaagaggcgaaacgcctgcctggtggtaagctcaagaaaaaggagaagcaagaagtggtcattgagaagattgtccgtaacaagcgcaaatgtgttactgtggtgaaagggcttgaattgtttggtgtaaagcttagtgatgcttcgaagaagcttgggaagaagtttgcaaccggagcttctgttgttaagggccctacggagaaggagcaaatcgacgtacaaggggacatctcatatgatattgtggagttcattacagatacatggcctgatgtacctgagtcggccattttcttcattgaagatggaaggaaggttcctgctgcttgatgccatatggtttataaggcacgagaccaatggatttacaaatataatacagaggtaaggtaagggcatggctgttaaggcatatatagggccataccagctcatctcttgtctgaagtcatgaactgttgttccggtttttaggcttacttcacaagtggcattctgtttaccatcgtcacctgcttccatgtatgaaatcaaatctatacagttaccaatttactatgactgtgtctgttgtatcacttccaaaagtctggacactgagagaaagaggatcatcggttagactcccattgtgtggcaccaaaaaaaaaaaaaaaa

SEQ ID NO: 25686 - DNA, 705 bp, Zea Mays
gaggattgtcaccaatcatgagcaaacgcaggaggtaaagcaaatggttgttgctacacttgcggagtcaggaatgaatcttttagatgaggtcatagagagcatcattgataagacttttgaggaggcagacacaaagcatgatgggaaaattgacaaagaagaatggcgcaatttagtagtgaggcatccctctttattgaagaacatgacactacaatatctcaaggacatcaccactacatttccgagctttgtcttccattctcaggtcgatgatacctgaatttctgaaaactaatgaatgtcagaaggtggactgcttgctttgctaagcaaactttcagtgcctgtttgatggttcaaaaatctcatcgtcctgaaggcatcaaatcatcgtttgttgttaataatctttttccttgttttttatttggaattcttgctggatcctgtgtgaatcctcttctattttccctctcaattgttcctttattctatttcggttttgatggccagtacttgagtcagttaatgtgtacaaagttgcgtctgatgctgcccgtcattgaattgtatggcatgtgaggaagatttaaattgtatattcaacttttgtggtcatgatagttgcacatatttttaccatcctttctaatttatatttgttatttttttcaatatagtaaagttcttgaactgaaa

SEQ ID NO: 25687 - DNA, 3130 bp, Zea Mays
agtgctcggtctgggctggtgatggagacgatgagtggcactgtgtgcagacactaactgaagccaataactgtggtcattcatcaacagtatgggcattatcctttaaccttaaaggtgacaggatggtcacatgcagtgatgaccaaacgttgaaaatatgggacacaagtgctgatttgtctcaaccaaaaactggcgaaggtcatgactcttggtaagaagttagttttcttttaaggattgtgttctctgcatgaatttggtaacccaggagtagcataacttagcccagaagcttaggctgtagaagaacctgtagctcaccagccctcagaacttctactttacagtactactatgtatcaaaaatattaatgtccttataccattttttattaatgctgattttgtgcatcaaaatttcacattttctgtttatcttgtcctgttgcaaatgcagaactaactagggtgtagctttgctttgcagagaagtgtttctcttatattgtcctttcaactcggctaaagttgacaagctgagaaatacttcccaccatgatacacttaatggctatggattgacttaagcattaactcttgtagttctcttgatggtgtatagtatgttttaggtaatcttgacaattaattcctatatattaaaccgctgtggaacaacctgcagcgaagtcatccacgtcgtctaaattatttacattgttccgttacgaaacgtactctgcacacttcccttgcacgtgggtctggaactttcccttcaaagacatccgtgccaggctaaggaggataaggcactaggaggataaggcgaggcgccacagggcagccatcgtgcgctctcgccgtcccgcgcagatccagcttccttgcgcggacgcccgtggttgctgctgtcatgctgccggatcccggcctagggttgcagctgtttcagatccagcgtcaccaggcgggaatcagacattgatgccaaagcgcaagtgtatagcccgaacatcaatacctttgatgtgaagctggggacctttgtgccgtcttaaaatgtcatcatctaaatgacgatatgttcggaagagatttcgagcagagcctgattccgtgcgggatctgctcaaggagccatattttgcagcccctgtttgtatcagtcggtcacctacctacaaaaccccggcctgaaccgtgtacagtgttatctgaagctgcagtgtttaagcagtgtgaagctattttgaagaagattatggaaatgtagtaatatattcaatgttccggttgatgttgagaagctgcaaattcctgattagtttgacattgtcaagatcccaatggatcttggtaacagtccacaagaagctccaatctggctcatgcacaagtccatctgattttgctgcggatgccaggctgacctttaacaacgctatggcttataatccttgggggcatgctgtgcacgacatgaccattcagttgaacaagatgtttgagagtcgatggaggccaaatgagaagaaactagcttttgctgccactgagaaatttgaagaggaagacaatacctcctatggactgcagtgagacatggagtgtgtatagcatgaaaaaccaaacatgacagttgaagagacaagcatttgagaactgtttggtttctatatcccattagttatctgctgcaacaatgcaacgacagcaatactgtcagtgactacatgctatttgagttgaagaaacatttgttattttctattattatatatattatgacatattaaacagtgcagcaacctcatcctaattatttaatactgtatttggtatgaaatgtcctattctgtttggacacttcactggcatgacacatgcgtctgaacatttctcgttggagatacgagatatatatgcgcgcactagcgcgcgctaatgactatttattattaagtgatatgttgtgggcgcctaggactgcgcagtggtgatcgcagcaaggcttgggattgtggaaggtatctcagtgggtagggggatcggccagaggaggagctggttctgtcagctggcccaaggtgcgccaggacgaccaaggaagctctaccggccaggtaaaacttcttttgataaccctaatacaaactacatcaactcctttatagattaggcaccactttattctcaaccacctctaacaactgagagctaatctctccactaaaataggagggctaactgactccctctttatctcttcttatcttctaaacaaatagcccagttaggacttatcctttgtggcgcctggcatactgccggcccacaaaggtgtctacaacatttccccccctcgccgacaaagagctcgtcctcgagcgtcatggtcgggtatctaagcttgaagtcttccagctgctcccaagaagtatccgtctctgctcggcctgtccacttgatcagaacttcccacacccccaattcagccttgcatggaggactttttctggtgtagggatgactctgccgatgaggagctcgggcagtggtataacttgggttggagcctcccctatgaatttcttaagtagagaaatgtggaacacatcatgtattctggccctaggaggaagctggagcttgtaagagacagtgcccaccctcgatagcacttgataaggcccaaagaactttgagccaagcttgtgaggtgtagcagaagtgacaccaactgttgtgcgctgctgtaagcgtagccatacccaatcgccctcatggaactccacttcacgtcggtgcttgtcctggtagcttttcattgtaacctgtgacatcaatcggtcacgaatatccgccaagaattcatcgcgagcatgtagttgtttgtcaatatcagccacctgtgatgttcctggatggtagggcagaagagcaggaggttctcggccatataccaccttgaatggagagcatcgaagagcagtttggaaggaagtgttgtagcagaattcagcccatggaagccatttaagccactctcttggtctatcccctgccaggcaccgaagatacatggtgataattcgattgaccacttccgactgtccatcag

SEQ ID NO: 25688 - DNA, 1759 bp, Zea Mays
ctccgcccccacaaaactccaaactgatccaagaggcgatccagcaacggagaagcccccacgccacgcgcgctcatctcctcgccgcctcgttaaccactccgccgtcagcgcaccggcagcccggcaccgggcgcgcacggtgcgaattggacgagtagccggccgataaccactgcgtctctctctctctctctctgtccacgcacgagcatcgagaggaaggtgcacgcgaggccatggcggccgccgcgttggacgccgaggccggcgccaccaacggcagcggcggcgtcagccacgccgccgccaagccggggcccacggccggggccgatgccggcgccgccttcgtgctggagtccaaggggacgtggtggcacgcggggttccacctgacgacggcgatcgtggggccgacggtgctgacgctcccgtacgcgctgcgcgggatggggtgggcgctcggcctcaccctgctctccgtcatggccgccgtcacgttctacgagtactcgctcatgtcgcgcgtcctcgaccactgcgaggcgcgcgggcggcgccacatccgcttccgcgagctcgccgccgacgtcctcgaccaccgtgaacaccggcgtcagcatcggctccatcctgctcgccgccgactgcctccagatcatgtacacgagccttgctccgcacggtcccctgaagctgtaccacttcgtcatcatggtggccgtggtgctggcctttctctcccagctaccgtctttccactcgctgcggcacatcaacttcgtctcgctgctcctgagcctgggctacacagtcctcgtggcagccgcctgcgttcgtgctggtttgtccaagaatagtcctgcgaaggactactcgctaagctcgtccaagtccgagcagtccttcgacgctttcctgtccatttccatccttgcctccgtcttcggcaacggcatactgcctgaaatccaggcgacgttggcgccaccggcagcggggaagatgatgaaggcgctggtgctgtgctactccgtcatcgtcttcaccttcttcctctcgtcgatcacgggctactgggccttcggcagcaacgtgcagtccaacgtcctcaagagcctgatgccggactcgggccccgccctcgccccgacgtggctgctgggcgtcgcggtcctcttcgtcctcctccagctgctcgccatcggcctcgtctactcccaggtggcgtacgagatcatggagaagggatccgccgacgccgcccggggccgcttctcgcgccggaacctcgtcccgcgcctgctgctgcgcacgctctacctggccttctgcgcgctcatggccgccatgctccccttcttcggcgacatcgtgggcgtggtcggcgccgtcggcttcgtcccgctcgacttcgtgctccccgtcctcatgtacaacatggcgctcgcgccgccgcgccgctccccggtcttcatcgccaacgcggccgtcatggtcgtgttcgccggcgtaggggccatcggcgccttcgccaccatccgcaagctcgtgctggacgccgacaagtttaagctcttcagcaacaatgttgtcgactaaaattccaacgcatcttgctcttatattactcctcagggtgttgtatatcatcgagttgttgtagcggtaatgtgagtaatcagggcatactagctgtatgtgtacatacattccactattcgagagtataggcaaatcatcatctaagttatta

SEQ ID NO: 25689 - DNA, 1120 bp, Zea Mays
atcaaggcccctggcatctcccgaaagtccaaagggcccctcccccgcgcctccgcggggaccttgttaacaaactgggccgcatccagggggcattctgcaaagcacgagcccgacttgggattgagggtgtcaatggagatgcttgtggatttgagcagtctaatttgggcaaaaggggtagagatgaaccatgttcatctggtctaaaatccaaagcttgtcgtgaaaaaatgaggagggacaagctgaatgacaggttcctggaattaagttcggttatgaatcctggaaaacaagcaaagttggataaagccaatatcttgagcgacgcagcccgtatggtggcacaacttagaggtgaggcagaaaagcttaaagaatcaaatgagaagctgcgggagaatatcaaggacctgaaggaggagaagaatgagctccgcgaagagaaagtgaggctgaaggtagagaaagataggctggagcagcaagtcaaagccatgagtgtagctcctacaggatatgttccccatctccctcatccagcttcataccacccggctgcatttgctccatttgtgccgccacagcaagctgcaggcaacaaaagtgctccaatccctgcacctttccctgggatggcaatgtggcagtggctgcctccgaccatcgtggacacaactcaagacccaaagctctggccgcctaatgcttaggggcagctagctgccttggggtgttgactcgccaatcgccatgccgtttcatgcattgggcggcagatcagagtatcagttagtaggtccctggagaggaggaatcaagtttcgcaactcgcgtcatgtttatgctgtaacagttgcttccagcagtcgtcatcaacttgctttgttctattgaagggtgatgcatgtaattaatatgtggatcttaaccctctagctggcaaatgtgtcctttgctgccttgtgccctttgccccgttcgtgagtggcctgtggaggccgttcctgttcttggtgtccgagattttgccattagctttgtgagacacatacatagcaggaaaagaattcgatgaactaaatctttaaaccgtctctataacgccagcaaaaaa

SEQ ID NO: 25690 - DNA, 1121 bp, Zea Mays
gtagcattacatccttcccatctgcactccacaatctacacgagtcaagagaatacatagtagagagaagaagatggtggctgccggcaggaacagggcggagcggtggaacctcgccggcgcgacggcgctcgtcaccggcggcagcaagggcattgggcacgcgatcgtcgaggagctcgccgggttcggcgcccgggtgcacacgtgctcgcgcaacgcggcggagctggaggagtgccggcggagatgggacgagaaggggctgcaggtgaccgtgtccgcctgcgacgtgtcggcgcgcgccgaccgcgagcgcctcgtggccaccgtgggggccaccttcggcggcaggctcgatatcctcgtgaacaacgcggggcagtccctgttcaagcggacggccgagtgcaccggcgaggactactcccggatcatggcgaccaacctggagtcgtgcttccacctcagccagctcgcgcacccgctcctccgcctcgccagcggcggcgggggcggcagcgtcgtgcacgtctcctccgtcgctggcttcgtcgggctcccggcgctcgccgtctactccatgtccaagggcgccctgaaccagctcacgcgcagcctcgccgccgagtgggccggcgacggcatccgcgtcaactgcgtcgcgccggggggcatcagaaccgacatcagcagcgataagacgatagacccagagctggcgaagagggagatggcgcgggtgcccatggggaggatcggcgagccggaggaggtggcgtccatggtggccttcctctgcatgccggcggcgtcctacatgaccggccaagtcatctgcatcgatggcggccgcaccatagcttagcttgctctggggctagttagtcccacttctcgcgttcatcatgcatgtatgtatgcgtacgtgacaaaccagctgccggcacacgtagtccattccgtctgtacatttgcgtgcactgtgctgtgaggatcatgttctcgttttaatttgtaatgatctacttcattccatcggcgggaatgcatcttgtaataaaatataatctcgatttttcttgtgtgaaaataactctcaaactatttgtttcaatttg

SEQ ID NO: 25691 - DNA, 2375 bp, Zea Mays
tttcactcgatttctctacttctactataatcagtgttatagtctaggcgtggaggatttattgtctctctcatctgaagaaattcatacgccgggttcatttctggtcatgttcaatggattaatactggggaaacacaaagatcctcagaggcttgttattgatttgaggaatttacgtcgatctaatgtaattggagagtttgtaagcatttttattaatgagaaacagcattgcgttcacattgcctctgatggtggccgtgtttgtcgcccacttataattgctgatatggggatatcaaggatcgatgagactcacatggaaaaactgaggcatggaacttgtggttttgatgatttcctgcgtgatgggttgattgaatatcttgatgttaatgaagaaaacaatgcactgattgcattgtatgagcacatggatcaagatgatgttgaaagaagcagcatcacacacattgaaatagagccattgagtatcttaggggttgtatctggacttattccatatccacaccataaccaatctccacgtaatacttaccagtgtgcaatgggtaagcaagcgatgggaaatattgcatataatcagttgttcagagcagattcactactgtacttactagtgtatgcacaacggccactgctaacgacgaaaactattgagttggtggggtatgataaacttggcgctgggcagaacgccactgttgctgtcatgggatatagtggttatgatattgaagatgcaattgtgatgaacaagtcatcccttgatcgaggatttggccgttgcatagcattgaaaaagtacacagttttaaaggataactatggagatggtgtatccgatatgattgttgaaccccaaagagataatggtgttttgattaaacagaatatgagagcgttggatgaagatggaattgccggacctggtcaaattattcgcaatcatgatatctatgtaaacaagcgaactcccaaaaacacttcaaaaggtattggtagggcattgagagaaagtgactacaaggactcacctgccttgtacaaaggtgttgatggtgagactactgtggtagatcgtgtaatgctgtgctcagatacaaatgataagttatccattaagtgtattattcgtcacactagaaggccagaggttggtgacaaattcagtagcagacatgggcagaaaggtgtctgtggtacgattgttcagcaagaagacttccccttctctgagagaggaatctgtcctgatttaatcatgaatccacatggtttcccaagtcgtatgacaataggtaaaatgattgaacttcttggtggaaaggctggtgtttcttgtggacggtttcactatggcagtgcatttggtgagccaagtggtaatgctgacaaggttgcagacataagctctactctaatcaagcatggtttcagctataatggaaaagatttcttgtactcaggcattcttggtcagcctcttgaggcatacatcttcatgggaccaatctactatcagaaactaaagcacatggttcttgataagatgcatgctcgagctagtggaccgcgggtgttactgacgaggcaaccaactgaggggcgaagccgtgatggaggcttgcgtcttggtgagatggaacgtgattgtctaattgcatatggcgcgagcatgctaatatttgaacgtctactgttatcaagtgatccttatcaagtccaggtttgcagaaaatgtggcttgttaggctactacaatcacaaactgaagacttcatactgttcaatgtgcaagaatggggaaaacatggccaagatgaggctgccatacgcttgcaagcttctattccaggagttgcatgcaatgaatgtagtaccacgcttgaagttaaccgaagtatgacagatgctgggactgtacaatgagagagatgctggattcgaaatgtgtttagagctatatgataaattaaagccctctttgataggggcatagggcttttttttttttgttaactggttcgagagaaaccacgtttaggtgtgtggtttcagccgtctagctagtctcttcgcgggcttctcttctcccgcggaggtatacaagctatcgccgggcaattgttgtatatatagttttttcccgatgtcatatatgaaggaatctggacctctttgtttagatgatcgctgaacgccctgcagggctagattacgatctttgaatgctgaatcattggcatgtgccattattattctagagtcactcgataacccaccctctatccagataattgcactgacgccccctttgataattacattctaatgatagtaatttgtgc

SEQ ID NO: 25692 - DNA, 3506 bp, Zea Mays
aaatgataagcccccgcgacccgcttctccatgccccatcctagtagatagtgtcgttaccgagggccaccattgccgcaagggagaaaaggatgagtgatgccgccgcaattggttcatgtgttgggcagtgtggggtcctcggaagcgggctagtatgcctcgccatgtcgtgcgcaacgcatgcgtggcttcgattgggtggactcatgctcggagtactgaggaatggctcatcagagttatcaagccgccatggatccgctgccccttgtgggcaggagtattcgacacaccaatcaccgaagtgaggtcacgagaatctgaagatcattctggtacctggaatctcaagtcccaggcaagttgtgcccttgatcacttctttttacccagtcatgttctgattaatcataatgatctgcataggttaattttgatgggacccaataagttaccctagtttgactatctttataccttgttcaccactgaatatttaggtagtacctgttattgctttatgtgaatttgggtatagagatacacattattcatgattatacttttgttatcagttgttatttactgttcatgataagatcattatgttaattggaacatggagcgaccacccgggaaaacagtgctaccacaagggtagtataggatgcccttggctaattaactaggaaagctagtggatgactaccttacccgaaaggggaaagggcagtaggggagtggtcagtgtagggtggtccttgggttgattttgctgcgatgtcggtcaggcgagggatccctgcattggagcttcctataaactgtagcgggttttctgaagctagtggaactttgtaaaggcctcgtagtgttaccctgcctcgcttccttggtagaggtgtatggggcccgtacaaccccgtggtagatgggtaacatgacttgtgggtaaagatgtgcaacctttacaaagtgtaaaactggtatatcagctgtgctcacaatcatgagcagctcggaccttcacatgattaatttatggaactaaatttaatttgtcatatgcattgcatcgcgggtgctggtattacttttgttctactacttaattgggttggtatttacttatacttagtaattgctaataaaattttgaccaactttaaaagcaatgctcagcttcaaccatcctctttggtaagccttacacttcacgtgagctcccacctttggcgagttcatgcacactattccccacaacttgttgagctatgaacgtatgtgagctcactcttgctgtctcacacccccacaggtcaagaacatgtaccacaggatgaggcgcatggaggatgttgtgacgatttcatgagtggtctaggtcgttgtctcccagtcaactttgggttactggatcatgtcttcatatgatgtaattatttatttagtttttacagaactcctattatatagtaaagatgtgatattcgatcctgtgccatgattcatcatatgtgtgagacttggtcccagcacacctggcgattatgtttgcgcccgggtcttggtgccccaaaacacgggtgtgacaagacggccatattgccgaagtttggtgaaggaacatcttccactgctgggatagaacaaactactcctgtcggactgagtgccaaaaaatctactgaagtgccgaaggtgcctgtagccgagccagccgaagccaaagaagaggcggccaaaaagccagagctagaaaaggtaatagtgccgccagaaatcttgagcccacaggcagaagcagaattgccgaaggttacaaaggctcccgccacaactcccaagaggaggagaatggccagcgtgctagacgctgttatggaaacaacaagggcattaactcctgctcctacaaaaaaggttgccgaggctgctacagcttgtgctgaaaccgaagctaggccctcagtgcccgcaaaagcagagcctgccgcgactaagcagagagctgaacaagaatttccggatactagtacgactgtgaagaaggatgtagccgaaaaagctaaatctcctgctcccgaagcaccgttcgagaatctcgactttattgttcgacatgcttcgggaaaaagactatccgaagaagaaattgcagaagttaaacactatgcccgggaattgaaatacccgaagggggctttagtgttcaacggcacgaacaaggatgatttcctatactgtctcccagacaacaaagaaatatccatttgccaggagatggctaaaaatatgggatttccgaagcttgaagctggtctctccgctatgtcaaaagatgaccttggagacagccttgcatacaatagtctgaagggcttaattctccgcaacgcttttagggcacaaaagaacgctgaagatgaaagctgcgtgatagccctcggcaaccttcggtcagaagttatcaagctgagaaatgaagccttggagaaggacaaaattctactttcattggtggatagagtgaaagaagatgaatcaaagttgaacactcaatctgaaacttataaagccgaaattgaagaccttcagaaaaaacttgctgaagctaatgagaactttgcacttgcaaaagctagccaagaaattagtgaatggtcgaaaactagactagagaaaagtgttgaggagcttcgtgaatccaaggaaaggtgcttcgataaatccttggattgagtaagaaaattgaaaaacagctttgctaaagtaggtgcttattcttctgaagagaattttattcgaggcgaccttgagggcgttattgattggataagcggggaagccgaagcttttgaagagatcctgaccgattgcggggacatctgtgctttcactggcgctcgagggattgcggcaatactggagaagggtggttgcgaccacgttaaagctgtggcccagactgaagccgccttctccacagatgatacgagagacccttcgtccgaagctactttggtgggtggaaaattttattccgatgtctgggtgaacggtggctgggaattggccaatgaaatcataaagaagaatgaaaaagaaacccatgaagcccgagaagaagctaggcaagccgaagaagctgctgaacacgaaaggcgtatagctgaactgtcaccgctgcccgagcgatacaaccacctagccgatccggtcatgaaagaagcactggatataatgagcattgctaactccatcgtcgacgaagtcatcgacaagctgctgaacgaagtcgcagagaaaatacttaaggaagactagatttttattgtaatgatactatgtaatacttggtgtatggaacaattagtcagacatgtaaattattgtaatatatttctttagaatgcatgaaatttacgcacataccgtttttgagccttcggcgaaaaaacaccttcccttcttttcatgcttcgtaaagaaagaagcctctt

SEQ ID NO: 25693 - DNA, 2734 bp, Zea Mays
agaaaacgtatagtcgaagtccccccacctttccgccgcgtcgtctccttcctccacccactgcaaatgcaaaaaccctagccgcaactccctccgcctccacggttctcatccgcgacctatctctatctctccaaggcatcggccacgggctcgaaggtgatggcgggcggcggaaagaaggagaagggtgaggggctcgggcgcgcgctgatccggcagcggaacaaggcggccgcggccgctaaggaacggggcgaggcgctcgcctttggccaccgccgcgcgatgccgctcgagtctgtcattgacgtcagtgacatcgatgccgtgctccagcgggccgcggaggccgaccagctcgctgaggccgcgtccgtctcttccgactccgacctcgtcatcgacctggatgcgacgggggagacggaagacgacaggcggcggcttcgcaaggagcaggaggccctgcacgccagcagcctcagggtccccaggcgaccgccatggcatagtcagatgactgtggaggagcttgatgtgaacgagcgtcgggcctttctggtgtggcgcaggaatcttgcaaggttggtccagagacgtacacatactctactgtttagtgggattgtatttttctgtagaattacatgtttgggtgctaagctataacttctgaattctctatgattgtcaatcaaataacataagtgggttcatgctttgtgatgcacctgtagttgatattattggtaccacgaatgttacttagttacttttataacattcctgtcacgaatttaccttctgcataatttaaagatgagacttgcattcttacacagaacagttgacacagtgtttaatgcattttcaagcgtcatttttccaaattaatgcttagagcatgtatgtttgagcaatattctgtgcagattggaagagaatgataagcttatcctgactccctttgagaagaatattgacatttggagacaactctggagagtgcttgaacgcagtgatttgttggttatggtggttgatgctcgggatcctttgttctaccgctgccctgaccttgaggcatatgcaaaggaaattgatgaacacaagagaacaatactccttgttaacaaggctgatctgttgccgttaaatatcaggaagagatgggctgattattttaaggcacatgacattctctatgtgttctggtcggctaaggctgccactgccacattagaaggcaaaaagttaagtggatactctgaaggagaatctgcttcacttgatttggataccaagatatatgaaagggatgaactcttgatgaagctgcaagctgaggcagaatctattgtagctcagaggaggatctcacctactgtagatgatcacgaagccagttcttcagattctgtttcttcagtgactaagcatgtagttgttggatttgttggctatccaaatgttgggaagagttcaactataaatgctttggttggcgagaagaggactggtgttactcacacacctggcaagacaaaacatttccagacactgataatctctgaagagctcactctttgtgattgccctggtctggtcttcccttccttttcaagctcaaggcatgagatggtggcatgtggtgtgttgccgattgataggatgacaaagcaccgggaagctattcaagtggtggcagatcgtgtcccaagggacatccttgagcagatttacaaaattgcattgccaaagccaaagccatatgaaccccagtcccggccgccaactgctgctgagctgttgcgggcctactgcgcgtctcgtgggcatgtcagccatgctgggctgcctgatgagaccagggctgctcgacagatactgaaggattacattgatggtaaaatcccacactttgagctccctcctggcgtgacaggccctgaggtggactttgaacaaatcgctggatcagaaagtccaactacttcagcagctaatgaatcagttactgatgatctcgatgaagaggatgatgatgcagttgatcctgctgaatcaaacatgagagatgtcctagatgaccttgaatcttttgacttgggtaatggagggtccaaaactacagcaaagaagaaagaggcgtcccacaagcaccacaagaagccccagcggaagaaggatcggtcctggagggttggcaatgatggtggcgacggaacagcagttgtaagagtgtaccagaaacccgcagttaatttgtccacggtctctttaagtggcagggtctgatgccccaacttttactgctcgcacaaccccggcacacatgggcaagggcatgggacctcttactgtagcaacggctgaactctgaagctacttcgatggaaggaagaaaggagtactgagcatacgagagtttgaaaaccttagaaacaacattggtagtcgttgccggaacttgtgctgcccttccggcctttctcgtatgtatatgctgtgagttgtagcacggttgattcatactaaacgtggtggtatgtgttgttttgttttttcatgtctcacatagctgcagatacagctttgggatgcagatttgacgtggaaaaaatatgtagacgatttatacttgctaagttgctacatttttattttttacgctccttccatttccattttgtatggatttgttcgcttcagattaaagctagctccagat

SEQ ID NO: 25694 - DNA, 910 bp, Zea Mays
ttgctatttgctgccaaccattcaagtgtgcttgtgatgaacaatttctacgacatccttatgaagttcttttgtttgaaattgttcgacaaataataaaggaaagagtatggacatagagggaactgatgctggagaaactgacaaggctctttcttccaaaacggttaagcagaaggattcggtggaaagtgtaataaagcagataagtggcattgctatttccgagtcacatgcaacgccgtccacaaatactacaaacaattcacaaccggaatcatctgctccagacatagataagaaaattcgagcattgaaaaagaagatacgcttagctgaagcacaagtacaaggtgaccctgaaaaattgagacttgaggcactggaaaagatgaaaaagattgatggatggcttaaggagctgaagcttttggaggacaagagagcgcctgctgcttagacaaaatcaacttcggttctgatgtagagccaccacgaccacaccatggtgccgatccagattcgaaggtgcaactgaatcaccataggcttctccgtcacccgtggtggttattggaagagcagtccagtagatgtgggtttgcgcagaacgatggaagtttttcaccgcacatttctggcgccaagtttcaagatctgtaccgcaagaaagaccgctgctaattatggggatctctgacactgggtcagaatttacttttgctctcacggcccgaattcatctccggctttaccaccattgttcaattagctgttatatcacggttgaaactgactggaagtgccggaattcttatgtctctggctccctgcctctcttcatcacatgtactacctccgttcttaataatatttatcgctggctagttcatttttaaactaaaacaca

SEQ ID NO: 25695 - DNA, 72 bp, Zea Mays
gcactatctgcatccttcgggagtcgaaaaaagaaaaggctaaatagagtttttgatgctattggatttgtg

SEQ ID NO: 25696 - DNA, 1808 bp, Zea Mays
ggtaacaagtttgaataaaaaaaaagacacccgacgggaacggaacggaacggaacggaacggagttaggaaaacgcagctctacaaccgtcgccgtcagttaacctcccgtcgccgtcgcccggccttgtcctgatctgacggcaataagaagcagcgctgttgcccccacctcgctccccgtctctctccctcgcgctctctcgcgcacacacacacaaacggagagaggcgcggcaaggaccggcggaccccgtcccacaccggctactccgatcgcgacagtcgaagatggagtcgccggaggcgtgctcttccggggaggcgtcccctgcctcgccgcctccgctggcggcggcggcggcggagcgcccgtccgaggcggcggcgctgcgggcgctcgtcgaccgggtgcgcgccggggaggtggacgccgcccgcgaggtgcgccgcctcaccagggcgtccgcgaggcaccggcgcaagctcgccgcggccgtcgacccgctcgtcgccatgctccgctcccccgcgcccgaggctggggaggccgcgctgctcgcgctgctcaacctcgccgtcagggacgagagaaataaaaccaagatagtggatgctggcgcacttgagcccctgcttggctacttgcaatcaagtgatccaaatttgcaggagtatgcgactgctgctctcgttacactttcagcctcatccaccactaagcctatcataagtgcttcaggagtaattcctctactcgtggaagtcctcaaagaagggaatcatcaaggcaagaatgatgccgtgatggctctgtacaacctctccacaatcacagacaaccttcaagctatcctttctgttcagccgattccccctttaataaagctactaaagggtagcaagaagtcctccaaaacagcagacaaatgctgtgctcttctcgagtcactgcttgcttttaatcaatgtccgctggccttgacatctgaggaaggcggagtgctcgccatcgtagaggtacttgaggaaggctcccttcagggcagagaacatgccgtgggagcgctcctgacgatgtgcgagagtgaccgcagcaagtacagagacctcattctgaatgaaggggcgattcctggccttctcgagctcacagtccatggcacacccaagtcccgaatgaaggctcatgttcttctcgacctgttgcgggattcaccgtactcgagaccaaagctgcaggcagacacgctcgagaacatcgtgaccaacattgcgtcccaaatagatggcgaagaccgtggcggcaaggcgaagaagatgcttgccgagatggtgaaggtcagcatggagcagagcctgaggcatttgcagcgtcgggcttccttcgcctgaaacacctgcctcaggtgacagccccctctcattttgcaatggaaatagaagatagatcaaaataatgagattcctggtgatgccggtccaggccttgacaaggaccgagtgaccggtctaagccctcatacactcaagctgttgacgtagagatccattttccctttcacatgccaatcttgtgtctcgtactctcgttgtgaagaaaagaggcttgctttgtcttctcgttgtaagttttcccttcccaaggttttgtgcatggaatggactgtatataataaagcaaaggatcccattcctcatgtctgaaaaaatctctctgttggtttcatgccacacttttttttctgtttactgattgcacctcctttttgtgtgacaagcaaattgatagccttcttgattcgtcg

SEQ ID NO: 25697 - DNA, 2483 bp, Zea Mays
ctcagatctccccgacctgccaccacccgcgagccctgcacaacatcactgctaccttctctgtcgatccctcgatctccagacaaccccgctcgcctctctccctgctccggtccccgcccgcctctcgctcgcgacaactccgccgcagcacgcggcggccgcggcgagatgctccgcctgcgggcgttccggccgacgagcgacaaagtcgtgaagatccagctccaccctactcacccctggctcgtcaccgccgacgccaacgaccgcgtctccgtctgggactgggagcaccgccaggtgatctatgagctgaaggcaggtggcgttgatgagcgtcgcttggttggagcgaagcttgagaaacttgctgagggagatgattcaaaaggaaagcccaccgaggctattcgagggggaagtgtaaagcaggtttccttttatgatgatgatgttcgcttttggcaacattggcgtaattgctctgctgctgctgaggccccaactgcagtcagtcagcagtcttccacgttcattgcacctgcaccttcgacacgaggaaggcactttgttgtcatttgttgtgagaacaaagtcatatttttggacttggtgactatgcggggccgtgatgttcctaaacaggagcttgacaataggtcacttctttgtatggaattcctctctaggacatcttctagcgatgctcctcttgttgcctttgggtcatctgatggtgtcatcagggtcctttcgatgttgacatggaagcttgtgcgtaggtatacgggtggacataaaggagcaatagcttgcttaatgacgtacatgtctgcagctggtgaggtacatttagtttctggtggcagcgatggcctgctgatattatggagtgctgatcatatccatgactcacgtgagcttgtgcctaaaattagtatgaaggcccatgatggaggtgttgttgcagttgaactttctagggtgatggggagtgctccgcagctcattacaataggggctgataaaactttagccatatgggatactgttactttcaaggaaataagacgcattaaaccagtgcctaaacttgcttgtcatagtgttgcatcgtggtgtcatccccgtgcaccaaaccttgatattctaacttgtgtcaaggactcacatatttgggccatagagcacccaacttattctgctttaacaagaccgctctgcgagctgtcatcactagttcccccacaggtccttgcactgcataagaaactgagggtttactgcatggtggcacaccccttgcagccgcatcttgttgctactggaactaatattggtatcatattaagcgagtttgacccaagagcacttccagctattgctcctttaccaacaccaacaggcaacaaggaacattctgctgtttacatagttgaaagagaacttaagttactgaatttccaattgtcaaacacagcgaatccatcccttgggaatgctggtgttgcatctgatgcaggaaggtcaatgaacaattcaatagaacagttgatagtaaagcagaccaagaagcatatcagcactcctgctccccacgattcctattcggtcctttcagttagcagttctggaaagtatgttgcaattgtatggccagatatcccttcttttgctgtatacaaagcaaatgattggtcagttgttgattcaggcacagggaagctttttgcctgggacacttgtcgagacagatatgctctggtagagagtgcattggccccaagaatgccacttgttgttaaaggtggttcttctaaaaaggcaaaagaagcagcagcagctgcagctcaagcagcagctgcagcagctagtgctgcttctgctgccacagtgcaagtgcgtatcttattagatgatggaacagcacatgttttgcagagatcgattgatggtcgtaatgaaccagttgttcgtttagcctcctttcagtacgctccatcgataccaccatttatagtaccaaagcaatccaagttcgatggagatgattcagtgtttcagaaagaactggatgacagaaggtatgctgaagttgctgtcgctggaggaggtgtgtctgttgcagtaactcgcttccctcctgaacagaagagacctatcggacctcttgttgtggttggtgtaagagatggagttctctggcttgttgacaggtatatgtgtgcacatgccttatcactcagccatcctggtataagatgccgttgccttgcagcatatggggaccctgttagtgctgtgaaatgggcaacgagacttggcagagagcatcacgatgacctggctcagtttatgctgggtatgggctatgccactgaagctctccatttgcctggaatatctaagaggctggagttcgaccttgcaatgcagagcaatgacctgaaaagagcacttgcttgtctattaacaatgag

SEQ ID NO: 25698 - DNA, 247 bp, Zea Mays
ccgagatccgctctgataaccgaaggccgctttgaccgccatggccgaactccaccgccatatcctggggctcatctctataaaacatgctgatctctgggaatccaccgtttgtggtcgactgggggaagcaagcaagaattcttccccccatagccaatgtgagttcgggcgtggcctgtccttcgttgggtgggaatttcgtcaccgagctttaacctgcgccggaacctctggtgagaatttt

SEQ ID NO: 25699 - DNA, 5217 bp, Zea Mays
gtggaattgaaataaccgaacaagaatgatctatctagatgtacacccacactctttcctggcttgaaaaattaaacagactacaataactcaataagattacccagcatccagaaaaacgaatgtgtaaaaacaaaagagcgagacagagctgaggcttgggtcgtttggattcgcatgtatctacctcaatccctatgtgttagtggtttggtgtatattttaaactaaattctacacaccaaaccacttcatcctgcttagattaagttgaatactatatgcagccaaacaagacctgaatgtaatccagtgttggatcatcgttcgaggagaaataacagcatgattgattggcatgaaatctggaacaggtccctctgttcctgatgcactctacggtcttcgtctccggcctggccttcgccacctacttctgctggaggctggccctggtttcgttccctctcgtcctgctgctcataatcccgggactcatctacggcaagtacctcctctacctgtcccgccggtcgcgccacgagtacgccaaggcgaactccctggtcgaccaggctctgggctccatcaagaccgtctactccttcacggccgagaagaggatcatccagaggtacacggcgatcctcgacaagacgatcaagctggggatcaagcagggcatcgccaagggtctcgctgtggggttcaccggcctttctttcgccatttgggccttccttgcgtggtatggtgggaggctggtggtgttccatcatgtgaccggtggaaggatatatgctgctgggatttccttcgtcttgggtggcctatcccttggaatggcactgcctgagctgaaacatttcgctgaggcgtctgttgctgccacaagaatccttgatcggataaaccgtgtcccccagattgatgctgaggacccaaaaggccttgtgctggaccaaatccggggagagctcgaatttgagtctgtccgtttcgagtacccatcaagaccaaacatgcccgtcctcaaaaacttcagcctccagattcccgctgggcagactattgctttggttgggtccagtggcagcggcaagtcaacagcgatagctttagtgcagcgcttctacgatgccagcgaagggactgtaaaagttgatggttttgacatcaaagaactccagctcaaatggatcaggagcaagatggggctagtcagccaagaccatgcgttgtttggcacttcaataaaagagaacatcttgtttggcaaaccagatgcaaccatggacgaggtctatgcggcagctatgacagcaaacgctcacaacttcataagggggcttccagaggaatatgagacaaagattggtgagcgtggagcactgttatcaggtggccagaagcagcgtattgccattgcgagggcggtaattaagaacactgctatactcttgctcgatgaagccacaagtgcacttgattcagaatcagagaagttggtacagcatgcacttgatcaagcatctatgggacgaacaacactggtagtagctcataagctctcaaccgtgaagaacgctgatcagatcgcggtagttgatgggggtacaatagctgaaattggtacacatgatgaactgatcagcaagggtggcccatactcgagacttgtgaaattgcagaagatggtaagctacatcgatcaagaaaatgatcagtttagggcttcctcagtggccaggaccagtaccagccgacacagcatgtccagagcaagtccaatgccactaacaccagctgccttaaaggaaaatgattctgatgttcatccacctgcaccatctttctccaggcttcttgcaatgaacgcacctgagtggaggcaggcagtcgtaggcagtttatccgcattggtatatggttccttgcagcctatctatgccataaccatcggaggaatgattgctgcattctttgttcaggaccaaaatgagatgaatgcaattatcagacgctatgccttgatcttctgctcactgtccttggtatccattgttgttaatctattgcagcactacaattttgcatacatgggggagcatcttgttaggcgcatccgggtccaagtacttgagaagatattaacttttgaggcagcatggtttgatgaagaaactaactcaagcggtgcattgtgctctcggctaagcaatgaggcttctcttgtcaaaacccttgttgcagacagaatatccttactgcttcaaacagcttctggaattataattgcagtgacaatgggcctgatggtagcttggaaacttgctcttgtcatgatagctgtacagccatctacaatgatgtgttattatgcaaaaaaaatggttctctcaaatgtgtcaagggacttggcaaaggctcagcatcaaagcacccagattgccatagaagctgtttacaaccacaggatggtaacctcctttggatgttcatcaaaggttcttcagctattcgagcatgcgcaagaggaacccttgaaaaaagcaaggaagaaatcatgggtagcagggatcaccacagggttgtcaccttgcctctcgttcttgtcatgggcactggacttctggtatggtgggaagctagcacagtctggggagatatcggcgggtgatgttttcaaaaccttcttcgtgctggtgagcacaggaaagcttattgctgatgctggtagcatgacttctgacctggcaaagggatcaaatgcagttgcttcagtatttgaggtgctagataggaaatccatctctccaaaaaattcacaggtagagaaggaggatcagaagaagaaaatagaaggtaggatagaattcaagaaggtagattttgcatatccaacaagaccagagtgccttatcctacaggattttagcttggacgtgaaagcaggaacaagtgttggcctggttggcagaagcggttgtggtaaatcaactatcataggtttgatccagaggttctatgatgttgataggggggctgtaagaattgatggtatggatgtgagggagatgaatattctctggtttcgaggatttacagctcttgttagtcaggagcctgcaatgttttcaggcagtgtcagggacaacattgcttttggtaaaccagaagctgatgaagatgagattgtggaagctgcgaaagctgcaaacgcacatgagttcatctcaactttgaaggatggatacgatactgattgtggagagcatggtatacagctctcaggggggcagaagcaaagaatcgcaattgcaagggcaataatccggaatcccacaatactactacttgatgaagcaacaagtgcgcttgatgcacagtcagagcaagtggtgcaggaagctcttgatcgaataatgtcagggaggaccacaattgtggtggcacatcggctaaacacaatcaagaatgtagactcgattgcttttctgggagagggtaaagtggtggagcgtggctcttacccgcagctcatgaacaagaagggggcattctataaccttgcaactcttcagaagtaactggttgtatgacatgtaaactattatacctaatgaaactccggcagtaattgatatgatagctaggttactatagcacagaagcagcactcctaagctagttttcaagcaactctttcaataatcagttaatatatatctgacacaatcctcgtccttcaagtttctggtgggctaacacaggcaaaaaatatatatataaaaagaaatgacaatatggcctagctaaaagaagcatgataagtaaaaacaagcattatgatgcatgaatcatcatgtcttgtcctctgataacatatgtgagcttcaacagaatgaaaaagaatgttcatgaaaggacttaccctgaagtgaccatagcctggaaaaatcatgaacatgatcaaggagatactggaaaaatgtgacctgccatgatcatgctgttattcgtgagtaaatactcagtaaagagcatggacatgatcaaggagatgatgtttggctgttacctgccataaggcatatttgtctatctgacggatatcataaaaagaaaaaaaatgctcaattgtataacccatatgaattgacctaactatttcctcaacgctagactatctccattcctatacaaaagagtgatccactatacgaacctgagagtgactacgcataagactattagctgtctctgttaatttatcgccactatgccctcccttcctacaaggaacgttacgataggacatgggagttattctaaattctccgtggcatgggaccaaactgccttctcaagtctcaacagcatctacaccgagaccatgaaaagcattctcccatagtatttgaaaataaaggaattcacccttccccctaaggccatgttcgtttgatcccaaaaccatagggattgaggtggattgaaagggattgaagaggattttgacttgtaggggatttgatcccctcaatccctatggatcagcacaaaacgaacagagcctaacagttgtcctccacatactttggctatccagtggtcagagacacgcgttaccagccctagtaatgccagggacaatgcctacctgccgttgccagcccgttgccctttttagttctgaattttctttttacatgaaacatgcctgaatctgaatcccatctgctagaagaagaaaatcgcagaacccactgacatgcacatgcatataatcttctgctcatccatcagtagcaacccgcaagggaacgggatggatgccagggtttcggccgggtcaacgatcgcagattcgcagttccccgcaaagctcacgggcgccaggcctgcgaatgcgaacaccgatacggaggggaaagcggcgcaggaagagggatcggaggactacttacgaattccgattcgcgcgcgaagtcgacaaggagaaccttggagaatcgaggcctcctccgttctcccatgagccgtttgtctagcatatctcttatctcctcccagatgaaatttcaaacttatccctataaactttcatctacagtttcatatctcttatttttcacgttccaccgggatggagggaaggaagtagaatatctccatcagctcaaacaatcttacgggtggagggaaggaagtaag

SEQ ID NO: 25700 - DNA, 270 bp, Zea Mays
tctacggctctacggagggataggtcgctcttcttcctcactgagagaccatgagacgggtcgagacgacagcggcggatgcaccccacgacctccagtgactctcccagtcccaggctcccagccccccttcctcccgcctccgcgagaccgcgatggcagtcttgctgtggcggtgcatatgcgggccccaacaatccttcagtaagaatcgaggcgcatccaccccttctcctcttgttatgttcagttcttggatatcattctaac

SEQ ID NO: 25701 - DNA, 4115 bp, Zea Mays
atggaggcggtgaaggcgtcggaggcgcgccgcgacccgccgctgctgcgggcggtggagctgtcccgcgtcgtcgccgaagagggcgcgggcgccgagctggccgggatcctcgtctccaacctctgtttcgcgcacaactcgccctcgctctggaagctcctgggccaagccgtcgcgtcccgcctcctctgcccgctccacgtcctcgcgctcctcacccctagggtgttgccgcagcggcgagcgcagcctgaggcgtatcggctgtatctggagctcctcaagtgtcacgccacgtcgtcgttgctggcgatggaggctgggcctaaccgtgacaacatactcgaggattgtggctttccatctgtgatggcagaggggcaagagagtgtatatgccattgaggggccacagcctatggacttagacattaaaaggggatctactgagaaccaaaatgagcatcgcgaacagttacgccggaagaacactttcatggctttggacgtgttgcatatgatggctgctgatagaaagattcaatcatttctgagcttgatattcctgaacatgcctgaaaagttcagttctctacgccagaggttgagttctattgaagcacacaaggtgaccttggagactctactgccttctggacacaaaattaatgacttgttaataaacatctggagagtttgcaaagcaggctatcaaccaaataacaaacacattctgggtgttcttggtaatatgggatccggtggctcccttctgggccagcttactggagctgggaggcctgcctgctggataatatttgatatatatgtggagaatgcaattgatgggaagcatctaagtgttacatcagctatcgggattataaaagaaatgaccaagacaatgcaagtgcttaatgaagcaagctggcaggaaacatttaaagctctttggatttccacccttcgtcttgtacaacgggctagagaacctcttgaaggaccgattcctcatctagatgcaaggttatgcatgttgttagctcttataccattatcaattgccgcgattcttcaagaggaaagtgatatgtttggagttgaagggaacaaaattcttccacaaagacaagggcttatatcatctctccaggatctgatccagtattcaggacttcttgtaccaccttcatcagtggtgaatgcagctaatgctgcagcctcaaaagcagcaatatttaaggccaactataaggctggggctggcaacactagcatgatggaccagactgactcttcaatgaaagctgctgggaacatgctccatctcattatcgaagcctgtatctcgagaaagttgattgatacatctgcttacttatggcatggttatgttgtaccatctaggactttaaaagatacagctttgccccaagaatccccctggctgaactttatgaaagggtctcaactttcagaaccccttattgatgctctggtcgcaactcctgcttcaagtgttgcggaattggacaagttatacagtgtagcaacaaatggttcagaagaagaaaaaacagctgctgcaaagattctttgtggcgcatcacttgttcgtggctggaacattcaggaacatgtggtcagtatggtggtcaagctattatcagcttctttaccctcagattcctcaacttcaactcctgggagcatgagccactaccttgctcatatgtctacgttgaacgaaatcttactcggtgtgtcttatggtgatgtcatccacattctttcgttgtatggaatggttccagatgttgccgtggctttaatgccactatgtgaggcttttgggtcaatagcaccgccacctaatcacaagtctaccattcttggtgaaacatctgtttatttggtcttctcctgtgcatttctttgtcttcttcgcttgtggaagttttatagaccccctcaagagtattgtcttactggtcgtggaggctcagtaaagctggaactgactctggactatctgttgttgatgcacaataatcgcattttctcaaattcgtctgcccctaatagggattcttacaacagtatgggctcagtcaatgaggtctctgctcagccgatttatattgattctttccccaagctaagtgcttggtatttccagaatcaagcttgcatcgcctctacactttctggtctttgcaacaaaaaccctgtccatcaagttgcgaacaaaattttgaatatgatttgccgaaaaatgaataaaggtggagtatcatctagtaatctttcatctacttctagtagtagcgttagtggttcttctgtaagtgcatcggatgattcttaccaaaggcctgctgttcctgcttgggaatttttagaagctgttccttttgtacttgaagctgttctgacagcatgtgctcatgggcggctttccagccgagacttgactacaagcttaagggatcttgtggactttttgcctgcttctcttgctgcaattgtaagctacttctcagcagaaattacacggggaatctggaaacctgttccaatgaatggaactgaatggcccagtcctggtgcttctcttcattccattgaagctgaagtaaaggaaattcttgcatctgctggtgttcagattaacagctgctatccaccttgacaattacatttaagctagataggagtttggagtacattcaaggggtcattggacatgcactagagaactgcgcagggggaagttcctggccaagcatgcccattatcggggcattgtggacacagaaagtgcgaagatggcatgacttcattgtcctctcttgtatgcgttctccatttggcagagacaaagatgcagttgcgcagctcatccgaagctgcttttcgtcctttctgcagtcatcatccagtggttctgacataatcgcaaaccgtggagttggggctttattaggggactcaatcacggatcaaggtcttaggctcccaatggcacctggtttcgtctacctgagaacatgtcgaactttccatgacacatacttcgttagtgaagtgatcctcaagcaagtgattgaatgggctcacaaacttgcaaatggatggtctttcaatgggcctccgcagttgaaatcaggccggacaccactatcttgtgcagcatctatggcgcatcaggtcgcgatgcttggtggtggtctcctatgcatagcaggtggaccacttgtggtccaggtgttgtatgaagacacactaccgacactgctgctgtcagccagagaacagagtttgaaagaccctgggccagtttctagcacactccaaggttacgccatggccaacatgctcttttactgtggtagcctactttggggagcggacaggagttctcctgtcatgaaattgtctttcctctcgaggcggccacgggtggtgagaaaccacatggatttcatagctggtgtactggacggacacattcttctgggctgtgacccgggtacctggaaagcgtatgtttctcagtttatgttcctggtggtgaagtttgttccatcatggttgccggacataaagctggacacgctaaagaagatagcagctggacttcggagttggcatgaacatgaccttgctctatcccttcttgagcgaggaggaccacaagcaatctctgttgtagtcgagacctttctgtgatcctgccatttggacattttgccccccacctgacatcgcagccgctgttagggtttgaagtcggtggtctgaggtctagctgaagtaatcaggatgacccttccagaattccacttgagcaaccaggataactgatgtttttctcatgtatggcgaacccattttgtttttgtgaattcaatacggaagaacattcaacctactagagtctagagtgtattgacatcagccctaacatgtaacctatgggaatttcattaactttattgcactgacttcagccctaacttgtaacatacgggaatactctatcgtgttttatatcggcgttttagttgggataaccgaactttactctccatggttcgcatcactcttagg

SEQ ID NO: 25702 - DNA, 1241 bp, Zea Mays
gaaatcacttaccgccttctccgcactgactcgaggtggaactgggccagccagggactctggcccgacccgagaacctcaaccaaaacctcaccttggcaccgccgcgtcgctcggcgcctcgtcgggaactctccgccgccacccagtgacccgccgcgccttgcagcggcgacggagggaccagccagccagccatgacgacccgcatagcgccaggcgtgggcgcgaacctactcgggcagcactcagcggagcgcaaccaggacgccaccacctacgtcggcaacctcgaccctcagataatgcgagatcctgaaacaggaaattctagaggctttggctttgtgagctatgagtcctttgaatcatctgaccaagcaatagaggccatgaacaaccaacatttgtgcaaccgcccaatcactgtctcttatgcttacaagaaagacacgaaaggagaacgccatggcacaccagcagagagactgctggcagcaaacaatccaggatctcaaaagaataggccacacacaatgtttgcaagtggtccgccgacccaaggtcatccaaatggtggtccgcctgtgccacggccttatggcaatggcacaattcctggacagattcaacacattcggcaaccacctccaccacctgttggacaattcccccctccaatgcagatgcacgggcaaccaacttggcccgctcaacattctatgccgcctcccatgccatcgcaactccagtacaggctcccaatgaggccaccaccaccaaatatgatgcctcctccggttggcatggtaaggccgccacctcctcccactggtatgtcagcaccacctatgtggatgccacccccacccccaccacatcaaggtggtggaatgcctccgcctcccatgtctatgccaccaccgcctccaccaccatctagttaaacacatgcaaaggacagtaccgtctggtcaatgtgtaagctgtaactgtagactaaggatgctggttcctttcatgtctccatgtaacttcgtcaacactaggttaagaggaggtttgagagttaacctgacagatacactcaagattaacagctatttattcatgttgtgttgaagataaaatgaattttgtgcttgtctacccactacttgtgttctctgattgccgtgatacgtttacaacgatcactatgcacgttctgttgccactgaattatcgatggtggaagtttc

SEQ ID NO: 25703 - DNA, 2315 bp, Zea Mays
cagttctcgacctggctatgctgtctcgtcgccttccccctcctgccgcggccgtcagccgccgcacgcacgttcgcccacagccacagctccacttgtccctgtccatccattcatcattccccgtcactccaccaattcaccacccaaaaccctaaaccccattccgtacctcaacgccgccgccgccgccgccgccgctgcgatgcagtccatggcgctcacctccccctcactcccggaggtcggccccgtttccggccgccgtctccagcgcatccgtgccaccgcggtatccgacgagctcaagctgaacaagtacagcgcgcgcatcacggagcccaagtcgcagggcgcctcgcaggccgtgctctatggggtcgggctcactgacgctgacctccgcaagccgcaggtcggcgtctcgtcggtgtggtacgaggggaacacctgcaacatgcacctgctccgcctcgcggaggccgtccgtgacggcgtccgcgaggccggcatggtcggcttccggtttaacaccgtcggtgtcagcgacgccatttccatgggcacccggggcatgtgctacagcctccagtcccgtgacctcatcgccgacagcatcgagaccgtcatgggagcgcagcactacgacgccaacatttccatacctgggtgcgacaagaacatgccaggtacaataatggcaatgggacggcttaatcgacctagcataatgatatatggtggaactattaagcctggtcactttcagggcaattcctatgatatagtatctgctttccagtgctatggagaatatgttagtggttcaatcactgatgagcaaagaaagaacgtcctccgcaattcatgtccaggagcaggtgcctgtggtggtatgtacacagcaaacactatggcatctgctatcgaaactttgggcatgagtcttccatacagttcttcgacacctgctgaggacccactaaaactagaagagtgccgtcttgctgggaagtatcttttagagttgctaaagatggatttgaagcctaaggacattatcactgagaagtcattgcgaaatgcaatggttattgttatggcacttggtggttcgactaatgctgttctgcatttgattgccattgctcggtccgttggtttgcatttgactcttgatgatttccagaaggtcagtgaccaagttcctttccttgcagacctcaagcccagtggcaaatatgtcatggaggatctacataagattggtgggacacctgcagtcattcattaccttttggagcaaggtcttcttgatggtgattgcatgactgttactggtaaaactctagctgagaatgctaaaatcttccctcctctgtctgaggggcagcaaataattcgaccacttgacaatcctatcaaaccaactggccatattcaaatactttatggaaatcttgcaccggaaggttctgtcgcaaaaataactggcaaagagggactgttcttctcaggtcccgcattagtttttgagggtgaagaatccatgatcacagctatctcagaaaacccagcgaatttcaagggaaaggtagtagtaatccgaggagaaggaccaaaaggagggccagggatgcctgaaatgttgactccaacaagtgcaataatgggtgctggtctcggaaaggagtgcgccctgctgacagatggtagattttcaggaggctcacatggatttgttgtcggccacatatgccctgaagcacaggaaggtggcccaattggccttgtccatagtggtgatgtaatcaccatcgatgtaagtaagagggtaatcgacgttgaccttaccgagcagcagctcgaagaaagacggaggaaatggaccccaccgccatacaagtccacctgtggagctctttggaagtacatcaagcttgtggctccagcgtctagaggatgcgtcactgatgagtaggatgtgttacattctgttaggtatgacaataaattgccggtttctaagagcttagcaatgctgcagaaactgctgaataatcgagtgtaatcggggtccgtgagcaatcacatctttgtcagtctcccttgttttgtttgtctcattgtttgtagtaccttgttcaaagagatgataatgtcgattattctttggtcctccacatgtaaccacttagcgtctggtgtggttaaggtagtgtttggttccagagtacggtgggctgaagctgtttcactcctaatttattgttgtttggattgatttcagataaaatggagctgctttaaaaaaa

SEQ ID NO: 25704 - DNA, 2530 bp, Zea Mays
cgaatctcgaatcccgctaatccaaatccatcgagcgggagaaccccgaattccaaaaatccccaaaacccaaccctagctcgctagcctcactgttccccttcgactcttccccttcgcacctctgattcctcgcgccctcgtcccccgctcaatttccagaagcttctagaaccgggtttccagccctaatcccgcaaaaagatgctttcttgcgcctagtagcctgggacggaggcatggacagcggcggcggggagggaggctcgactggcgggaggttccctattctgcaggcgaatagggaccccgagtcaaattgggaggtggacgttgccaaaagcctcgagcagtacctgctcaagatctgttcaggggaggtctccggcgaggacgagtcccattctgtcaactttgccgaagcggcgttactactccaaggatcggttcaagtatacagtaggaaggtggagtacttgtactccttggtgcttcacgcgatagagttcctctcacacaagaatggaaacaaggacgtctctggataacaatgttgaccgagatgatttacaaagaaaaattgtgaggccaccagcaaatctactggtgtttgaaggggacgttctggatagtgaagcgagtgagctagactcatatttgttatcaacatgtgatttttatggagatttccttctgctggatccttgtgatgcaccatctgtttttgactttctgcaaggaaaacattctggtaaagaaaatagtgtggctcgccaaggcagtccagcaccttctaaaagccaagccaatgttttcacttccccaaatgcaagatcagcgggcacaggctgtaaagccgcctctggaaaagtcctaggaggtctagattcaactcagaagaatcctgaccaaccttcaactcaagaaaccagtccagatgacaaacattggtctgatcctgttgaacctaactttactgatgatgttgaaaagcctcacccagacgatataggggatcctgttggagattattctgatgacgaggatccgtggaaacctttaaatccacatgaacctggcagcttaaagattcggccttacaggagagtgaaaggttctctacggggggttattggcactttgagaaagaaaactctcacatctatatttcctgtggcaaagatggttggtgtcatcatacctgaacatgctaaatcttttgaagcacagcagtctcagcaggaggaacattatggttcccaatcaccccctcgttttgaaaagtatttggcatcatttgaatttggagaagaaaattccaatgtgtttggagatctgaaagatgacaatggatccgatattggcattaattttgattataatgatccagacatgccaaacgacatagatgttgatcctgacgttccaacatatcctgacgagattattgctgcaactcccaaaggtactcatggtacacaggatgacagagatacacgtgaaagcctcgatgacttgtgtcggtcacatctgaatgctctccttgccagcattgctgaggttgaaaagcagagtgagatggatgctcgagtttcaacatggaaagaaagaatcgagattgccttggaagagcaggataaaaacccaccttttgatatcggttcatacggggagcaaatccttgacgcgctttcatcaagaactgacagcacaggaactgcatcttttagcgagattgtttgtggcagaccgaagtatgaggttgccagaacattctctgcccttctccagctggtaaacagcagaagtgtttatctggacaaaggacaagccacgaatgagttggtgtgttacacagctgagaatccattccatgtaaggctcatcagtcccaaccggaggccagagatggaggcacactttgctcggaagagagtcaagtccccactgcgaaacgctggcaaaggtggtgagtcctccctggcacgacatgagtgccccaagaagccattgcataaaaatggcaagattcaagtcaagacggcgatcaggttgactccagacgggaagcgaaggcgaaggtcagtcactcatctaatgcagccgatcaatctggaatcagcggatgaatgccaatggcagactgactcatgggcatctagagcctgatcgccaatggcagactgactgatgggcatctagagtctgattcttctaattgttgcaacttcagtggcggtttcattggcaggcaacgactgctgtgcaatcagctcccttgacgagacagtgaccatggttcctggttcagatggcgtactgctgacattaggcctagctagcgggtgtacatgtaacatgtacaatagttcattgtgctgttttgtacgtatttgtatcagctctcaagcctaatgctaacagggcaagatttgtctaccgacttgccgttttatacctaatgatattggtagattctttcctggttcaataaactagcaaagtcaagttgctggtgcttttattgttc

SEQ ID NO: 25705 - DNA, 388 bp, Zea Mays
cccgtaagcgccgttcttgcctcgatcaccggcactggtgaagtgaatctgtttattatcttattgtttggtttctttgtactcgtttcttgaattccttcctgtttgggggcgaagtgaggaatctcaatccatacaccatcctctgcatcaccagatgatgattgccaaattacatgcactaccatctgatctccccaatcccaatctctgttttctccgctatgtttttggatggatctggatctttcttggcttgctttgctttgtttgctggagcaatcggtgatgaagtcgtatattgtgctgaggttaccggtgattatcgcacaacaaaaatcaccatctttcggctgagagattgctatatagctcgtctttggttttt

SEQ ID NO: 25706 - DNA, 1280 bp, Zea Mays
gctccagccagcagccaagatactatagtgacttcactcgttcttgcaacggaagcagcaaaggttatttgtgcaatcattttattgattgcagacggtagtctgaaaaaacagttcagtaattggaccctcattggatcactgactgcgtctggactgcctgctgctatctatgcccttcagaatagtctgctgcaagtatcattcaagaatctggattccttgaccttttcaatccttaaccagactaagcttttgtggacatcatttttcacatttcttattttggggcaaaagcaatcatccaagcaaattttagcattggccctcttaattagtgccgctgttcttttaagtgttggggagagtactagcaaaggttcaaatggtggtggctctgactatatcttgctatatgggatcattccggttacagtcgcttctatgctgtctggtttggcctcttcattatgtcagtgggcatctcaggttaaaaagcatacctcttacatgatgactatagaaatgtcatttattggaagtgtgtgcttgttagcaagtacctatcggtcaccagatggagaagccataaggaaatatggggttttccatgaatggactttctggaccatggtaccggtattaatgaatgccgtgggtggaattcttgttggtcttgtcacaacttacgcagggttttgttatagtctcagctctccttgtaactgcactgctacaattcgtgtatgatgggaagccaccatcactctactgcctgatggcattaccacttgttgcgacaagcatattcatctaccagaagtatccatatgtggataagaagaagaaagtctgatgcacataattgtcagagatgggaagtatcatcagcaggatgtaatgctaaccttattttgtccacaaggctggaatttgcaccgtcaagtgggccagatgtgactcttgaagagttgcctgttcgtgaatctattttcaattatctactgatctagatatataattaaattagcagtacagtagcctggaatcagtttcagcaggcagttgacatgcttgcatgtaacatctggaaggaggtttcatattaatggtgtttacttgcacagcatgatgaacctactgtgtctgcctttcatggattgttatttatagactgatttgtgaattttgaatatgttatttatgatgacagaaactaagaactaattattttgcgtcaatccttctcattcggaatctgcactatgttagttgtcata

SEQ ID NO: 25707 - DNA, 2109 bp, Zea Mays
aaaatagcaaatttctccacacggacacagcagcgagagaagagagtccactgtccaccccaccagaaaaacgcattccgcagacgcgcggcgagggagtaggaggggacggcgggtgccgaggcccgcaggcacggggaagctacctgcttgcgtagccgggcgggctcgcgctgtgctgtcgctccatgtcggtcgccggcgagagcggcggggatccggcggcggcacgccgccggtgggatctctccaacaagggccccgacagcactccaatgttgaaagaggctgtggaaatgtctacagatgaagaatcggatggcgttgttatatgccatccgaatggtaacactgatggatgtgacgaagccattagtggcagtcatgatgatgatagcccagaaggccaggaaactagttccatcaaggaccctgatgtagaaggtgacacacaggaagacaagtgtgtaaatcaagattcactgaagttgattgatcaagagacgtctgctccccccaagtccccagcgaagtccgcgactgcgagttctggaccagagaagcctaaacgtgttgtcacccaaccattgtctctttctactcaacgaaggtcatctggagtaaatggtggtgtgaccaatccatcacccaataaggataaatctggtgataaaagtagcatctctccagcaagcatgacaaagaagtgtacgccgttggcacctaggaagactttgcagcctgagcaagcatttcaccctctggaagaggactcttgttctgtgacttcctcgtatcctttttctgtgtgctaagattttgttgagcatctcatccctttttatgctatttcatagctatgcagctaatatttttaactttcggtatataaccttcggatgtttcatacctatacttacataaggatggaatagtaaatattcatgtttgtagatgaccataaaatcacatggtgtttttctcttaattaagcaccagattcttcgatgtttcacagtaaataatgatgaacgctcatactcatgcacttctcttctgtgaacatgaaaaagttttcaaaacgatgcttttctgtatctactgaacttacaatgttttgtggtgctcaatattttttcaagatgatgaccatttcatagttaaatgtttaaattcagaaacacatgaattttacaagtgttctgagttgcatgtggcccttttcctaagctgtgtaaaggactacaacatcatcaagagctggcagaactaagacaactgttcctgttgccccatcatttgtgtgtgctaaccgtgctgacaagaggaaggagttctacacaaaattagaggagaaacataaagctttggaagcagagaaggacgaggctgaggccaggaaaaaggaagagcaagacgttgctataaagcaactaaggaagtcattggtgattagagcgaaacccatgccaagcttctatcaagaaggccccccaccaaaggctgaacttaagaaggtgcctcctactcgtgccaaatcaccaaagtttacaagctcaaggagaaagagctgcaatgacacaccacagacacccgagggaaaaaacaccaacgcaacatctaccacccggccacatcgtcacagcatcggggcttctaaagatgccagcagagtacagtgctcgccgaagagcggcgtggcgaccaaaactagatctgtcaagcctgagctgaaggccctctgaagcgcatgcgtagcattcaagtgctgcgattgtctctgtacaaacagaatcgcctgactcttagccgtttccatttgcatgcattttttttgttttgttttgttctatacccagcatctccaccaaaaagaaggctgtagggccaatgacgttgttcgcgctgctggaccttgtctccattttcgtcttgtactcgttaagaactctgttgctgctgggaccatgtgacattcattccatgtaaattacctggggatcccggtagggagctcgactggtgttttggtcttgtgaagtcctcaatgccttaactaatctgtgagctgaaaaactatcgatttggcattgttacgtttgatgcatc

SEQ ID NO: 25708 - DNA, 1911 bp, Zea Mays
gggtaagacagcccccaggtattttttttaagaagaagaccttctcacacaggtcgagaaaacccctgaacctctacccacccatacatagcggctccgaagcccatgtgagaacaaccacgaccggggcttagccttagacctgtgccttggcgtgggacagacgagatgatttttttttaaccacagcctgaaattcgctcccacggggagtcgaacctaggacctgaggatctgatgagcatgttagcagtgccttgaatcacaggaaagggaaccttgtattggaacatgatggtagaaatggttcggtagcgtcttataggggagttctttcagaagaggaccgtgattcttatcccggccatgctcggaaggactctgctgaaagtattgggagtgatttgagttctttaagaggaagtgaattatctgttccaggggctagtaattccctttgggatggtgctgtggtggatggacatgttagtcaaacagaacatcttactggtttagatatgcatcttttgtatgatatggatgcgcaagtcatccttccaaatgataaaaaacagaagttgactagacttttgatcacaatgcaacgaagaatagggacagcaaaaactgatatggaggatctcatagcacgattaaatcaggaaggagctgttaaagaatatcttactacaaaggttaaagatttagaggttgaattggaagccacaaagcaaaaaggtagagagacactgcaacaagctatcctggctgaaagagagaggattacccagatgcagtgggatatggatgagctccgtaggaagtactctgagatggagtcaaacctgaagaccgaacataatgagaaaactcgtgcggagtcagaaagaacaactgctagtggtgaaaatgaaacattacttgaagaattagaaatcaaacaaaaagaagttgagagtttgaaacagcaacttgtagaagctgaggcaaagtccaaagctgataagaaagttcttgtcaaagaggtcaagtctcttagaaactcccaaactgagatgaagaaagtgttgaatcagtatcttgaggagaagactgatttagagagagttattaatagagataaacagagatcagcacgtacaaagttatcccgagtaaaaattcttcatgagtgtcgactgctgcgggagcggctacaagactgcagtgctaaatttctagcagaagaacaagacaactttactattgatccatcatccttgcctgatgcattagatcttctagcaacatcagacaatagaatacgcctactcgttgctgaggctcaacttctagcacgagatgatgaacaaggctcttctgatggtggcgacgattctgatagtagatcctcattaactatgagcagtgaagatgcaaaagttaccgatgaagatactactaaaatgctttctgatctgctcattgacaatgcgcagctgagactacgcctcaatgctgtcatccgcaatgctgtaaatacttccgtgaagccagagaaagaaggtagtggcgaggttctccccaaaaagacagtccttaactggttgttggacagatgagagaaccaccaatatatatttatgtggattagttcttcaaacttacgcggcttgaccaaaattatatgatgagcgtacctatagtgccagggtagcatcaggaattcaggataaaaccttccctccatggagggaaggggagcctggaagcctttgtttctgttgcacgattttttatccacgcatggaagtcacggaggatggtatatatagggccacggctttggctcctaaaaaatgactgtctggcttctcttccagaaactctataaaagctagtgttttttaacaaatcgtttggcaaagcggg

SEQ ID NO: 25709 - DNA, 2370 bp, Zea Mays
gaggccccatgccgaagccaccagcgaaatgaacggaagaagagagcggagggaacaactgccgcacggcacggagacagacgcggacagaccgagcgattggtcggcgaccacctcacctccgccgccatccactcctcggctcgggctccacgcaatgttactcgttaccatcattagctgttgatgggcatatgaacgatgtccacatctcgtcagatagatgatgggcctgctgtactacagttatgcagatggacattgctacaaccccatctcaaactatcaaaatttcgagaggcttttatatctccaacaaggcgtctttttggactgctctcagaccatggggatcttgtcctggcaactgctgagatcaactcatcacaagttgaatctcatagagctctatcggatacctgtactcaggcagtcttcaaaacgttttctactattccccgagtgaagtctttagcatggggatactgttctgatgcttttgatgactcaagttttaatgaaattctagtggtatcaagtgatgcttctatcacagtccatgcattctgccattctcgcaaaagcacactaacagttaattcaatgtctgatgctaaagagttgcatggggagtggaaagagtggcgccctactgaatgttcagtgttggaggatggtgagtcaggtccagaaaattggttttgttctttcctaactacagtcactgcgtctgtttctaatggaaaataccaagccagattgcccatgaaatctttattgcctaattcagcagaagttgtatcctttagcatatatgacattactctctctttcttgaaatattggtatagcaaatgttctctgaagactatggcggaaactgacagtgaatcaccacgacgttttcttagagcatcgtgcagttgtcagtgggagtgtctaaaagttttgtctagctcgtcatgttatttgatcggcttagttctgactcctaatgaatcagtacgttgtgaggcccatccatccaatgcggagtgtattttggttactgttctggagctaaaccactggggcatacagtggaactttgtggcagaccttcaggatgtatctgatggtattacgccaagtccaaaatgggttgattttcagttatcagatgtgtttcttgcctgccttaatacagcaggttttgttgccatttggaacgtgaaaactggtggtcttgtgacgtcattcagtgttcttcaacaatgcagaactgatctggagatgcctctgaggagctctatgtccattgtgacaaatttggacgagggaaatatccatgttgagaactttgttggcagaatgtttaagcggttagttttggcatcatattcttatcttcttgctgttgtagatgaggttggagtagtgtatgtgttctatgcggatgacatcttaaacttcaaagctaatgtgcacgaaaactttgatctgcctgttatgaatcagtttgctgattgtttttctatctgggaagctgctggtcatgagataggaagtctatcattttgtgctaatcagtccatacaacaagggtcacttagtctaaccaaattggttcctgagttctcagggaaaagcgatgatattgtcaggcctagagaaagaagaaaatatagatgcgatgaaaatgaagtggacagctggccaagtggctttgtcactgcagggcagatgaaagttggggcaggttatcgtcgcacaaattcctcttgtttctttaggaggataattcttcctccatgcagatcacagcaggatgtaattagcctgtgtccacttggactaactagaatttttaaaggttctattgcggatggaaacgagcatgtcaaaatttttcattccgagttgcttatgtattcatcttttcttggcaaaggagatattgatattggttttatggacgaaatgcttccatttaaaaaggattccacttttgtcggagattctgttgtttgctcctgccagggatatttgtatttaattacccagtatggcctttctgtggtccttcctccagtttctatatcatccttttcatctcaatgtgacgctatcaaattctggcaaatgggtcctgctgctggtagcacatgcaatgctctgaacttactatctgttgacaaatcagacacaagctggaaaacctggcaaatagaagtcctggatagagctttgttgtatgaaggtcccgcactagcagacaggctctgttgggagaatggatgggatttgaaattctctaggttacgttggctgcaattagcccttcattactcaatgattggtgatctagagcagtaagatcctgtattttct

SEQ ID NO: 25710 - DNA, 3122 bp, Zea Mays
atggagctcgccttgggggccatggccagcttggcccctaagctaggcgacctgctcatggaggagtatgtcgtgcagaagggcctcaagcccgacatcgagtctctctccagggagcttgtgatgatgaacgccgctctcgtcgacgcgtcccgggttccacctgaccagctcaccgagaagacccttgccacggtcaaggacgtgatgtcgatgaagaagttcaaggatcggcgccagatctccgacaaggtcaaagacatcaagaaactctccaacgagttagctgaacttcgtgccaagtacacggtaaggggtgtgggtgctgatcttgccgcgagcaccggcatcgacccccgtgtcatcaatctgtacaagaaagagacagatctcgttggcatcgaggagtcaagggacaaagtcattaggatgctgtctatggggaccaaagatgatgatgcacatgagtcccatcaggatctaaagatagtgtctatagtcggggttggaggactaggtacttgatcgttgttgatgacatatgggatgttgactcatgggaagcgatcagatatgtcttgaaggacaataattgtggaagtagaataatcatgactactcgcaattccggggttgtcactaaagtagaggaggtttatagattaaaacctctttctactgaaaactccgagaaattgttctacaaaagaatagagagtcaggaaggagaaagccttgatggtgaactctctagtaaaatcatacataaatgtggcggcataccattggctatcattgcaatagctagtttgttggttgaaagatcacgtgaggagtggccagaagtgtatgacaagattggtcttgggaatgaagacaatacaacaaagataatgttatacagctactatgatctgcctccttatctcaagccatgtctgctgcaactaagcatatttccagaagattgtttcattgatacaaaagctgtgatatggatgtggataggtgaaggtctagtccatcttgagaaagaggagggtagcctatttgaggttggagaaagatacttcaaggagctggtgaatagaagcatgatccagccgatagaggaaaaatatcattggtttgtagaaaggttctgtattcacgacattatgtttgatctcatctgtaagttgtccaaggatgaagacttcattacccttagcgggcaacattcatctcagtcactgcaatctctgttcaatctgcggtcagactgcaagctacgtcggctggccgtccgaaatcaacgtgtgcagcgcttccctgaagaaaccatggacatgccagaggtgttgagatcacttagcattatagattgtaatattgaggttatggccccaattgatagcttcagggtttgccgtgtgctgcatatagaaaacaactacgtacccatcagcctaaagcatctagggaagctgttgcatctcaagttcctagagatatttgacacgactattgatgagctccctagagaaattgggcatctgaggtctcttcagacactggtattagtcagtactggactagacgagctgccagtggctgtttgctcgcttacacggctcatgtgtctgatagcctatgggttcgaaaggttgccagctgacaggatagggaacctaacgtccctggaggagctacaactacatagggtggttggccggagtgccacccaagacctagtggcagagcttggcaagctgacgaggttgagggtggtcagaatcaccttctcagagcagctagaggagagctcgcaagaagcattagtgcaatctctgtccaatctgcggttactccaggaactagtgcttttttctgaaatgccagagcggggaagcgatatgtggggagactgggagctaccaaggcagctccggcgcctgattattgaaggcatcgtcttctcacgacagcctcgatggatcaaccgctcctgtctgccacgcctctactccttatatctgatggtgcacgctgttgaagcacaggacctagataatctagcgaggttgccagagctccagtacctcatgctatttggtttcagctggcctccaaggtatactgttggcccagacgacttcaggaatctaaggttctgcgaagtgggcacaacgttcgagtttcgtaagggcgccatgccaaggcttgaagtgctgcgatttggagtttgtgtgccgttcgagcagttcccaacgaaggatgtgatcgaagatcttgacttcgacctggataacgtcattttacttcagcaagtcagggtcaaagtcaactgtgcaggtgctactgtcacacaagtggaggaggtggaggccgtggtcatgcgtgccgtggaaaatcatgccaaccgtccaaccataaaaatggatcgagtatatgaacaaaatatcctatccgacgaagagcgggaggctctgccagctgcggaggtatcgacatcttcagaaagccattattttcatcgactgttcgggtgccagcatgtgtgaggttcagaaagtggaagcagcttatagacatgcagccgaggttcatccgaaccatccaagtatcgaacttatcagaacaaacaccgacggaatggcctcctcctcatctgaccatcccaacacagagcccaggaattgatggctcggtttgtccaatccttccaacccaacagtaggtaaatgtgagttgcttaagtaccaaagagagaggtcctgttcagcaagatgattagaagcattggcatggcttgttaattagattcgcggttcttagtctaaaatcacattgaagagggagacggacccaagtgatgcagttcatgtgttatctgtatcaatccctatttttataagctgtcatatattttctcgaaactatcttctgttgattttgtgtgaagtgtacttttaatggcacgggccacgtatttccttggaaacgaccatgtggagttattttttcccccattttctttcctgagatgggctgtgtatttgcttgaaagataaggatgatattatctttgtatttgaactctagatgcttaaatgaagtgatcatcctggatggagataagt

SEQ ID NO: 25711 - DNA, 1969 bp, Zea Mays
cgactgcatactttccgctagggtgggccgcgggccgggcagcacggttttcttggcccgacccttgatcaaatcaggtctagcgaaatccaaaagcccgttcgaccccaaacaccgactgaccgacacgactccccccttcgtcttccaatccgccgctgttcgagtagtcggcggcgcggcgccggcggccggggcggcggcgatgaatcccctcacgcaggtgaagcggacgcagattatcaaccagaaggaggcgctcctgggcatcggcgaggacgcgtcgtggcacgccaagtttaaggactcggcctacgtctacgtcggcggcgtccccttcgacctcaccgagggcgacctcctcgccatctttgcgcagtatggtgaggttgtcgacgtgaacctcgtgcgcgacaagggcaccggaaaatccaaggggttcgcgttcctcgcgtacgaggaccagagaagcacgattcttgctgttgacaatttgaatggagctaaagttcttgggaggatcataaaggttgaccatgtgagcaagtacaagaagaaggaagaggaagatgaggaggagctgcagaagaagagggaggcccgtggagtctgctatgctttccagaaaggcgagtgcaaccgcggagcttcctgcagatattcacatgatgagcagagaaatgcaaacaccggttggggttctaaagaggatagtggtgcacgatgggagcatgacaaacacagtgatgtaccgaagagtcgaggcatgtgctatgctttccagaagggagagtgcaaccgtggagcatcctgcaaatttttgcatgacgagcagagaaatgcaaacagtcgtcgggactctagggatggtggaccatcgagatcagagcggtatggagaccgagaatctaggagtaggcatgatgatagaagagcagaagatcgggacagattcaggcgtgacaactcacctgagagatcacgaggtgagaggcagagggacgatgacagatccgacagaggaagagaagcaaaatcagaaagacgcagatatgatgtggaacatgaggatcgcaagcggtcaaggcacggcagagagtgatgccatgaaagaagtgtttacaaagaacacaaatggtgcaagaggccgtgggggattgacatcggtgtcatttttagttatcatcactgaaaccgtctgactggattgtgttggtgccaattgcgtggtttttgccgaggaagttgtttactggttaatcttcagctaggatggtgggcgcgcctccgcaaggaccacaatgcctgttctggctacgcgctgatgaacaatgaaaatgaaccactgttacctgcaacagcatcagcagcagcatgtgcaacccaaaaggagccgtattccccagtagaaattttgtactggacagaggcacggttccaaaaggttcggccctaaaaattgctctgcaatgtcagtggtccagcgtagatgatgatgatcgcttctaacatagtctataaaaaatgcatactggagatttggtactagataacaagaggaccttgagtaccgagttttttccggtgaaagattgatgggcgatgccacagcctgaagacgaagaggatgtaaagaaaaaaactcgccaattaagggcttgttcggttattcctatcccatatggattggatgagattggaaaaaattgtgaaagattttgacttgtttgggattgaaacccatccaatcccacccaatccacatggattgagagcaaaacgaacaagccctaagaattgatgatgttgtagtacaaattccaggccttcggttgattttctaagagttagtttggttaattttctaagagttagtttgacagcctcgttttttcaaggaattttcatttttccaagtgaaattaatttatttttagaatttgagaatcttttattctcaagagaaatt

SEQ ID NO: 25712 - DNA, 4938 bp, Zea Mays
cccgagtaaagccctgcccgcctgcctgctcgcccctgtccctgcgcttggcctccgcttcgcctcccacagtcccactcccccaacctcgctctcgcctcccctcccgctcccccctccattcctctcctccttcgcccccccaaaaccctgtgcacagagggtggaccagggtgtagggagcggggcggtgagaaagccctagcgcgctcgcgcgtggcgcggccatggacgcggcgcgtagggagaggaggcaccaccggaaggcagcggcggcgggagcggtgggcgttggtggcgtgggaggaggaggagcggcggcggcgcgggcggcgtacggggacgtgttcggcggcccgccgcgcttcgcagcgccgttcggggccgcgccgctggactacgccgaggtgttcggcggcgtcgcggcgacctgctccatcccgtacctagacctgccgcccgcgccttcgctcgccgccgccgagggcttcttcgcctgccgcgggaagggggactacggggagatcttcggccgcttcgacttcgccgactttgcgctgccgtacgaggacctcttcggcgagccgcagccggagcccgttcccgacgccgcaggggagacggacccggagatcgcctcgtccagcgggagctccaccagatcatcgtttagaaaagaatccagccagctggaggatgagccttctatacttcctcaacactatcaaaatctggatcatcatcagcattttaaagaccataagttttctccaatatccttctctacagacacagaaagtccgcagtttgtgatgtcatataacaagactgctgagaggagacctgatgatctaattgagatgatgacctgcacagttaaaccttcggtggactttgtgattgattctcgcaattcattacatggtccagcaaccaatcatgtttcaagaattgattatggaacaatggccaatgatgatagtaataagaaaccaagccctgctaacacgagtgtgcagagtgctgagagtgattttgcagttgatcagaagcagcaaagtcaatcatggacacctatttctggaagtatatctgcaaacgaaaatcacaagaactctgatagtcattcaacacgtagtactgtaacgcctcctgattatgcatttcttcaggtatctgacagtgatacacagacacaatcaatcaaagtacaacaaccattgaagcaacaacctaaactgctcaacaagaaagagagtgcagctaaagaagacgtcaggattgtagacgacaattgctctccaacttctgcacatatcacttcaagtagcaacatgtctcacactgacaagaaagttgatgccaatccaacttctgcatcagcagctatgaaggaggcaatgaattttgctgaagctaggttaaaggctgcaaaagcattgttagagggaaaaggtgacagttttaaattgcggaagaagccaagtcatcttaaaagcacaaggtctacagaaatcaagtctcctatttctgtagaggccgatacttctgaacaaaaactatgggtgaaaaagtcatcggaagaagaaaagaaccctgacgattctttgtctgacaagcacaaaaagctgactgcagtcagattagatcattttgatgacaatggaaaaaaggtacttccattggagaagcctgagcatatggtgcaacactgcactgaatcctgtcaaacttccagtaaactacaaaaactaggcaactggaagtcaggtaatgacttttttgagctaacccgagatgatcagaaatgcaaaaatgatgaagccacagagggaggtgataaatgtgagcaaatgaatcctattactagtgtcatcaatgatcacaatgaaattgaattcaatgcagcaggctctgacttggacaggtatgaaaaactatgggaggttaatgatggcaggagtgtgggggtgaaacctgtaaatctgagagagaacaagacagctcccgtggacaaagatagtgtgtctgtgattttagaatcttctacagaaaataaggcacaccaaaagactcacaactcaattggtgagggacttgtaacactgaaaaatgctaaggaaagccatggtactgataagtgctttgagcttccttctatgagtggagcctccacaaagctggatgtcttcaaggatgtgtcaggttcatttccggaggctcgctcatcagtaaatgccagcgatcttggagaccatggtaatattagtccaaacttaagtccattagcaggaacatcacaagaggacacaaccagtaaactggtatcagaagtatcttgcgatggtgggatgcaacacacttctcgtagtaatgaaaagctacaggaatcctcagatgtatctgatgttgctatttcccagggaagtaacattaaatcattcattttagaagaacttaaagaatctgatgtatgtgatgctttcatgaggggacctaatggaaaagggcaggaagctgaaaattatggaagagaaaaattcagctttattgatggatcactcttgctgcgaccacacttccataacaaaggtgctaagatgaatgtaatctctgaggaagtacagaaagtcaaaaatgaggagaaacttggtccgtgtacacaccccgaagtaacaattgtggatctggatggtgattgtcctaaagatttgaatgatgttattctacaaaatgatgactttgcagacccagaagaatcaaacatgcctaatgtatttgaggtagctagcaagttgattaaaagagatctggatcaagaaatgcatgggtcattaggacatggtgaagaggagaatatggaagaaggaacagatgtacatctttgtgatattaatggcaaagaagtagatgaaaccttgttagaaaatagtgtgtgtacagatactgaagaaggatgtgctcattgtaaccaggaagaccagaattcatctgacagcaccaacagaggaaaaagtgatgtagataacatgtgttatacatcttgtgacgaggttttgtcttcagaaatgtatacccgcatgcagcactcaatgcaaaaagatggtactgctgcttttcagacatctgggggtgttcctggtcttgaagaaatcggggatgtttccaacagaggaggaagagaattatcaacagaaaggtctacatgtgaagatcatggcaacgcaatcataatggaagaaaaagacactacaacaaggatatcaaaggcagagcatgcatcatctcccttggagacgatgtgtggtgtaactaaatctgctgaagctcccacaacagttcctactgtgacacggaaaaaagaggtacatggagttcagaggaccaaagagagggagaacatgacaacagcagatagtgcatgtgaaaaggacaaagggtcttctcaaagagtacaggaggaaaacgaaagtgaaaggagattggagaaagaaagagaagttgaagagaaggaaagaaggaaattggagaaagaaagagaacttgccgaagagaaggaaagaaggaaatttgagaaagaaagagaacttgccgaagagaaggaaagaagaaaaatggagaaagaaaaagaacatgccgaagagaaggaaagaagtaaattggagaaagaaaaagaacttgctgaagagaaggaaagacataaattgaagaaagagagagaacttgctgaagagaaggaaagaagaagattagaagaggcggaaagggagagggagcgtaaaaaggatagacttgctgttgaaagagcgacaagagaagcacatgagagagcatttgccgaagctcgtgaaaaggcagaaaaaatggctttggaaagaattaatgctgcacggcagcgggcatctgcagaggcccgagagaaagaagatagagcaagtgtcgaaccagctgctgaaagggctactagagaagctaggataaaagcagaacgtgcggcagtcgagcgagcaactgctgaagctcgggagcgggcaatagaaaaggcaaaggctgagaaggctcttgcagaggcaagagagcggagggaacgatacaaatcctctttcaaggagagttttaagtccaccaatcaggatattcgacaggagtcacagtttcatagggcaacttctagtaatttcatccgaaacccagattccagcaacagagcaatggttgaggttgagtccgctttaagacataaagcaagattagagaggcatcaacgcacagctgagcgtgtgacaaaagctcttgccgagaagaacacgcgggacctgctggctcaaagagagcaagcagagaaacatgtaagacatttacacacaaagaacattctctctgtacctgcatttattcatagcattggtgtttatgtatttcagaggctgtctgaattcctggatcctgagatcaagagatggtcaaatggaaaggaaggaaatctgagggccctgctatccacattgcaatatattcttggtgccgatagtggctggcaaccggtgccactaacagatctcattacagcggttgctgtgaagaaagcttacaggaaggcaaccctatgtgtccatccagataaactacagcagaggggcgctacgatcagacagaaatacatatgtgagaaggtttttgatcttcttaaggatgcttggaacaaattcacttcggaggagcgctagggtggcgggggtgctagagcggccgtttattttgaggcaggcgattcgtatattttctatagcgacgtcgtcagtttcttgattcaaaactgattgtaaatatgcagttgtagccctagatatccgtgtcagaaacacagcgcagatgatgctggttagtaccttatctcagaatcagttcagcaaaaagagctccattgctcgtaaaaaa

SEQ ID NO: 25713 - DNA, 4738 bp, Zea Mays
cgccgctgaagactccaaaaaaacgcgattttctcctccactgcccctccttttctctttccaatcgttttgcaatcactacgagcgtaatgaatagaagttgatagggagatagcatccgcaatctaggtttggggcaatcgctctggccagactggatcggagtgcaagtcgtagagggaggcacttggggctcgtggggcaagatgagcaccgttgacaagatgctgatcaaggggattcggagcttcgatccggacaataagaacgtcatcaccttcttcaagccgctcaccctcatcgttggccccaacggtgctggcaagaccacgatcatcgagtgcctgaagctttcttgcaccggcgagctgccccccaactcccgctctggccacaccttcgtccacgaccccaaggtagctggcgagacggaaacaaaaggacaaattaagttgcggtttaagactgcagcaggaaaggatgtggtgtgcatccggtccttccagcttacccaaaaggcatcaaagatggagtttaaggcaattgaaagcgtcctccagactataaatccacacacaggggagaaagtctgcctcagctacagatgtgctgacatggatagagagattcctgccttaatgggtgtttcgaaggccgtactggagaatgttatatttgttcaccaagatgaatccaattggccattgcaggacccgtcaacacttaagaagaagttcgatgacatcttctctgccacacgctatacgaaagctcttgaagtcataaagaaacttcacaaggatcaaatgcaagagatcaagacttttaggttaaagctggagaaccttcagactgtaaaagaccaagcacataagctgcgtgaaaatattgctcaagatcaagaaaagtcagatgcctcaaaatctcagatggagcaactgaaggaaaagatctgtggtaccgagagagaaatcctgcaaatggaaacaagtttggatgaactgagaagacttcagggacaaattgacatcaaggcaacagagagaagtacattacttacgcagcagcatgaaaagcttgctgcactttctgaggaaaatgaagataccgatgaggaactaatggaatggcaaacaaaatttgaagaaaggattgcgttactagaaacaaaaatcagtaaacttgctcacctgactatgaagcatgaacgagactcagacataaaaaatatatgcactaaacataatcttgggccggttcctgaacatccctttacgaatgatgttgctatgaaccttacaaacaggattaaagcgagactatcaagtcttgagaatgatttgctggataagaagaaatccaatgaagatcagttagatgttttgtggaaacactatcttaaaataaatgctcgctactccgaagttgatggtcagatacaatctaagattgaatccatgtcaggcattttaagacggagaaaagataaagagaaagaacgcgatgctgcagaagtggagctttcaaaatttaatctatcccgtatcgatgagagggagagacatatgcaaattgaagtcgagaggaagacacttgcgcttggagaaagagactatgattcaattataagtcagaaacgaacagaagtatatagtttggaacagaaaataaaagtgcttctgcgggagaaagatataataaatagaaatgctgatgaaagagtaaaactgggtttgaagaaggatgcattggaaagcagcaaggacaagctcaatgagatagttaatgagcataaggataaaatcaaaaaggtacttagggggaggaatccttttgagaaggatatgaagaaggagatcaatcaagccttttggcctgtggacaaggaatacaatgagttaagatcaaaatcccaggaagcagagcaagagcttaaatttactcacagcaaagtaactgatgctagagaacaattgacaaaacttcgaagagatatggatgcaaaaagaagattcctggactcgaaacttcaatctattttacagatatctgctaatgttgacatgtttcccaaagttctacaagacgccatgaacaaaagagatgaacagaaaagattagagaatttcgcaaatggaatgcgggaaatgcttgcaccttttgaacatttggctcggaagaatcatgtatgcccatgctgtgaacgtgctttcacacctgatgaggaggatgagttcgtgaagaaacaaaggatgcaaaactcaagtactgcagagagatctaaagctctggcaatggaatcatcaaatgctgaagctctttttcagcaattggataaacttcggactatctatgatgcttatgtgaagctggtagaagaaaccatacctctagcagagaaaaacttgaatcaacatttggcggatgaaagtcagaaggcgcaggcatttgatgatcttttgggtgttcttgcccatgttcaaatggacagggatgcagtggaagccttattacaacccactgatactattgacaggcatgtacatgaaattcaacagctagtcaaagaagtagaagatcttgaatatgcacttgattctagtggccgaggtgtcaagtctttggaggaaattcaactggagctgaactttctgcagagaacaagggacacattgattgtcgaagtggatgatcttagagatcaacatagaatgctaaatgaagatatgtcaagtgctcaggtgagatggcacaatgctcgggaagagaaagtgaaagcttctagcatattggaaagattccaaaaatctgaagaggaattggtgcttctagctgaggaaaaagaacaactgattgtagaaaagaagcttttagaagagtctcttgatccattgtccaaagagaaagagagcttgttgcaagagtataatgctttgaagcaaaagctggatgaagagtatcatcagcttgcagaaagaaaaagggagttccagcaagaacttgatgctcttggaagacttagtatgaagataaaagggtacttggattccaagaaaaacgaaaagcttaaggaattgcagggaaggcatgttctttgccattctcagttacagagttgcatggcaaaacagcaaagaatatcagctgagttaaacaagagcaaagaactactgcagggccagggccagttgaaaagaaacattgatgacaatctcaagtacaggaaaacaaaggctgatgtggaacaacttactcgtgatatagaatcacttgaagaaaggctgctttcaataggtagcttgtctgctatagaagctgatctgaaacgccattctcaagaaaaagagaggcttaattcagaatttaacaggtggcaaggaacactttctgtttatcaaagtaatatttcaaagcacaaacaagagcttaaactgtcacagtacaaggatatcgagaagcgatatactaatcaatttctccagcttaagacaactgaaatggcaaacaaggacttggacagatattatactgctttagacaaggctcttatgcggttccacagcatgaagatggaggagataaataaaataatcaaggaactgtggcaacagacatacagaggccaggatattgattacataagcataaattctgattctgagggtgctggcactcgatcatacagctaccgcgttgttatgcaaactggtgatgctgagctggaaatgcgagggcgctgcagtgctggtcagaaggttcttgcttctcttataatcagactagcacttgcggaaactttctgcctgaactgcggtatattggctttggatgagccaactacgaatctagatgggccaaatgcagagagtcttgctgctgcgctgttgagaataatggaagccaggaaagggcaggagaacttccagttgattgtaatcactcatgatgagagatttgcccatcttatcggtcaaaggcagcttgctgagaagtactatcgagtctccaaggatgagaaccagcacagcataattgaatcccaagagatatttgactaagggtgttctaggaggctgtagcacgcactcgtttgctagtcgaatccagttaatttatgccaagtactggtgccagagcaatgttaacaagctttaggaggctctgttacgccgttacgtcagttgcgtgaaacctatccttcgttgttgtatacttatttaatctggccagaggatggaatgtgtgcactgggtgatggatgtttcacgacatcaatgaatgtttcacaatctagcatccgttttttttgcttcacatgatgtcatacaaaatcgctacggtttcatttggttttggaggtacctacgagtacgatggaacacaacggcatgtttctgcgtcgttggagccgttggattcgcttcaacatttgtaaggttgtctcttaacgtatgatgcttgtgcaatgacgaccatatttgagaaagatatttgttaaaaaggagacttgtcacttaatatctagcttggctgtttgttctagtgaggtggtactatctaggagcgctgtgctatatgtggttgtgtcgtgttttagtttgggtgttttcttaccatctatctaagaggtaacgacctataccatttgacgatgtgaaccgttatacatctctatatttcttctctatgtatcccctaaagatttctctataagatatgttataaacttatattacag

SEQ ID NO: 25714 - DNA, 620 bp, Zea Mays
tgttgtaatcagaattcagaacactccattagctgaacatctacaaccaaacatgcttagtctggcccatttggaaaaaagggacaagaagctatgtgatgacctatgctatgactatcaattttctctttgtgtatatctctattctgggaacttattgatctacttgaaagttgcagctatggatgatggactaagtgcaaaagaaaggatatgctttcttaattccatgatggatcttggaagcgatgttcaagttcgtgctgctggaggtctcctagcaatattagacaatgagagacttcttgacaccattgagcagatggaaggtggagcatccattgcgatcgattctgtggtacagatctcattttatcctctgatggagataaattgaacacactgatgtgttgagatttaattatatcttctgtcatgggctgggcttatggccccagatggcagtatgccagatcagatccgaccttatatactgctgctgccctggccggccgcccgtacccaacagattgcccatgacaactttcagtggcagtctagtttgtaatcaacaaaattatatacataatttatttcctactttcaaggatatagttact

SEQ ID NO: 25715 - DNA, 865 bp, Zea Mays
ggcatccgccgggggctgaagagcctctgcaggttccaccgctgcttgatgacggaggttggctgccagcaccagtaggttcctcatgaaggacccatgtgtgatcttttgtggtctgacccagatgaccgatgtggatggggaatttcaccaagaggagcaggttacacatttgggcaagacattgcgcagcagttcaaccatacaaatggtctttctctcatttcaagggcccatcaacttgtaatggaaggatttaattggtgccaggataagaatgtagtcacagtcttcagtgcgcctaactattgttaccgctgtggtaacatggctgctattcttgaaatcggggaaaacatggaccagaacttccttcaattcgacccggcacctcggcaaattgagccagacacaactcggaaaaccccagactactttttgtaattgtggtggtgacattaacttactggtgttgatgctcctcttttccgcagcatcagggtctgtagatcatctgtccttagatatgggttccatgagcccgacctgtacgtctcccaattcttttgtttggagattttgttgccgcttaacgatctttatacaatatgttaaaaagttaaatgccattggatttttcttctttctgttgtacgtcgactttgtattatttgtagacggtgaatggaagtcgcagcaggaaagccagcccctgctatggttttgttttgatgtgcatcatatcatccgcgtggctgagtaaattatgtccagacgggtaggttttggtttgggtttgcagcatcccgatctgatgtgccctagtgctgtttaatgttggttggagccttctaccttgtggtcg

SEQ ID NO: 25716 - DNA, 3345 bp, Zea Mays
tcgttttttccccttcttgctggtgttgtttgttggtggcggaatgcttcggcgccgccgttgaggttgcgcctcggcgtcggcattggaggtggtggcaaagttggattgattacctcattcaagatttgactggtgcaacaagtaatggttctcatcatcatgagtttggttcaaaaactcctagaaggccaggagctattgacaataccgatttaattgatgatgtgccacttgaagtctccaacatggagattgagatacatgataacttggttgagggtcgggattacatactgcttcctcagcaagtttgggaaaagttgcatggttggtatggtggaggaccaacattaccaagaaaggcaatcaatactggcttttctcaaactgatttggcgatagaagtttatcctctacgactgcagttaattctaatgtcaagaggagagcgaacctttataaggataagcaagaagggtacagttggccaactccataaaatggcctgtaaggtttttgacttggcaccagatgaggtatgcatttgggactattatggtcgaacaaagcattcattgatggatagcttggacaaaacccttgatgatgccaacattcagatggatcaaaacattctagttgaggtaaccactgatgcaagtggtagtctggatggtttggttaagcgaaacaatttttttgagagtgatgctccgaaatcaggattgccagatgagaattttgcagccaacaactatgcttccagaagctatagctctagtctgacaccaagcatctacctgcgatcacccaatggtgatctggataatgtgcatggttctagtggcatgatcacgaggggatcgcccttaggtcttacagggctacttaatcttggaaatacatgctatatgaacagtgccatacagtgtcttgtgcacacaccacagtttactaaatacttctgtgaagattatcatcgcgaaataaatcggcaaaatccactgggtaatgtgggtgaacttgcattagcttttggtgagctattgagaaaactctgggctcctggaggacgtgcccctgtttcacctagaccattcaaaatgaagctttctcggtttgcatctcagttcagtggatacaaccagcatgattcacaggagctgttggcgttcctattggatggactccatgaagatttgaatcgtgtgaagcatagaccttacataaattcaggggatgctgatggaagatcagatgaagaagttgcagatgaatattgggcaaatcatattgccagaaataattcaatcattgttgatgtatgccaggggcagtacaagtccactttggtttgcccagtctgtgggaaggtttcagtgacttttgacccgttcatgtatctttccttgcccttacaatttgcctcaacccggagcgtgactgccgtggtgttttcttgtgatggtagtgttccaccaacaccattcactgtgaatgtaccaaaacaaggtaggtgcagagatctattacaagcccttggtgctgcatgctcacttaaaaatggggagaaacttctaattgctgagatacggaatcataagatctaccgttttattgatgatccagtgcttcagctgtctacaataagtgatgatgatcatctggcagtttataagctcccaaagttggaaaagagggtgaattacattcagtttgtgcatcgtcatgaagatctggaccatggaaacaataacagcttgacatcttggaaaccgtacggtgttcctcttcttgcacaaatttctcgcaatgaaattgtcacgggttttgatatccatgagttggtccataaaatgcttgtgcccgtgctaaggaatccggactctctgcatttggctgttcaaagttctgtttccacaagaactcatagttatcataccgacagcagcaaatgtcagcttctgttggttgatgatagcaacacagtcattgaaaaatcaaatgatgctatcaggatcccacaatcttcacttgcaactgtattttttatcaactggcccaaggcagatctgaaaaagatagacactcatcatttagagtaccttccagaggtgtttatgtatgctccgcctgcgaagagaacccgtggtgaagctctgtcactctatgcatgcttggatgctttcttgagagaagaacctcttgtacctgaagacatgtggtactgtccaaggtgcaaggagcaaagacaagctagcaaaaagttggatttgtggagacttcctgaagtactagtcatacatctaaagagattttcatttagtaggtcaacaaaacaaaaactagaaacttttgttaattttccaatacatgacttggatttgacaaattacattgccaataagaagacttcagagcgccagatctatgagctgtatgctgtgagcaatcattatggcaacatggcaagtggacattatactgcacacattaagcttgtggatgagaatcggtggtacaacttcgatgatagccatgttgcttccattgatgaagatgaggtgaagactgctgcagcttatgtgctattctatagaagggtcagagaacaagacatagcaaggggaactagtaatggatctcagttatatgcaaaaagaagtcacggatatagccatagtcattgccaggagtatatggcttgctggaaaaaatgctcatcacgtgcagtcaatgcaccgttgtccagttgtcacagaagatatttcgtgcagtgctggtacaagatgggaattttgtatgaggtgagttgaaggagtaattgactctttatgataactgggtagcttcaacaggaacgccggggcttggtggcattttgttcgtctgttttcttctagaagagaaacaaggggaggcaagaaaacatttaggaaacaccttttcgttaatttgattttttatttccatttttagatttagctagtctgtacactgttgttggaaatgggtccgctgttgttggtcgatgcttgtggtggccaataatactacacccaactataccaggctctgcaatggcgaatcatggtgcacattatggtgctctgttgcgggaagaattgtagctgatgttgtacttatatactggcaaaaaggccccagaaatgtaaaaatgtatcgatatgctgacatcttaaaccctattttggattcgtgctctttcctatggatgaaggtgtgcgccatttaggggttgtttgtttgaagaatcaatccattctaggtaggtgattatcacgagaccatttcataaatttggtgaaatgaattcatttt

SEQ ID NO: 25717 - DNA, 1626 bp, Zea Mays
agttgacgtcaaatcgtcaattataatagatgtggatttgaagataaaggtgaaatttgggtggagaacattcttaatcttggtgtttcgcctgctaaacttgttgagaacatgaaagaacgcttcatttcttcgggaggagcaatatttgaggagaaaagtctatcaagcatttatgtctatgatgatctcgctgtactgaaacttagtgatggtgattctttgtcttgccgacttgttgttgatgctatgggaaatttttctccaatagtacggcagatccggtctggtagaaaaccagatggaatgtgccttgttgttggtgcttgcgctcatggattcgaaaaaaatacaacaagtgatattattttcagtagctcatcagtgaaaagagctgggaattcaggagtacagctcttttgggaggcttttcctgctggttctggtcccaatgaccgtactacatacatgttcacttatgttgatccaacatttggaggcccaaagctagaagaacttttggaagtgttttgggatcttatgcctgcttaccaggatgtgcttcttcaaaatttggatataagaagagttatatttggaattttcccaacttatcgggatagccccttgccagctgcatttgaccgtatcttacaggttggcgatgctagtggaatacagtcacctgtttcttttggaggttttggaagcttgacgagacatcttggccgtttgtctagtggtatatgtgaagcagttgaaggtgatttcctggatgctcatagtttgcagctgctcaacccttacatgccaaacttaagtgcatcatggttgttccaacgagcgatgtcagtaaggccacatgtcaatgtttcaccaacctttatcaatgagcttctctttgctaattttcagtcaatgcagaaactaggggattcggtacttcggccatttctacaggatgtaatacagtttggacctcttgtgaaaactttggggctagtaatgatcactagaccacaaattttaccttccatatttaagcaggttggactgggagtcatccttgagtggtcaggccattttatgatgcttggttactacacattcctttctacctatattgatccgatcctgaggtcttgggtggaatccttgcccccacgggacaaatatcagtggaaacggtacctggaagcttggagatatggagccggtttagattaccgccaaggggaataaactgtttcactaaaaacacatgaaagtttcctcagaaacaaaattatgtatagatacatgaatatagcactgtcaggggaaagatgaatagagtacatatatgatctctgattgatttagttttccttttccagagcacaagattgaacatcaagtttagaatgtgtattatctagtttcacttgtaatttgcccactttactgaactgatggagtgaatatgtatagtactctagaatttcaaataatgctgaatggagctgagatgctcaatatttgttgatcaatgtatcaattatgtgaaataaaagtaaatgtccggtttcattcagattgcaagtgtaacaacaaaataaacagccatttacacatgttggtaaagag

SEQ ID NO: 25718 - DNA, 3298 bp, Zea Mays
cccgcagtgcgttcgccccttacctttttcttgtccctttcacggtttcaccccgcgttcgctctctctcccgtggcgacgactgggcggccgccgcagccgccctagcccggtgcggctcttcgtcgggtccttcgccggcgacgggcacctaccagggcgtggtgcaaaccagtacagacgcaattggcagaacacggagcatgatggcctacttggccgtggtggtttccctaggccatcaggatatactgggcagttgtcatcaaaggatcatggcaatgcgcctcagctaaacaggacatcagaacgctaccagccaccacgtccttacaaggctgctcctttttcacggaaagacattgactcgattaatgatgagacattcgggtcttctgaattatcaaatgaggatagagcagaagaagaaaggaagcggagggcatcttttgagttgatgagaaaagagcaacataaagcagtgctaggaaagaagagtggtcctgatatcctgaaggagaatcccagtgatgatatattttcaaagttacagacatctactgcaaaggcaaatgccaaaactaaaaacgagaagttagatggttctgtagtatcctcatatcaggaagataccactaaaccatcttcagttctactagctcctgcagccaggccgcttgtcccgccgggttttgcaaatgcattcgctgacaagaagcttcagtcacagtcgtctaacatcacacatgagccgaagctagaggatgaccagtcagcaacagggttcacatctgaaagtaaagagaagggagtttctggtaacgatgctactatgggtccaaagcacacgcttccacctggtagtgttacctcttcagctgaattggcttctagcgttctgaaagggagcgaggattgggatgctgatgtaatggataagtattctattggaaaagaaggcaaatctaaaaatattgatccagttaggaaggatgattcagtagcaatcttagaacagttctttggcaatgttttatcgaaaagcggcagcaacctaccaacttatgttgagccattgaaaactgatgatgacatgatcacttctgtgccagaatcatccaaatttgctcattggtttcttgatgaagacttgaaacctgcagaagacttatcttcaaagagcctgctctccatgattgtcaaaaatgaaaatccaggtctagaaaatttaaaccatactcctttatctgatgctgctgcccagaatttatccccaagagcacctattgataaacttgattctgcatcagagcttatctcatttacatcctctacgcctgccaatggagttcttgaacaatgcatccattctgatgttccagaggcagttcctattatgacatgtgaggatcttgagcagacgatgttagcacaggttagcaatagcagctcaactcagataaatgctacaaaggagcaactgactgttatggatgaaccagttgccatgcagaaagtaactgtagataatcatgcatcacaacatcttctttcattgttgcaaaaaggaacagataataagggagcaccttccctgggtttccagagagaatcaactgatgaacctctgagtgttgacacaaatttaatggcaaatggtggaatatctggaagtgatccggttaacagtgttgaaaatgttcctacttctgggaaggacttgacattggaagcgttattcggggctgcatttatgaatgagctccactcgaaagatgcaccagtttctattcgaggagccacaactggtggtcctactgagtttgcagagatgggtaaaactctgttgtcatctagccatgaaggatactaccctgttgaacagaccgtacacttcaacaatactaaagatgctgctgtccgtagagaaccaggtattgagcattcagcagtacctggtctaagtcaggggagtgctagttttgacaagaaaggaatggaaattcatctgcctgaagaagataatttgtttaccatgagtgattctctgcttggtcaaaattctgatattttggcatcagtaggatccagcagggttgaagggctattgcctgaaaaggcacttgataacctcagctataggtttcaaagtcttgtgcctggtgatgcagaacacattcaagtatatggtcctgatgcacttggatctcatcctcgtgattctcagaatatgtatcatcttctacagggtaggcctcctatgatagcacctcaccctatgatggatcacattgttaataggaaacagccagctccatttgatatggcacagtcgatacaccatgattctcaccgttctttcccatctaatgtgaatcatatgcaacataatcttcatgggccaggggtccctcacttggaccctgctggacatattatgcgacaacacatgtccatgcctggaagatttcctccagaaggcttgccaagaggtgtccctccatctcagcctgtgcatcacatggctggttatagacctgaaatgggtaatgtaaataatttccatatgcaccctcgccagcccaactatggagaatttggattgatgatgccaggtccagaggtgaggggcaatcatccagaggcgttcgaaaggttgatccagatggagatgtcagccagatcgaagcaacagcaggtgcaccaccctgcaatggccgctggccgtgtgcctagtgggatgtacgggcacgagcttgatgcgaaattgagatacagatgatggatgcctggatgcttcactccgtacagaggacctggaggtgtggtttgttgtatgtgcgtggtcactctttgcccagactgctgtgtattatttctgctaacatggtttagcatcagccgtcggtcgcgactgattggaggcctgcctcacttgtagggttgtagcatgtacatctgaacgggtgatggaacggagtgggtctaagatctgtaggagcggaagtctaccgggaaaaggggttatggtgtgctgaatggaagacgtggcgtcgacgtcttagcagccacatgtgtaatgacgttttctgtctactgtttctgacgactatgcagtttccattttgtataagctctgttatgcaaaaggaaaaaaaaagaagaaaaaaaactgagtcagattaacagattggcgacagtgtccgcttgaccctatatcttcaacttgtttgaaaggaaatgaccacgcgtcatgccgagacgtttgtagctgatagcactgtttgagacgttttgc

SEQ ID NO: 25719 - DNA, 1807 bp, Zea Mays
aagaagaagaaatgccccgcgacccacgtcccctccggccctccctctatctttcgctcgctctcggcgacagctgggtgaccgtcgtcgccgccgcccttctccaggtgcccaggtcttcgcaggtccctttgccgcctcttcgccgccgacgagcaccagccaggtatgcgcaccccttctcggtccttcctgctgcgcgaaaccgagcgcccgaaccctaatttgagctatctgtattcggatctaacccaattacaagagcgcgcatgtattatggctcctagcttccattttttacacatgcatgtcctttgctgggcccgcccctgtccgaaccctaacctaagctatttggatctgatttagttacgagtatatatgtgtatttgcatctatttggatcttgcggttcctaaggataacggctgagatgtcgtttatgaaggtgctcgatgttttgattgttttctccaccacatcctaagctatgtcttctataataactctcttatataataagtatcacacaaaaaaattccctataatgtttacgtaatttgcacatcatcgtttattgtaaagtaactcaaatacgtaacagagcgtgcccaagggtgcacgcttgctactagtatgtattagccaccacacagattacagtagacttcattgtatgcatctgttgcagtggagtcattgtatgcatctgttgtgtgtattgttgccttgtggcttgttacttacagctacaactgaatatgtctgtacatctcaaggttgtttaggagacttaattactgtaatttgggttggtttgaaggaagaaaagaagctgaaccatggggaagagaaagtcagctgctaagccacctcctaagaagcggatggacaagcttgacactgtattttcctgcccatttgcaaccacgggagtagttttgagtgccgaattgacatgaagaatctgattggcgaagcatcttgtagaatctgtcaggaaaacttcagcacaactattaatgcactcactgagcctattgatatatatagtgaatggattgatgagtgtgaacgtgttaacactgttgaaggcgacgatgatgcgtgagcttgccccatgcggatgaaactgttacctacaatcgtaatgtaatgtgctggtattctcgaatgccatagcccatagtcagccatggcttggaataacgtagtggctgactgatatgccagtaggcaccttatctagtacttacagaactacaaaaagtttgtactatacatgtatggacaaccttataagtggctatgtgtgtacctatcctaacgctcatcccagatggtgtatcggcgtttttctgtgagattgttttcaagcaagggttgttcattcattgggtcttctcaggacaaagagaattatgctacagtcaaccagatggccgctgttgcgccgacaatacaggggtcatccagttcattttaagggctttgtagagcaaatgcaaccagaatataatttgcagctaaagatattcataggtagaattgttttcagttcattcaacgctgaaagcagtttcggtttggaggctgagctttggatcattggatggcacttggcagctttggcacctggagtaccgctcattagtttttcatcaagtcgtttatttcttgtgcacattgctggagtggagactcggagatcgagatcaagactgtacgcatcataaaccgatcagtgtattcttagtgtattcttcgtagtagaaaataagcagcagcaggtatagctgctttacgc

SEQ ID NO: 25720 - DNA, 2308 bp, Zea Mays
gccacggcccaatcgccggctgacactcacaagaacctgcctccctcggtctggatcgctatctcttttctagcggctccagagggagggaaagctagcgcacagccgagagaagaaagcagagagggagggagaacaaagagagagagaaaaaaaaaaccagagaggttgagcaagaaccgaggcggatccgccttttgtccctcctgcccgagggctagcctgccgccgcccccgcgagagatcgagaggaggcgctgttcagttcaggtgaaattttgccttgttctgggtggggtctctcgggctctctgtggtgtttggtggtgtaaattggagtgggatttagaggtagttaggtctcgtctgctaggataggtgcggtggtctcgttaatttgtgggctccggaggtcaatttgttcacgatcccggtcctgttcgcggttcagttcaggagcgagtgttcctgagcccaatctaattcgtccataaagtcgatcccttaggtcgaggacaataacctgtttgcagctggttccaggtttcacttgcaaaagatgcgccttgatatctcctccaatcccatgttcatcttatatgatttgatttctagcgacgacaagaatttgtgttcagagagagagagggggcgggggagagagagagaaatcctttaataattgttacagtgctctcggaatctttatcttgttctgagtgagatgcccaaaaaggcaaagggaaatctaacctttcttccagtcctgtgattccttcctacaggggggtgagaagccgtgggggaagagatgatgcgggagacgtacatggacgtgctgccgccggtggaccacatagccgcctcacggagcggcggctggttcccgggcgcggcgcgtctctggacggcggcggagaacaagcagttcgagcgggcgctggccgggctcgacctctgccgcccggactgggagaaggtggcgcgggccatcccgggccggacggtgcgcgaggtcgtcagccacttcaagagcctccaggtcgacgtccagcagatcgagagcggcctggtgcccatgccggtctacggcgccggggccggctcgttcaccctgcagtgggacggctgctacggccccgcggactcgaggcacaacggctaccgcttcggaagcggaggctgcgggaggcggcaccacggccgcaccccggagcaggaccggaagaagggcgtgccgtggacggaggaggagcacaggctgttcctcttaggcctgaagaaatacggcaagggggactggaggaacatatcgcgcaactacgtccagacgcggacgcccacgcaggtggccagccacgcgcagaagtacttcatcaggctcaactccggcggcaaggacaagaggaggtccagcatccacgacatcaccacggtgaacctgacggacgacgagcgggcgccctcgccgtcgcggtcctctctgatcaccaccaccagccagccaaacgcgccggctccggccgcagcggtgataggcgggcccttctcgtcggcggcggcggccgaggccaagcagcaccagcacggcgctgggaacctgccaccgaaccggacctccgtggtgccggctgtttacaggatggacgattcgcaggaccacggcctgcagtgtggccctctgcgtcatcaactggtcgccagccaccacagcgttctgttttaggcgcaagcgcaatcccactttgaggcgcgccatggtcatggatccatccatcaggtgttgtctagtgtgtgtgtgtacgatgcgtgtgttctttgctgtagcttcagcgcctgtatcgaagtgattagccttttggggagggggggcgtaacggaaaggggatcttcggttccacggtggtccaggtccacaatttgttgttggtgatgccgagaacgtaacaaaaaaaaggacgccaagaattctgagtggacttggcattcaatcatggaccctgcttttgctcgccgtggcccgggatgatcagcagaacctaattctggatccttcttggtcggctgatgtatcccttgagtgaccttggtgaccatctcatcctgctgctgtctctgaagacggcgacgcgcttgtattggagggtttcagagttcagatcacattgctgtagtgtagtctagacatgtttacccatagtacgtaatcagtttttttttttggcactggcggctgccgaaatctgtgtctggacaggcttcatttctctcggatgaagagaagataaaaaacgaaatcgagtttgcg

SEQ ID NO: 25721 - DNA, 1399 bp, Zea Mays
gcgggcggatgacgtcgcggtggggcgctgctgcgcgcttgctctcctgccttgtgcgtgcgttggaacgtggaagaataacgacaacgcctaataacgagaaaagaaaacccaagacttcgtcgtcaccaaaaaaataaagcagaaaaaaacagagagtagtagactacgacagcgtccgtcgaaccggagggtcggaggcggaggcgaagatgaggaagaagctcggcacccggttccccgcgggtctacgtctatcgagagttcggattctcgttgctcaacagaggacatcgacaattaattatccggcttctgcactcgtgttgtgttgagcgggtggacggtggagagatttgtggccgctcgcggctgactagatcactgctgatgaaatttggctcgaatcaaaaagataatgcaagcagatgaggatgttggaaagattgcattagcagtgcctgttttagtctcgagggctcttgaattgtttttacaagatttaattgaccggacttatgaaattactcttcaaagtggagcaaagacactgaattccttccacctgaagcaatgtgtgaagaggtacagttcttttgatttcctaactgaagttgtcagcaaggtaccagatcttggtggtgctgattcatgtggagatgaaagagtgttacctagaagaagaaagtcaaatggcagtgacccagagaatgatgaatcaagatctagtaaaatggctataagaaatgcaaataccagccccagaggacgtgggaggggtcgaggcagagggcgaggtcggccaccaaccaagagaaaggaagttggttacgtacaatttgaagatgagagcagcatgtttgctgaacaaggtgaaaccttaccaggagagggaacagttccagagatcaacagcggcaacgagattacgcctcaaagcacgcaacctccgctaacagcccctgcgcaagctacaaattctaaggtggaagaagcaagcaccgatcatcagtcagattggcctatgccagatgccactggaaacatcggtgttgggccatctggttttggacatctgacagtgcaggttgatgaagatgaggactacgacaatgaggactagtcagggccatcctctcactgtatgcgctaacaggactgttctggtgttgtaaaatgtaaatatagcttgaagtagctgccgcagcttagctatgattgtctgttatgaggttatgtagttgccctgtgtaacttctgtaattgctttttagttgccttttctctacatgattgactgtcaaagcgttttgtcatatttaacccagtatgtttgagcaggggtcgactatttctaagtattttgactttattcgactagtatttgagcagtcatctg

SEQ ID NO: 25722 - DNA, 4434 bp, Zea Mays
gaaaatatcggaatgaccaaaaaagagtaagaattacagaaaagcccctccggtagtctctctcttttccgtttctcttctccggccttcgtcttcctgcttctccccgtccgccaattcccttccccacccaaaccctagagcaaagctcaatggccctcgtcacgagttcgcgagagactctgcaccgccgccgttgactgctgatccaaccgctcccgcggcgcccggggccctgtcacggaggcggcggcgacatggcgtcgaggcagcacaatgcgcagttccacaaatccaagacgcttgacaacaaatacatgcttggagatgaaatagggaagggggcgtacggccgcgtatacaaggggcttgacctggagaatggcgatttcgtggccatcaaacaggtctcgctggagaacattccgcaggaggatctcaacataataatgcaagagatcgaccttttgaaaaatcttaatcataaaaatattgtcaagtatttgggatcattgaagacaaagagccacctccatattattttggagtatgtggagaatggctcacttgctaatattatcaagccaaacaaattcggaccttttcctgaatctttggtggctgtatacattgctcaggtgttggaaggtcttgtttatctgcatgaacaaggtgtcattcatagagatatcaagggcgcaaatatactgactaccaaagaggtcatcgaaatgtctggtgtttgtgctgcctctgatatctggagtgtgggttgcaccgtaattgaattgctgacatgtgtcccgccatattatgatctccaacctatgcctgccctgttccgtattgttcaggatgtgcatccaccaataccagaaggactgtcacctgagattactgattttctccggcaatgttttcaaaaggatgcgatgcaaaggcctgatgcgaagacattattgatgcatccatggttgcagaactcaagacgtgctttgcctgcttcccttcggcaacctactccattaaggaatatcgacggggatgatgaaagctcaagaggggacaataactcgggtttttgcgacacaccaggagatacccgagcaactattgcttctaatgttgaccaggtgaatgggaggaacggaccaaatatggactctgctgcgcaaagtaaatctgaagagcttcatgatggaaatttagaacttacagagggcattagttcgaacaatgtggcgcttgtgaaagataatgtggtccttaataaagatccgacactagttttacatgagaagttaccggtggaatcttcatttggagatgctgatttgaatggcaaagtaatggcacatgaactattgcaaggtggtctgccaagtaagatagagctggagaataaagaaagttcaactgttgaggatggtgatgtattctcatttcaggctggaagacagaatattgacttccaaatggtggttgaaccttcagttgttgagggaccgaaacagcttagtagatttagtgacaaacctgaagatgcctctttggaagacttatttccaccaatcgacaaacggggagataatggggctgaaccttcaacatcaactactgtccaagaacttcaatataatggtgtacacaatggattcgtgaaggggctcaatgccagggtggagaagcaaaaagaaaatgatagcgagtccatgaatggtggaaaactaattgaatttgccatgcagctagaaaatattgatgcatcgggttttggtgaacatattcctggagagagtcttttccctctgcagtctgtggagtacagcaaaatagtagcacaactgaaaccaggggaaagtgaagatgtaatactgttggcgtgccaaaagcttctatcaatcttcagtcaccggcctgagcaaaaacagatctatatggcacagaatggtttcctcccgctgatggaactccttgaaattcctaaaaatcgtattttatgctcagttctgcagcttatcaacaacattgtaaaagatagtacaggcttcctggaaaatgcttgccttgttggccttattccagtggtgatgaattttgcagaaccaaatcgcccaaaggatgttcgggtgcaagcatccttgtttcttcagcagctttgtcaagccagcaccttgacattgcaaatgttcattgcatgtcaagggatccctgttttggtaagctttatggagcctgactatgcaaaatacagggatatggttcatcttgcaattgacggcatttggcaggtctttaagctccagcactcaactccaagaaatgacttctgccgtatagcagcaaaaaatgggatgcttcctaggctggtgaatacactatatagcttgaacgaagcaacacgatttgcctcagtctcagggtcaggtgcttcagtaacacagaatggctcaaccccccgacgaagatctggccaattagacccttcagttcttgaaagttgcaaggcgaggctggatcatcatcattcatctggttctttgcaatctctacaagcagatgcagataagcaccacatattaatggactcctcgtcatctcctaggttcagcgacaaaacaagcagtaacttggagaggaatgagaacgacttggttattcggccacagaggcttagtgtttctgccggaaggacatctacagacagatcaccgaagcacatagaactagtttcaaatggtcataataacagtcaaaatgaccaggtccgacctctactgagtttattggagaaagaaccaccttctcgacatgtatctggacaacttgattatgttcgccatatatctggtttggaaaggcatgaaaccattctgccactattacatacatcgacagagaggaaaacgaatggtgaacttgacttaatgatggattttgctgaggtttctagacatggaagggagaatggccatctggactctagtataaaagcttcaaatagagttcatagtatgaaatatgcaccttcagcaagtgcgtctaatgaaggggcatcaacttctggagctgcatcacaaactgcatctggtgtgttatcaggatcaggggtgctcaatttaagacctgggagtacaacatcatcaggcccattagctcagatgttctcttccatgagcgcagatgtggcacgtgaatatcttgagaaagtagcagatcttcttttggagtttgcacaggcagacaccgtggtaaaatctctgatggccagccaaagccttcttacaagggttttccaaatgtttaacaagatagagcctcctattcttcttaagattcttaggtgcattaatcatttgtcgggtgatcctaattgtcttgagacacttcaacgcacagatgcaatcaaacatctgataccgattctggagcttcgtgatggacctctggtttatcaaatacatagtgaggtccttaatgctttgttcaacctttgcaaaattaataaaagaagacaggaacaagcagccgaaaatggaatcatccctcacttgatgaaatttgtcatgtcagactcacctttgcggcagtatgccctgcctttgctgtgtgatatggctcatgcttctcgcaactctagagagcagttgagggttcatggaggactagatgtgtacttaaatctgctggaggatgatgcatgggcatgcacggcattagattctattgctgtttgtttggctcacgataatgatcacagaaaagtggaacaagcactgttgaaaaaagaggccattcagaaattagtgaagttcttccaagattgcccagaacagtattttggccatatattggacgctttcttgaagataatcacgaaatcttctaggctaaatacagcaatggctaccaatggtttaacaacattgctcattgcaagacttgaccatcgagaagctattgcccgcttgactctgctgaaactcataaaggttgtctatgagcaccatcctcgaccaaaacagctcatagtagagaatgacctccctcagaagctacagaacctcattgaagagcgcagggatggacaacggggcggccaacaagtgttggtcaaacaaatggccacctcattgctgaaagcgctgcacatcaatacagtattgtgatattggtggatcatatgttttcctctcaagttgtatatgcttgccctagaggagaaggtgccttttccttttgctctgctgtggtggtttctcatgagcaccagactcatctgttgtacctgatccctcttttttcgggagaaaggttttttaggtgcaggatgaaatggacgttctgtccttcagtgttgtttatatttagagtgttagtgaggacattgtaaattaagacatataattaataaacaaaacccatgttgagata

SEQ ID NO: 25723 - DNA, 598 bp, Zea Mays
catttccagggctccaagggtcatcggtggcgggttggcacttggcggcagtctttggcgaaggaaaggcacgtggacaaagttcaagactcagagccaccaactcctatgtcagtcatgaaaatgggcaagaaccgagtttaatgtggaggatgaggagacactttcaagcgttgctcaatgtattgagcatctacgacagagttcttcatcctcacaggacaaagagagctctttgaagcagttattagatcttgttcaaactcgtgatactgcattcggagctgttggatcgcattcacaggctgttccaatacttgtatctcttcttagatctgggccatctggagttaagatgctggctgctactgttcttgggtctctttgcaaggaagaggagttaagggtgaaagtcttacttggtggttgcatccctccattgcttgctcttctcagatcgaagtcagctgaaagccaaactgcagctgccaaaaccatctatgcagtttcacaaggtgggataagggatcatgttggatcaaagattttctttacggaaaatgttgttcctgtactgtgggagcaacttaaaattagt

SEQ ID NO: 25724 - DNA, 2075 bp, Zea Mays
ataaaccgtcccccaccccacctccaacgacaacctccacctcgtcttcccctcctccgcgctcccgtcatctacacctctcgctcccacccacgagtcccaccgccaccaccaccagtctatcccctcgccatttgtttcctccccgtgcatgaaaccctaaacctaaaccccacctcccttcccgagccatcccctccagcgcggcgatggcaaaggcgctgctttcctcctccctcctccccgcgctgcccggcgctgccggaggcagccggagcgctgcgaggccgatgctgctcccaccgctccggttgcggcgcggccggcgcggcgcctccgcttgcgaggtgagggcgggcctgcacgggctcgactccgtcggcgggccccaccttcaggccgcgctggagcgcgccgaggcggcgctatacacactcgctgacgccgcggtcgccgcggcggacaccgccgcgggcgcaggggccgacgcaggccaggctgcggcggtccaaaagaacagcggctggttcggcttcatctccgaggccctcgaggtcgtgctcaaggtgctcaaggatggtctttctgcagtccatgtgccatactcctacgggtttgccatcattctgctcactatcattgttaaggctgcgacattgcctctaaccaaaaagcaggtggaatcaactctggcaatgcagaatttacagccgcagattaaggcaatccagcagagatacgcaggcaaccaggaaaggatacagctagagactgctcggttatacaagcaagctggtgtaaaccctttagcaggatgttttccaacgttagcaacaattcctgtatggattggtctttaccaggccctttcaaatgtagcaaatgaggggctattgacagaaggatttttctggattccatcactgggaggtcctacaacaattgcagctcggcaaagtggttctggaattacatggctcttcccatttgtggatggtcatcctccgctaggctggcatgacacgatatgctaccttgtattgcctgtgctacttgttgcttctcagtatgtatctatggagatcatgaagccacctcagagcgatgacccatcacagaagaacacaatgctcattttgaaatttcttccatttatgattggctggttctctttgtcagtgccatcaggattgtctatttactggtttacaaacaatgtcctcagcacagcccagcaggtgtggttacggaaaatgggaggagcgaagcctgtagtgactgagggaggtagtggaataattaccgcaggacgagcaaaacgctctaatgctcaacctgccggagagaggtttaggcagctaaaggaagaagagaacaggagaaaattcagcaaagcacttgctgcaggagattcagatgcgtcgtcatcgacatatgacatggatgatgaagagtcggatgagacgatagaagagggaggacctgtggaggaagcatctactagcagtgacaagaaacttccaaactactcagggaagaagggcaaaagatcgaagaggaagcgcatggtgcagtaatcgttgcagcataattggatgcgatttttgtcacaactgctgaccagttaggtgccgtagtatcatggagacagttttggtgggggccttttggaggcataattgcataaatctgaggtgcagacaattagacagtttccggggacacaagtatttgctgctaagctatccaatgaactagctcagtcagtatatatgctttagacctgagggtaatggacaggagaacaggagtggggtaaatgcacaagcagagagacaggatctgtagaggtaggcgagagatactccggtgtactctgtacatggttctaaaaaattgggcagaaactggattgtccagaccgttcatatacgttgtactagccggttgttgtactagccagttgcgctacggttgttatatattatataaatagatattgagatatttattcaaatataactattgtttatttctaaacactacaagaagggtattatataattgattaattg

SEQ ID NO: 25725 - DNA, 2663 bp, Zea Mays
gaggaaaagggatccttgcgaagacccagacgccagaggggagtgagggagaggggagggagaaataaataaacccgaattcagccaaacttctctctcccaccgcgcttgcatcctctcatcgccaccccaccctcctcctccctgtctttctccccccctctctctccccctcttgacaaattttcctccacccattcccttcctcccctcttcttcttctccacccactccaccgatccccctctttctctctgaattctctctcgtcgtgcccacccttccatctgtctgctgcctctctctctcgcaatcagtcactcggctcttgtttcttccgtctgctgggttgattctttctcttcctctccgtggagaaacaggaggagagaggaaagaagagaaatcggaaccagcctgttctttttgcctggattgcggttcttgcgagttgttcagaaactctgggccagtttctggtcctttaaactactggaaagaggaaccatcagagatgccaaggcagccaacaaattgatatctaattgccctactttggatcatcataatgcaaggacagaggaattctatggagcattttgctgatgtctttggattcgacgttgcatcgagttcaggcaaccctgtgatggatcagcagtcatattggaataatgttcttggatcagtagaatcacataatcttcaaggttatcagatggctcacagtgatgccgccatgccatatggaaatgaaccacagcaagatggtacatttcttggtttctgggaatcaggcgaagcaagttcaagtgccagtgcactaaactatggcagctctaataatgtcaaaacagagcatcttaacattggtggtggaggtggactgaggattggtgaaagccgactggtagctgacaatggcatttctctggatgtggatatcaaccttaacgccaacgttaacgatctttgtggtcaaagttcaaatgttaactgtgcctctcaaggtcctgagcagtattgtggcagtgatcgtaatgctataaattctcagccgactgacctgggattacacccattcaggacattcctactagatgcacagcaagcagaatcttttactttgaatcctagtgaaaaccctttgggtgatttttcatcaatgcaagaaagcattgaacaaagaccaggtggttccctggatggtcgccggctagcgtgcaagagaaaaaatattgaaggagccaatggccagagttcagcaggtgctagtacaagttttccccacaggaacgataatgcattccataacattgcttcttcaagttacaatcctgcacctatcagaaattcatcctctcccaagtgtttgccagttccaagttctattgaagatcaactcccacggtatggaactaatgtagggctctcagccggtacttatgaccttcatggaggggtcaacaatgctgtgaattcacagagaagtttccgagcaagaactaccacatctcaacaggaggttattcctgtggtcagcagcctcaacttgcaataccaacatccaatgaatgttcctggtgtgccacaggctgctaaccgtttcactgaccatggagcttcatcatcgagagctgggagtttggagaacagaattattggtagtgaagaggttcctaggagttaatccaccagcaggattcaatcaccaaaacctcaccagacgccatcctcgaaatttatcagaggagattggtcgtctatctggagcactccgcggccatcaacccccacgcttaaggtcagggtttctgttggagcgtcagggcgatggtgtttggggcgttcctttatcaacaaggggtagagaaggaagaaggttaatggagattcggaatgcacttgaaatgattcaaaggggggaaaatgtaaggctcgagtctatcttctatggcggcctcgacattcatgacagacacagggacatgcgccttgacattgacaatatgtcctatgaggaactattagcacttgaggaaaggatcggaaatgttagcactggcctcagcgaggaagctgtgataaagttgctcaaacaaaggaaattttcatcgtggagactaaaagcatctttggacccagaaccatgctgtatttgccaggaggagtacgttgatggagacgatctcgggaggctggactgcgggcacgacttccatgctggctgcatcaagcaatggctggtggtgaagaacgtgtgccccatctgcaagaacaccgcattgaaggcctgaaaccgaacaaaggcccgtcagagacacacccatgttccgtgtccattcgatcggtcgcaagatcatttacccgattggtttttactatgcgttttttggttgggaaaattttgccatttcacctgggaaagtggtgggggggtgttggaggtggaagagaagatggcggtccctgtaaactgctgctgctgctgctgcagtaaataatccctggaatttgtctccctgcatttaaacaaaatatttatggctgttataatggacgccgtcgtagggttataacttgaaagatagcattgtgtgccaccacccgccataattctacttgatctggatttcacgtgctgccgctgctggtgcggtgcg

SEQ ID NO: 25726 - DNA, 3095 bp, Zea Mays
gaagcgagcgagcgagcgaggaagctggagcaaaacaagccggtggaccaagtattcggtgacgaagctgaggcgaaggagaggaggaagggaagggccacgatcgaagagtgagcgcgtctcgtttgatctgggaattcatttcgtacagtgctaacgactttgatacagaggcataaacaatctagcctaagagaagaacactggaaccatggtttcaaaatcatactcaaatctgctagacctgacctctggagatggatttgactttcgacaaccttttaagtctcttcctcgtgtcgtaacttctcctggtattatatctgacactgattgggatacaataagtgatggtgattcagttggttcagcatcttctactgagaggaaaataatcgttgccaacttccttccgttgaattgtacaagagatgaaactggggtgctttccttctcattggatcatgatgcgcttctcatgcaacttaaagatagtttttcaaatgagactgatgttgtgtatgtgggcagtttgaaggttcaggtagatcctggtgagcaggaccaagttgcacagaagcttcttagagaatatcgatgcatacctacttttctcccatctgacctacagcagcagttctatcatggcttctgtaaacaacaattatggccactttttcattatatgcttccaatttgccttgacaagggtgagctatttgatcgcagcctgtttcaagcttatgtccgagccaacaaactttttgcagataaagttatggaagcaatcaatgcagatgatgacttcgtttgggttcatgattatcatctcatgttgctccctacattcttgaggaagaggttacaccgaataaagattggtttcttccttcacagtccttttccctcctcagaaatctataggactctgcctgtaagggatgaaatcctgaagtcactgcttaatgctgatctcattggtttccaaacatttgactatgcccgccacttcctatcttgctgtagcagattgctaggcctgcattatgagtcaaaacgtggttacattggaatagagtattttggccgaacagtgagcctgaagatcctttccgtgggtgtccatattggtcggcttgaatctgtcttaaaattgcctgctacagttagtaaggttcaagaaattgaacaaaggtataagggcaagatactgatgttaggtgtagatgacatggacatcttcaaagggataagtctgaaatttcttggactggagcttcttctggacagaaacccaaagcttagagagaaggttgtccttgtacaaatcatcaatccagcaagaagcacagggaaggacgtgcaagaagctattacagaagctgtctctgtggctgaaaggattaatacaaattatggttcttcaagttacaagcctgttgtcctaattgatcaccacataccattttatgaaaagattgcattctatgctgcgtctgattgctgtattgtaaatgctgtgagggatggcatgaacttagtaccatatgagtatactgtttgccgacagggaaatgaggagattgataaactcagaggtcttggcaaagacacccatcacacaagcacacttattgtttcggagtttgtgggttgctccccatctcttagtggtgctttcagggtaaatccttggagtgtcgatgatgtggcggatgccttgtgccgtgcaactgatttgactgaatccgagaaacggctgcggcatgaaaagcattatcgctatgtcagtactcatgatgttgcttactgggcacgcagctttgctcaagatctggaaagagcatgcaaagatcattatagcagaaggtgttgggcgattggattcggtctgaattttagagttattgctctttctcctggcttcagaaagctgtcgtcagagcactttgtttcttcttataacaaggcttctagaagagcaatatttcttgattacgatggcacacttgtgccccagtcatcaatcaacaaagctccaagtgaagaagtcatttccgttcttaacaccttatgtaatgatccaaagaacattgtgtttatagtaagtggacgaggacgtgattcccttgatgagtggttttctccgtgtgagaagcttggtctagcggcagaacatggctattttatcagatggagcaaggaagccgcatgggagtcaagctattcaaggccgcagcaagaatggaagcacattgccgaacctgtgatgcaggtatacacagagacaacagatggatcttcaatcgagtcaaaggaaagcgccctagtatggcactatttggacgcggaccatgatttcggttccttccaagcaaaggagctacaaggtcatcttgagagggtgctatcgaatgagcctgttgttgtgaagtgtggtcattatattgtagaggtgaaaccacagggagttagcaaggggcttgctgtcaacaagctgattcacacactggtcaagaacgggaaggcaccggatttcctgatgtgcgtcggcaacgacagatctgatgaggacatgtttgaaagcatcaacggtatgacctccaacgctgtcttatcacccacaatgccggagctgtttgcctgttcagtcggtcagaagcccagcaaagcaaaatattatgtggacgacaccagcgaagtaatcagattgctcaagaatgtaacccgcatcccctcgcagcggcaggatgtcagtgccagccatgggcgtgtgaccttcagaggcgtgctcgattacgtggactaggcaccaccacttagttactcgaaaaattattagctgggaagcatggttcaggtgatgtgtgtaggcaattttggtagggaaggggggagctgctgctggaggttcgcggtgtgaaagggaggcctcttgttcaaacagtaattggttgtctgaatctgttctcctgctgctatattgatgatcgtgttagttctaaaatttatctgtgggtgaattgcagcacagcattagcgcttgactcgattcatgggcttgtttttcacgaagaagaggacgttcttcgttc

SEQ ID NO: 25727 - DNA, 2218 bp, Zea Mays
gggagggaggggaaagacggacagcgccattgctgccatcgcattcacagcgctaccgtctgcgtcgctttcctttcctccctttccctcgccgtaccaccacccgctcctcttctccgcctctgcctcctcctgcagaagccgccgcacaaaacccaaaccctaaccgccgcccctccgaggcgcgccagatcggcggcggcgcccactgctgctgctccggatccaatgcagcggctgccgtagcgcgggagctgccgatctgaggcggcggcggcggcgctggcgcaggtgggacagggatgtcgtctgcgccggtggcgggggcggcgttcgagcggtaccagcagcgcggaggtggcggccccgcggcggccaacggcaacacggttttcaagagtgggcctcttttcatatcatccaaagggattggatggaaatcatggaagaaacgttggttcatcctcacaagaacatcattggttttcttcaagagtgatcctagtaccttgccccagagaggtggtgaagtgaatgttactctaggagggattgatttgaacaattctgggagtgtggtagtcagagaagacaagaagttattgactgtacttttcccagatggccgtgatggtcgtgcattcactcttaaggcagaaacttctgaagacttgtttgagtggaaaacagcattggaagaagctcttgcacaagctccaaatgcagctcttgtgatgggacataatgggatatttcgtaatgacacagctgacacatatgaaggagctattccaaattggagagagaagagaccgatcaagtcattggtgacaggcaggccaattctgcttgcacttgaggatattgatggcagcccttcttttttagaaaaagccctgcgctttcttgagaaacatggaataaaggtggaaggaattttgaggcagtctgcagatgtggaagaagttgacaggagattgcaagaatatgaacaaggaaggactgagttttcagcagatgaagacgctcatgttgtcggtgactgtgtaaagcatgttctccgagagctgccatcatcccccgtgcctgcttcttgctgtacagcattattggaagcgtttcgtctggagactaaggatgctaggataaatgctatgcgttcagctatatctgagacatttcctgagcccaatcggaggttgctgcagagaattttaaaaatgatgcacactgttgcatctcacacttctgaaaatcgaatgactgcatcggcagttgctgcctgcatggcgcctcttctgttgcgtccacttctggctggtgaatgtgagatggatgaggtatttgatatggatggtgacgattctgcgcagcttcttgctgcagcaaatgccgcaaacagtgctcaaggaattgtcgcaactctcttggaggaatatgagggcatttttcatgatgaacacctcagatgttccttgtcacctgaatctcaaattgaagatagtggtactgaagcatcaactgatgatggtaatttggaagccaagggcaatggatttcatgatgcagaaaatgatgtagatcaagaaatggatgatgacaatggcgtggaacgtatacttagtgggaaattgagtgagagcagtggatatgctggcagtgacctctatgactacaaggcagtcaatgctgaggagtcagatgctgaacgccctgtgaagatgttggaaggaaatttgaatttgagcaaagtacagaacagcctttcaactgaaaatggttcagcgaatgtggatagcttactaagcgaaaataatccttctaacccaacagttggtcacgagactttgtctatgggggagatcctttcttcttttgatcctggaatttctgtaccgacccatagtcctgaatattctgtagagagacagacaaacaaaactaatggatctcacccacatgtgaagcggagtaacttttgggggaggaataatgcaaggaagggccaaaactctgaatcagtcgattcatctggagaagaagagcttgctattcaaagactagagattgcgaagaatgatctgcaaaacagaattgcaaaagaggctagagggaatgcaattctacaggcgagtttggaaagaagaaaacaagcgctacatgaacgcagattggctttggaacaggatccacagggatgtcctgtttaccttggact

SEQ ID NO: 25728 - DNA, 1142 bp, Zea Mays
cttcactgctggtttaaactgggaaaatactgtgatggaggaattctgagggacctaagatgtgtgcactagttcttaatggttggattagtgcttcgtccttgtaggcgctactccagaactcctttctcaagtgaagggacacttggatgcagagcttaatgatattggaaggcagcaagctgttgcggttgctcatcgtctttctaaagaagtgaaaccagttgccatatactcttctgatctgaagcgagcagcagagactgcgcaaacaattgcaagaatttgcaatgtgccaaatgtcgtgttcgatccagcactgagagaaagacacattggagatctgcaaggcatgacgcttcaagatgctgctacagagaggccagaggcatacaaagcttttatgtcccacaagagaaatcaacaagttcctggtggtggagagagtcttgatcaactgtcggagcgatgtgtgtcttttctgtacgacattgttggtaaacacaaaggggagcgagttatcctggtttcacatggcggcaccatcagagagctctacagacacgtgagtcccacgaagccgctccacggcaaaatacacaacacgtcggtgagcgtcatcctcgtgtccgacgccaccggccggtgcatcgtcaagatgtgcggggacgtcagccacctccaggagacgggcgtcctggagaacgccttcggtggcgacaagacctccgcctgagattccaacattcatcacgcgccgagagctctcggcaattatcacgcgccgagtgagcgctcgtttcggccgtctttttttccactgtaccaatcatcctgttgctaccagtagtggtctagcggagaatgatgcacacttccccccgctgggaacgcggcgatttttgctggaacagttgaaggccgagccggggcgaatccttttggcctggccgtgcactgcttgctgaactgcacgtacgcatgtggagctgaaacgatctgcgttcgctcatgttcgtccacatccgtggatcatgggtctattctgttcttgcggctgtttgcgcactgagatggcggtgccggaccggatgcatggcgtgcgatcgggcacgacggctgccccttccccgggtagggac

SEQ ID NO: 25729 - DNA, 866 bp, Zea Mays
cgggtggcatttcggtcattgcagtagtacgccatctgcgtgcggtcgtgtggaactgtagtgctggacatcctcgccttccagccttctcgaaaatcgaaaccctagaccgcgcgccccctcgccctccggccttccacgtccgatccgatccaaaatgcataagctaggcagaggaagccgggacaaggtgcaacagttcatggcaattaccggcgcaagtgagaaagctgcccttcaggctcttaaagctagtgattggcacttggaaggagcttttgatgttttctacagccagccacaaattgctgttgctaatactcgacatctggaagagctctacaacagatataaagaaccagatgctgatatgataatggtggaaggcatatcacagatctgcaatgatttacaggtggatcctcaggatattgttatgcttgtcatatcgtggcatatgaaagcttccactatgtgtgaattcactcgccaggagttcattggtggactgcagtcaataggagtggattcaatagagaagcttcaggcgaagttaccttcattgcgagctgagcttaaagatgatcagaagttccatgaaatatacaactttgcatttgcctgggcaagggagaagggccagaaatctctcgcattggagactgctattggcatgtggcagttgctatttgctgaaaggagctggcctctcattgactactggtgccaatttctacaggtaaggcataataaagcaatctccagggatacatgggcacagttattggagtttgttaaggttgacgatccattgaagccggtcagcagaagctggaatctaccacaccacggaactgagcattcgg

SEQ ID NO: 25730 - DNA, 1287 bp, Zea Mays
tcgggtgttagggttcccgggatttgtgggtgattcgttgaaccgcaacatgtttgcctcattagtctgcatgctcaggggagtcaatggtgaggttcgcaaatggcgtcctgctggggcagaccgtggcttcaccttcctacgctataacctcactgtggcataccacagaacaaatctcttggtacgctacggtaggtggtcaaggaatccaaatggaggccctctagaatctcttggatataagcaaggttacagagttgatgtggatattcctgaccaaacatgggtagaggtggtgggcaccctcaaaatttgatccaatacggtcaccaatgctgttctttgagaaggggaggccaattgtacctcctttactgccaccggctggactggatctggctcttcaaaacatgatatccttcgcgaacaaagcaacaagaccaaacacagtgaaattcttccgcactcaatctcctagacatttcgaaggtggtgactggaatgaaggtggatcttgccaatgtaatcagcccttgtcgtcaaaagaggtggaagaaattttctctttggacaataacagcactaatgtagaagcacgcttggtaaaccaacacttggtgaaggctcttcaacagactagtttcagagttctggacatcactcgcatgagtgaattcagagctgatgcccacccttcaacaactggcgggaaaaaacacgatgattgcatgcattggtgtttgccaggaccaacggatacatggaacgatttgctagctttgagtctcgaggcacttgagagctagttgagagagctcaagagctcaccggagaaaatatccctaacttttttttcagggggaatatgagtatgaagcatgaatctactggtagaatagaattttgctgatagctggttttagggcttttgttgcagcttgtttcatataaaggccaggagcattttcccccacttgtttgaccctgtatgttttaatatcactgtagagttccactgacgaatgacgatatacgaatgctataatcggtcggatccattttcttgaccaacagatagatggagcgtcttttggcccagacaacattattgacatttcattcctgcaaatttgaattggattcatgagtcccggtgaaatacctccaaagcacccacccctagtaatttcattctcttgccctttttctcttcagctgagaccagcaccagtgtgtaccctcaattaatattctgctagcacgctgtgagtctgtagactgcag

SEQ ID NO: 25731 - DNA, 3391 bp, Zea Mays
cttccttttcctaccaccccacaccctctcccatctctctctccgtgccctcctcctcccccccagtccgccccacccttccggccctccccctcttttatatccagtaccatggtgatctccgagctcgggtgagctgatgaggtaagcgtcccggcccggcccggaacccagtacagtacctttgccagcctctggtgaatgagcgtcgcctcgtctcgctgcagaatgcggccgatttgaggaaggctgtgggcgcgatggatgcggtttcgggcggattcgctaggaggctgtagaggttaggttccggtgtcccccggcccggccggtcgtgggagatgagctcctcgtccgcggccagcatcgggcagccgccgccgcccgcgccgccgccggaagaagagaagaagtgcctcaactcggagctgtggcacgcctgcgccggcccgctcgtctgcctccccaccgtcggtacgcgcgtcgtctacttcccgcagggccacagcgagcagcgtcgacgaacaaggaggtggacgggcacatccccaactaccccaacctgccgccgcagctgatctgccagctccatgatgtcacaatgcggatgtggagacagacgaagtgtacgcgcagatgacgctgcagccgctcaatccacaagagcagaacgacgcgtacctgcctgccgagatgggaatcatgagcaagcagccgacgaattacttctgcaagacgctgactgcgagcgacaccagcacgcacggcgggttctctgtgccccgtcgtgcggccgagcgcgtcttccccccgctgtgtggtttgtaggatttcacacagcagcctccagcacaggagcttattgcacgggatattcatgatgttgagtggaagttcaggcatatcttccgagcccaaaagacacctgctgacgactggctggagtgtgtttgtcagtgctaagagacttgttgctggagattctgtgctattcatatggaatgagaaaaaccagcttttgcttggaatcagacacgctacccggccacagactgtgatgccctcttctgttctttcgagtgacagcatgcacatcggactccttgcagcagcagctcatgctgctgcaacaaacagccgcttcacaattttctataatcctagggcaagtccaacagaatttgttatacccctttcgaaatacatcaaggctgtttttcacacgcggatatcagttgggatgcgattcaggatgttatttgagactgaggaatcaagtgtccgcaggtacatggggacaataacagaagtgagtgatgctgacccagtgcgttggcctagttcctattggagatcagtgaaggttggttgggatgaatcaaccgcaggagaaaggccacctagagtttctctgtgggaaattgagccactgacaacctttcctatgtatccatccctgttcccactgcgagttaagcatccttggtattcaggacttgctgctcttcatgatgacagcaatgctttgatgtggctgagaggagtaaccggtgaagggggctttcattctttgaacttccagtcacctggtataggttcctggggacaacagagactccatccatccttacttagcaatgaccatgatcagtatcaagcagtggttgctgccgcagctgcctcccagtccggtggttatctgaagcagcaattcctacaccttcaacaacctatgcagtccccacaggagcagtgcaatctcaatccgctgttgcagcaacaaatactacagcaagcgagccaacagcagatggttagttctgatgctcaaaatattcagtccgtgctcaacccaggtgctattcagcagcagctccaccaactccagcagatgcagcatactcataatgaccagaagcaaaagattcaaccagatcaacagtaccaagttgctagcagtgcggttctcccgagtccaacatcattaccaagccatttgcgtgaaaaatttggcttctctgatcctaatgtgaactcttccagcttcatcagctctagcagcaacgaaaacatgctggaatcaaacttccttcaggtaagttcaaaatccgtggatttgtctagattcaaccaaccagtagttagcgagcagcagcagccgcaacaacaacaggcatggaagcaaaagtttatgggctcacagtcaatgtcttttgggggctcggtttcgcttaactcgcccactagcaaagatggttctgttgacaacaaagttggtcgtgatgtgcagaaccagtccctttttagccctcaagtcgactcttcctccctactgtacaatatggtacctaatcttacctcaaatgttgctgataataatatatcagcgtttccctctggatcaacatatctgcaaagtccaatgtatggttgtctggatgactcttctggtttattgcaaaatacaggagagaatgatccgacaactagaacttttgttaaggtaagtataatcgagtctactaaaaacaaatttaagcccttcctcatgtaatcattttttaaaattcaggtttacaagtcaggatcagtggggagatccttggacatcacccggttctctaattatgctgaacttcgagaggaactgggtcagatgttcggcattaagggtcagttggacgaccctgatagatcaggctggcagcttgtatttgtcgacagggagaacgatgtgcttctccttggagacgacccgtgggagtcatttgtgaatagtgtatggtacatcaagatactttcacctgaggatgtgcataagatgggaaagccaggaaacgatccacgctacctatcttagctacctatcttaaatcgatacatggagctctttctggctcccatgacgattctgcggcacactgcagcactgttcacgacggccctgctctactgtgctcgcatgttcgcccgtgtcatctctactctctagcatgcacaccgtgctcgtcttcagaagacgaactccccgtcgcttgtatccggtgcaggtcacccgctcctggactgatattttgtaggttccacgtaggaatcagtatcagcaactctatcctagtttgtggtaggctcgcgcggcgctcgttcctgtgtcgcatcaggatcttcggactaaaatgcgtagtcgaaaccgttctcgtgattcgtaagctattcatgtatttgaggattcctcgacatgctttcgacgatgaactgcaataatctgaatgcaggaggattgtttgagatttgtacttcagttttgtgtctgccggtttgcagggttgctgtgatgacgtttcaggtgttctctgtctgaaactattttttatggattggcgagttggtg

SEQ ID NO: 25732 - DNA, 7626 bp, Zea Mays
gggagggagagtcaacggtcagtgcgggggctatggtttgctttcttcccccgagcgcaagcgcaacccccgcaccaaacagacaacagcagtacagcagagcaaagcaaagaggaacaccatttcccttgcctgcttgccaacccaccaccaccaccaccaccacccacgaaggcagcagcaacccagcaccaccgatccatccatccactcgtcattcctccgccccgccgctcgccttcacccatctccgaccccgctccgccaccaaaccctaggctaccagctcttcccaccccgtgtgctccgctcccctgagggcggctcgcgcgccatttctccgctcgatttcctaaaaccgtactctcggattcgggatcgggccgcgacggggcctcctcttgctctcgctcttccgtccggtcggccgctgaggacaataaaggaggttgcgctcatgccgggggcgccgctcaggtgacttgctggggggccatgcataggtactccagcaacagcgctgggttcagcggtggcagggacggcgcgaggttggaagcctcgcccttctcgtcctcctcctctgggtaccctgtcagctccaggcggcagcagcagctagttccatacaagctaaagtgtgacaaagatccacttaataacaagcttgggccacctgacttctatccacaaacaccaaactgtcccgaagagacattaaccaaagagtatgcacaagctgggtacaaggagactgttgaaggaattgaggaagcaagagagattgtactcagccagatcccgtacttctgtaagccagatgctgtcataaagtgcaaggaggcactaaagaagcgtttaagagcgatcaatgaatctcgtgctcaaaagagaaaggctggccaagtttatggagttcctctttctggatctctactgatcaagcctggagtttacccagagcaaagaccatgtaatgaggacgcccgcagaaaatggattgaggcccttgctcagccaaacaagcgactgcgttcattgtctgagcacgttcctcatggttaccgtaggaaatcactttttgaaggtctaattcgatataatgttccgttgctaagagcaacatggtttattaaagtcacatacctgaaccagctacagacccgacagacacctaacagtatttcagtagcgggttctgataaccaacgctctaatcagtggacaaaggatgttgttgaatatttacaacatattttggacgaattttgttctaaagagggtgcattcgtgcatccatcttttagagagcagtcatcaccaggacctactgctggaaccaatcagataaaaatgaaaactgaagcatctccagctgctggagacattgaagaacccttggtgcacttcaaatggcggtatatggttcgtctcatccaatggcatctcacagaagaattgcttgttccctcagtacttatcgaatggctatctaaccaactccaggagagagattcagttgacgttttagaacttctcttgcctattatgcttggtctggttgacaccattactctctcacaaacatatgtgcgcatgtttgtggagctactagtgagacgtctcaatgatgcttctgttgttgatagtccaaaaggaccttcagtttcttctgttatagcagagttactgcggtacatggtacttgcagtgccagatacatttatttctttggattgctttcctctcccatcttttgtggttcctgatgtatatggtagaggtgctttgttgaagataactagcagtggtggaatttcaagttctaaaaggtgtgatgcttatcggtatttgtcctgtggttatgctgtttgttcaattcaaaaacgtgcatatgatctcgcaacagttgctaaccctaaccttcaagcacgtggtgcagccaaagtggtacaggctttggacatagctcttgtcacaggaaatttgtcagtggcatattcttcactctttaatgatttatctgatacgttaatggaagagagatggattaaagaagtcagccccagtctgcagtcttctctgatgtggattgggactgttgagctatcccttatctgttctatatttttcctttgtgaatgggcgacatgtgattatcgtgattgtcgagcatctccctctcggaatgtgaaatttacaggaagaagagatttgtctcagatacatatggcagtgtctatcttgaagaataaaatggatgagatgaataatttgtctcgttctaagagtagcactcgcgttaccctgaataatatcaccaaaggttcttcactgaccgatgcttgtttgacagcagctgctgtggatgacacttctggattgcaaagtaatgcaaagaatgtggatgagaagaaggatacgaatgatatctttgaaagccctggtccactgcatgatatcattgtgtgttggttggatcagcatgaagttagcagtgttgcaggttttacccgggtggatgttctcatcgtagaacttatccgcaatggtatattttttcctcaggcttatgtcaggcagctaattattagtggaattactgacaagaacgacacaatgttggatgttgaaagaaaaaggaggcatcacagaactttgaagcagcttcctgggtcttctttatttgatattcttgaggaaactaggaccgtggaagagcaacagttatatgagatgatgtcgacatactccagcgagcggcgccttgttctctctgaactttcatgtgatcactcattttatgcaagtggcagaggcgagtatactgcaagttcctgcattcggaagcagagtgatcttccacttgcatcaggaggtgataagcatggaagagtgccagaacaagtagaagatgttaaagccctattgtcaagtctgttgggttttacatatccttccccagtggaatccgaacctcgccaaatcaaaacaagctttcaagaatcagcaacttcaacactctcacaagttgagactggagaagcaaaaagtggatgtgaggtttgtatgaggtccaaagggcagaaattggatgatactgccactcctttccaagggttttcattgattcaatcggacgaggaagatatttggtgggtgaggaaaggcacaaagttacaagaatctttcaacattgaacctgttcagaagtctgttaagcaaacttctaggggtagggcaaaagtggttcgtaaaacacaaagtcttgcacaacttgcagctgctagaattgaaggtagccaggggacatctaccagtcatgtctgtgaaagcaaaatgagctgtccccaccataaacctaatattgatggcgataatgttaaggattttgatcacacgagggtggcaaatctgactgaaattgggaagtcactaaaaagacttagattgcttgagaggcgatctgtctcttcttggttgttgaaaacagtaagacaacttattgaaggaaatgaaacaacggctgctaaagctaccaattccataagcattctttctttgcagtctgatgacaaaacgacatccaaatggaggctaggtgatgaagaactactgtcagttctctatttactggatacatgctgtgatttagtctcttgtgcaaggttccttgtatggttactagcgaaaattcgtggtggaatgggctcttcgggccaacctgggaggagttctatgcatacgaggaacagagatcaccaagtttgtcaggtacgagaacatacttcttgcggctgacatcctgcctgatgttctaagtgctttagtgaacagaaattctgtgtcagcaattgtcaggcatcctggttcaacagcttttgcttacgtacgatactttttgaagaaatatagagatgtggctggtgtggccaagtgggaaaaaagctttcggaccacttgtgatcagcgcctgttagctgagcttgataacgggcggtccattgatggcgaattgatttcttcttcgggggtttcagcaggcgaggagattgatgagcaggtccgccaaaagttgaatggaaggagttcaagacttgtgcagaatatgaaagaaatagtgcaacggcaagctgatgaaattcagcgcagtttgaaggaaaagaaagttctagcaactcccaggaatccacccacttttgagaaagaagatagctatcaaattgcacatgacattgtttcgggcttagtagaatgcatcaggcaaaatgggggtgcaaatccagatggagacctttcaacagttgcttctgctgtttctgcaattgttgcgaatgctgggcatgtgatagcaaaacatttggattttgcaggaggtaactatcaaggtgttaattctgtgagtaattcactaaatttcgttaggcacactttgcgtgtccatataaattctctttgcttgctgaaagaaactcttggggaccgcttcagccgtgcatttgaaatagctctggctgttgaaacttctggagctgttacagcagcttttgcttctccaaagatgcaccgcaatcagtttcaaccatctcctgaggcccatgatgcatatggaaatcatacaagtgatctcagcaactcagggaaaggttttgttgggagaactgctaaagtatctgctgctgtttctgctcttgtcgtgggggctgttgttcatggagctgttagtcttgagcggatggttgctgctttaaaaataaaagatggtttggatattctgcagctcctgagaggtttgaaatcaagttcgaatggtgtatcccgtcctactggaacttttaggattgaacattccacagatgttttggtacattggtttagggttctattggggaactgcagaactgtctatgatgggcttattgcagatattcttggagattcgtacattcttgcactctcaaggttgcagcagatgcttcctcttagtgtaatctttcctccggcctactcaatttttgccatggttctttggagacgatatatttttaaccgcgaagatccacagctttatcagtctctgtcaaacgcaataagcgatattaccagacatcaaccttttcgggagatttgcttccgcaatacacatcggctgtataatcttctggcttcagatgttggtgattcagagtttgcagcaatgcttgaaactcatagtcctgacaggaattcaaaaatactgccatttatacctctccgtgcccggctttttctggacgctcttattgattgcaacacaccaactattcagggagatggagcttcggagccttgtgaccccaaagataatgaattaaagctttcagagaggcttatgcaacttcttgatactcttcaacctgcaaagttccattggcaatgggttgagatgaggcttcttttagatgaacaagctcttatggaaaaagttgcagcaggcaagacagcacttgaatcacttcggtcgttatcccctaaagctgaggggtttaccctttctgatagtgaaaaagggtttactgaagtcattctgtcaaggctacttgctagacctgatgctgctcctctctattcagaagctgtccgccttcttggcaagcttcaggagtcccttgttatggatgtgaaatggattttacaagggcaagatgctattcttggccgcaggtcaacaagacagcagcttgttcatattgcccaacgaaaagggctttcaacaaaggcacaggtttggaaaccatggggttggtccagcttgcttagcgatgttattcctaataaaactgcaaaaaggaagttggaagtcacatcaattgaggaaggtgaagttgtggatgatactgttgatgctaaaaggcctagcaagactccccctcatagtgttgatagaagctttgaagcgattagatccataaataaatatttaactgagaaagcccttgctgaattagtattgccatgcatcgacagaagttctgctgatatccgtggtatactttctgttgatctgatcaaacagatggggactatcagtgaacatatcaaagcaatagcacggaatggtgctaaacaagctggttcagtcccttcaggtaatgaagtgccatcaagcaaatcaagtggtcgtaaaggaattcgaggtggaagcccaaacattggcagaagagctccggttggtaatgacccaagccctccgtcggcttctgctctgagggcagcattgtggttacgcctccaattcatcattaggttgcttccagtaatcatggcagataggagcatgagacaaacacttgcttctgcaatcctaggcctgcttgcaacgcgcatgatttatgaagatgcagatctgccccttccacctaccaatgcaactgctttaaggcgggaggtggattccctgctggagcctcccctggacgtcctgcttgatcggcctggtgaaagtctttttgagaggcttttatgtgttctccatgcacttcttggcagctacaaaccaagttggctgaagtcaaggtcagcctctaggtcgacaattagaatccaacgagatttttccgcatttgataacgaagcagccgagggtttacagtctgcgttggatcacatggaattgcctgaaacaatcaggcggaggatccaagcagccatgcctcttcttccaccatcccggcacccttctttgcaatgtcaacctccgcagttgtcgttggctgcattaacaccactccagagcagtacatctggtgtaggtccgcaacagaaaagttgttctgcgagctgggtgcccactaacgtctcaggcagaagcaaggcggcgttgccttcgcatgatcctgaaatggaggtagatccatggaatctgctcgaagatggcacaagctgcccctcaacagcatctggaagccatggcgcgagtggagtgacgggtgaccatgctaatctgaaagcgtgcagctggcttaagggtgctgtgagggtgaggaggacagaactgacctacattggctctttagacgatgacacctgacgtgtgtatgattattttggtgaattgtggaggaaattagtctcacctgttggcactggagtgaatggtggaaaccaaccatggcccttggctttaggatggttgttgttggtgtagaatacatacacatcgctgcccccgttttgttttgttttgttttgttttagggccttgtgggggcggctgtatataatggaaaaacatttgatccattactgaggcatggcccgagaagacaccttcaaatgggcttctgtgtaagcttgcttatttgagaagtaggaagccatgcagtagattttgtatccaaaagccgtgtacttgtttttgtctgatatgtaatctagcgcatgtcacacatatgtattcccttcctttgattgaagggctaatggtatgatgtcttttttttttgataaaacatgaggggtgagagcccctactggaaattaaataaaaaaatatgtacaaggagttacacgtttcttaattactcctgttctaaaatatagttttttctaaccctctttttttatgtccacattcaaataaatgag

SEQ ID NO: 25733 - DNA, 3057 bp, Zea Mays
aacgaatcgacctccacctgagattgcacagttgcgcaaattggcacacgggcacgcacgagagacatggcgacggaagaggagctgccggaggcggcggccgcgcctgcgccagcaggtggaggaggcggggacgacgcggagatgcccgatgccgccgtgccgtcgggctcccactcggactcgtccgactccgactccgacgacgaagccgccactgccgccgccgagctccgcatccaggccctagagaaaaccctacaggagcagccactggactacgagacccacgtgcagtatatccagtgcctgaggaaggcaggcaacattgagaagcttcgcgtggcaagggaagagatgaacaagtactttcctctaaccccgaagatgtggcaggagtgggccaaggacgagatctcattgagctcgagtgaggaatcttttggtgacattgaaaagatctacgggcatggggtgcaggaatacctgtccatcaagttatggcgggattaccttgattatgttgaagagcatgatcattcagtgtctcagtgtacaccttctggcctctccaagatgagaaatttgtttgaaagtgctattaccgcaggtgggctccatgttactgagggcagcaagctatgggcagcctatagagaatatgagatggccattttgatcaccatcgctgatgccaatgatgaggagagggaaaagcaagttcagcgtatacgcatgctattccaccgccagttatctgttcctttggctgatatggaatctacacttgctgagtataagagctgggaggctgagcaggggaatgcaaatgatcctggtgcagattttgatggtgtcccctcaaatgttgtatctgcttacaaaaaggccaatgatatgtacaatgaaaggaagcaatacgaggatcaactaagcaatgcaggcacatttgaaggtgacaaactgcagcaatttatgaagtacatcaaatttgaggaggcttctggtgaccctgctcgtgttcaagttctgtatgagcgagctgtttcagagcttcctgtttcaagtgatatatggatgggatatacaagttacctggatagaaccctgaaggtgccttctgtagtcagaagtgtttattacagagccacaagaaattgtacatgggttggtgagttatgggtccattatttgttgtctttggagcgtattcgtgcttctgaagaagagctgcagcatgtatttgaacgggcaatacaatgtaccttttcaaccatacaagagtatttcaatatttatcttactcgagttcatggtttaagacggaggatttctgatggcttggattttcaactgattaggcagacattaacgaatttctctcatctcaactgagtaccaaggagttactgcgcttatatgcttattgggccaaactagagcttagtctcggcaaagatctttctgcagctcgtggagtttgggaaaacgcgatcaagaaaagtgggtctgtttttgaagtttgggagcagtacattttaatggagataaaaatggaccatgtacatgaggcgagatccctttataagcgttgttatagcaaaagatttgctgggtctggatcagaggagatatgctactcatggataagatttgaagaggagaatggcaccttggatgattatgatcttgctgtaaagaaggttacccctcggctaaaggagcttatgacattcaagtctcaagaggaggctaaagttgaggcttaccctaacctcaatgataattctaatgcaaatgattcctctcagaaaagaaaaccaagtaacaataaacagcagccccctgctaagaaaagaaaagagaatccaccaaaaagtaccatgccatcagatgaccaaggatcaaatgtgcaaagtgggcacagtggtgctgttactgatgtagaagtcggaggggccagcagggagaaggtcatggcatctatcgagatgaaagtggacagtgacagccgaacagggaaatcaagttcaaatgaaccaaagccatccttttataatgacaactgtacagtttttgtgtcaaatattgacttgaaagcaaatgaggatgatctcaggcgattcttctctgatattggtggtgccacagcaataagattgctgagggacagattcaccaaaaaatcaagggggttggcctatgtggactttttagacaacaagcatcttgaggcagctattaagaaaaacaagcagaagctgcttggaaagaaagtgagtatcgcgcgatcagatccaagcaagggtaagaagagccgtgaagcaggtcaaacaagccaggataatttacctccgagtggtggtgatgatgcaaaagcaacaggatccagtggaccagacaatgaagtacccaagggtgatgcaaaaaccatagggaagaataccctttttgcaccacgagctctggttaaacctcttggatggacaaacaaggatgagaagaaaccagatgttgcaggggagttgaaatcaaatgaggagttccgaaatctgttactaaagaagtgatatcagttggcaggtgtggatctccatgccccaatccagtgccaagatttgtggtgccttcatctctatgttagaatgatggacctgtagtagcagcttgaactggggatctacaaccgttatgtcttaccccgatgtagacatgaatatttctttctgctagggagattatacaagccatgccgaattgcagggtggtgaaggtgaaaacgggacgttgcgttcgagcagaaaaaccctgcccatgtgaaaagaaaacactgaccttataatatgtgctcactttctttttgaaccatacgtacgcattgctggtgaaacatcactgcatctcaaaaatgtgtaatctactctacgcggcttgattggagatgcagatttatttgattgtacgttgggaccttttggaccttgcaactgcatatgttgagaggctaacatcttttcagagcggcagcccaacgacactttgcatacacgttttaaa

SEQ ID NO: 25734 - DNA, 3739 bp, Zea Mays
cccccatggccttgacttatttaccctttccctctccatcctccccttccttctgatcgcctccttcccgttccccgcagccgcccaaaccctagccctagcccctagccccgctgccggcaaggccggagcgcccggagcccccgctggccggccccggagaagacgtcccatgcggctgtatcgcgcaggggaaatttaggtgaatgttacaagcatgatgactcaaaccctgcaagggaaagttatggcctacacaccgagcagttttcctgttcagcaacagattctgccggaggatcttgaaatgcttcagctggataacatggaccagggtacctctccggttcgtgctgtcatcattaaaagaattgaaacatgcctgagaaatagagaagaattttgtaacttgtgcccagattcattactgaaagcttcagaaatcattgacaacctgctatacaaaattgatccgcagccccaatacatggatcttgacacaatagaagccagggtgaatgatttgctgagatcgttcctgtatggaaaccaaagagacccatggatatcttcagcagttccatcaacaaaagatttgaggcagctgcctgggatacaaatgacagactctagtgtatatcataatagagttgtccctggttttactaatttgcctgcacgcccaggaggcataccttcacatgctgtgttcactgctcagagatatgtaccactgaatcacaacatgactgctgccagttttgctctagttgaaaggcctgaaagctttatgagtaccgtagttgctccatctgtgtcaggacttcctaactgtatttctggccctggtgggattgatagttctggattgcaaaatggctattcaaaggaccattttccaggtgatgcttatcatgttgatagtccacaactgtctatgtccgggagtcccagtcctttatcagccttatgtgatccaatcacaagttcgggtgcaatgataagatcatcaatggattttatccctaaagcaagtgggcaaaaactctttactggcaaaggacaaatgtttcaacaatacagagaatatgagaaagagttagatggtgcatggagccaccccacagagaagccagttcactcaaataggacaactcagagcgatgaaatatatctcaaaggagaatgcggacctgatacactcacagaaatgaaggaaaactatgggcgcatctcagactctagagatccttgtgaccctgagagagaaattgttgagagatctgaacagacatcaaatatcacagtatcaaaggcaacttcaccaatttcagatgaatcttctggcaggcgtccagcaaaacgcctgaaggctgatgctccccgtcttgtcaatgtcaatcaagtagagagtccacaggagcaaaaacctgttgtgaatgagaatcatgtatctggtggtgaaacagtacaatcggaaatcacagaattacctgcaaaaccaccttgcagttcattgggagacattaatgctgagagcaataatatgcttgaacagggtagtgaagatgtacccaacatggatattgttaaggaagaggaattgtcccgtgcaaaaggtgacattgagatgaaagatgctaagactgttgcattggatcatacaccaaaaggggtcaatttaagttcaagacgaaagagaggggcttctatactttatggattaactgctgaggagcttagagatcacatgagtagtctaataaaccggcatacttgtcagagcaaggtgacatctcaagaattcccatcaattgatggattgcctgatcagaacacatgcagtttgtgtgggatggagaagcttctttttgaacctcctccacgattttgtgcgctctgtttcaaaataataaattctgcagggtgctattatgttgaagttgaaaatggaactgagaaatcttctatatgtagcaaatgccaccatcttagcagtttaagagctaaatatcagaagaaatttaattatgcagaaacagatgctgaggctgaatggtgggtccagtgcgacaagtgcaaagcttggcaacatgaaatctgtgctctttttaacagaaagtgtgaaggggcaaaggctgagtatacttgtgcaaaatgttttttgaaggaaaaggatagtggagatattcaggcactggagtcatccactgttcttggggcacaggagttacaaagaaccaagctaagtgatcatattgagcaaagactttcagagaggcttgagcaggacaggcaacagagggcgagcgcctctggaaaagttgctgaagaggtaccaggtgtgaaagggcttacagttagagtagtttcttcagccgaaagattactgcaagtccaaccacgttttcgtggtttttttaaacaaggaaagtatcctggggaatttccatacaaatcgaaggccattctcttgtttcaaaagatcgaaggtgtggatgtttgcctctttgccatgtatgtacaagagtatggctcagattgcccaccaccaaatcaaagacatgtttatcttgcatatattgattctgtcaaatacttccggcctgaaatcaaatctgcaactggagaagctctccgcacctttgtgtatcatgaaattttgattggttatctggactactgcaagaaacgagggtttgtaagctgttcaatatgggcttgcccatctacgaagcgagatgattatgttttatattgccatccaacagtacaaaagatgcccaagtctgacaagcttcgaagctggtaccagaacctgatcaagaaggccattaaggagggtgttgttgtggagcgtaatacactctctgacttcttccttcagcctacaaatgagtgcaaggccaatatttcggcagcatgcttgccatattgtgagaacgatttctggcctggagaagcagagaggctgcttgagaagaaagatgataatgcttcacagaaggaagagacacaggtaggaaggctcttgcgtgttgccaaacgcgacgacagaaaaggaaaccttgatgatattttgcttgtgcataagcttggggaaaggatgcgcacaatgaaagaagacttcattatgctttgtctgcaacagttttgcaagcactgccaccatcctatcctatctggcaaaagttgggtttgcactagctgtaaaaatttccatctatgtgacaagtgtcatgcagaggagcagaatacagcacagaaggacaggcatccggccaccacaaaacagaagcatgcattcgaaagaatggaggtacaacctcttccagagactgatgatggagatccgacaatggaaagtaagtattttgacagcaggatcgatttcttgaagcactgccaagacaatcaattccagtttgataccatccggcgggcaaagcactctacaatgatgattctgtattacctacacaattcaacctgctctgcttgccatcgtgccgtggaccaatgcttggtgtggcggtgcctagagtgcctaggctgcaccttttgtggtcaatgctataaacaaaatggtcaaggcttgcatattcatgaattaaggcagattgacactagagaaacttcacagaagcacactctacaggtctcatgtggatcgcaccatcattcttcgaaacaaaactttgctcaaatgatttttatttaagaagttctatgagaaaat

SEQ ID NO: 25735 - DNA, 996 bp, Zea Mays
aacccggaggtgggactgggaggcaccgtgtcgtcgtcgtcccctttcccttctctactccgccgccgctcgctcgccggtgaagagcaaatgctgctgctgttacggcagcggctctgttggcgccgcgtatctccgacttacctcgcgcctttgtaggatctgtggagactcgtgagtacgtgacccccacggtggatgaggataggcgggcctcgtccggcagcctgtgctctctgggacgggaggcagagctggcaccagagagagcacgaattgaggccggcccaggtgaacgctgctgaagctgctgctcaattaaaactaggggaacagatggggatgaagcgcgagcaagaaagaaagaaaggctgcacaactggcactgtatgaagaagactgttgatattgacaacagtcaacagccactttctgaagggcctggagaacttgtgccaaaagtaacaatggaagtttgttcatgggattgagttgacacagggcttagggagcccactgactggagacacttagcttggaggcctgttcatgaagaaagatatcgagaaagacgtcgaacatgaaatggaggacagcgtgtcaacctaccagaatgctgatgtcggggaaggagagatcagctgctgtcaatagtgtacctctctctattccaactgtgaacctgggattctatgatcatgtgcgtgctatgtaacctatgctgccactgtgcaacgtcacaagtcagcacatgctgcacgcctgcactaggatgtctagcgtatgctggacagctggagtacaatagttgggcgttgctgtctgtttttgtggttgtcatgtacagatgtgctagtgctaatgtatgttgtaggtgttccaggtctatgtaaactggacattctgtaaagaaggtaaaaaaaacaaagaatagtgagatatccatctatactatagttattatgtatcaatgtatgtgtttagagaaagatgttt

SEQ ID NO: 25736 - DNA, 2348 bp, Zea Mays
taatacgggctttagagcccactacccatataatggaagaaaaaactcaccaggcccaaataatagaaatcacattgtcctgtactactaatagtaatcacattgtcctcgtcgtcgtcctatcttctcttgctcttctcctccggcctcctcggtccttgctcacccgaaccagcaaccctaatccgtggccgcggacccgccgcaagctccatcgcgcgaatagattggggattcagtcgaggctacgcgggaactggtcgcgctcgagatcttagcctccgcacctgaaaccattggctccattgctattgctgtcgtggttcaggtgatgaaatcttggggagcgcgcctcgctcggtcctaagatgctggcgagctacggaggtggtggccgcggtgtccatctctcctcccacaaggacatcctcctcggccgcggcggccggagcttcctcttgggcaacacgtggtttctcctctccacctacccggcgcgcctcctgcacaccacggaccgccgcgcgcccgccgctttcttggccgtgatcaaccggcccccctgcatgcggccgcaccgcgctgggcagggcctgctgcagaggggtggtattgtcatggctgcttgcggctatgctcttgggcgagctgagctgggtgctgccaagcgccagcagccggataaggatccatctgcagggacgcgctcctcgaatgttgcagccacgggatcactgggcagtgcagcacggccagacgtctcttttaggtacagaggggcggattcttgtaagaaggtagctgcaagcttgaagtcgtctgagccatgggggaacagggcattctggacaaacgccgctgggccaggttggaagttgagctttgctgttgagccatggaccaagggctttagcacgtcgtgtgcggcgccatattctgctggagccacagagcatcaattatcgctcgatgagaaggtggataactccaccgttgcatctgattctgatgggaagtcaccagtttctgaaaaattgaagtttctctctggttcatgttacttgcctcaccctgataaggaggctactggtggtgaggatgcacatttcattagcattgatgagcatgtgattggtgtagcagatggtgttggtggttgggcagatgttggtatcgatgctggactatatgccaaggagctaatgagaaattcaatgagtgcaatcaaagatgagccagaagggaccatcgatccaaccagagttttggaaaaggcttatatgagcaccaaagcaaggggatcatccactgcatgtatcatcactcttaaagatcagggtatccatgctgtaaatcttggggacagtggtttcgtagtagtccgagacggtcgaactgttctcaggtcaccctcacagcagcatgatttcaacctcacttatcagcttgagagtggaggtggcagtgatcttcctagttctgcacaagtatttcacttcccggttgcccccggtgatgttattgttgctggcacggacggactttttgacaatctatacaacaatgagataagtggtgttatcgttgaagcgctcagggttggacttgaacctcaagttgcggcacaaaaaattgctgccctggctcgacaaagagccacagacaaaaataggcagtcaccatttgcatcggccgcccaagaagctgggtaccggtactacggtgggaagctcgacgacataacggttgtggtgtcgtatgtgaaaagcgcttgattcgagcctttctttttattagatgtaatgtcaaaatcttagtcccgaatttaatggcacatgtgttctcaaggtgtgaaatcccctgagatactagaagcactcctgctgggtttagccctggaatacgttagcaaaccattacaccattttacttgtttgccactgtgagtaatcttctttttatatataattctctaaaaccagggcggtcgtttcgcccttggagttggagggggaggataatgacctgctggaaccaaattttgttgtaaatattgtcgattgccgaatgataacatgttggactcaatggtggattgttgatgctgtttgaaatgtttctcttgaccccggagaacggcttctcaatatattgtcagtatgagttccatagaattgaaatgcaagagccaagaggggtgagactgatggctctatcgatctatttattagtatttattacggagcacaagaattttacgagcatgagaagagtgatggcctcgaaacaccatgagcctacgatgcagttgcagtccaaacgcctaggcgggcgagtttgatgctgcg

SEQ ID NO: 25737 - DNA, 1738 bp, Zea Mays
ctcaacattgttttatgaaccacctttgtttggcatctgtggtccgtggttcgttcatgtggttttgcattcggatggcttttgagtctatattggtgccaaaatgtagcgaaaggcttcctgctgttgaattttacaactggatttgaaccagatgcctttgtagcagtatttgaaggaggaactttcttgaaggatcatatcgttttattgcctaatatgtagttttgctattgcggcttcattatgtactttgtggatgtgtactgggtttcatgtatcaaaatatctgtattttgactagttggctgttacctggtcttatcaaccgtgttaaatggttttgtgggcacaattggagacattttaactgcagttcctgggctgtttggagctatggggtatttatggcttttgccttaaacctggaaatttcttctctgcggatggtttcgacgaccactacatttaagatcttgaatgtgttgcagctttgttgcacttctaagtttatttttaaaattcccagtgtttaacagtagccgcgcaaaatagcttgaatgttaagtggttatacaatcccataagggctagtttggaaacacaaatccccttggggattgagagggaaattagttcatttccacctcaatcctctccaatccccaaggggatttgagtatacaaactagccctaaaagagatgatttgacctgacggatggtttgcatatggtatctctgggaatttagtgttcattctttgaaaatattttggagctctttcttttgccttactgtgacaatggtcatgtcttgacagttgacacttcataactgtattactgattactttagtgtctccattttctcaactaccccactttatgttgatttttttcatggattgcctatgtgaggatgtactgttcatatatgcacaataagaatttcaaaagaagactgttcttgctttgttcttattagacccaatatgcactaaatgttagattagtagatgttttttcttactgctggtagaatactaggttgctgaccattggagtgttaaatcgtcatgtgaaccatgaataggccaagatgaaactgtcaagtggatgaatatcaataaattttaatccttgtgcatgcaaccatgctgtctttttcttttcacgacatgaaagtagtattgtgaaatcattgtgtttatttcatcaacagaattagtattgctactgatgatcttacatcactcgcttgccattctgtcttggtctgttgtgcaatgcatgtctctggatattatagatagtgctgcctgctatatttcaagtaatacatttgacacttcgcacttcctaactaaccaaacatcacttgccaaatcacaatttataaaacacagtaccagttccacccactagagttgaaagcacacttggaggtaattagtgcgcagaggcggcatctggtcagcagtggcaggggagtcctgagccctgggttccttctgccttctaatgtgctggatggcccatgccagactaggctaccttctgtttcacatttctgttatttaattttcttattacgttcaaggactaatgataccctctctttcagaccatttgctatcacatccctcctcttgccttccccaatctagacaaatgccttgccatgatgcaaattgcatttgctgacaattctttatttggttcagtgcttaaaaatat

SEQ ID NO: 25738 - DNA, 3750 bp, Zea Mays
ggtccttctcagtctccctcgtctccctcagatctaagccaccgtcccttcccccagctccggcgatcaccggagtgcctccgccttggggcatgatggacctcctcatcgcgcagatcaccactgacctccgctcctcggacgcgctccggcagtcgtcggcgctgctgcaggccctgcagcagtgcgccgcggggcgggacgtctccgcgctcgcccgcaccgcggccaccgagatcctgtcggcgccctcctccgccgtctgcaagcgcctggcgctcgacctcctccgcgcgctcccgctgccgccggacctcctcgacccgctccttctctcctccctccgctccgatctctcctttccagaccccgacgtcgccgcctcctccatcgcctcgttcccatccctgccctcccaccttctcccctcgcttctctcctccgcccacgctgaaatcgctaatgcactctcctcgcccgctgagtcgctgcgcctcgcagctgtcacatctctgtcctcgctcctcccgcgcgatgacctaacgctcatgtgctccacaaacccctccctcatggcgcatgctaccacgtggtggggccgcctggccgagcttgcgctggactctgcagacgctgtttccgccggtgcgtttgaggctcttgcacggctgttccaggagctagaggggcgccgcatgagccggctagctggagacaagcttgttgatggagaaggtgcgcttgcagtgcgtgcccagtgggcggctgatgccattgatttcatttggtcaaggcgcaacatgctgattgcgcgctctatggtgatgcctgtggagagcttccgagttactgtgtaccctctagtgcatgcagcaaaaatggttgcttctggtgtggtaaacactctgcggcgagttgctaagccaggagacactacaattgctgatagcgtggagtcgagtgcggagaaattggtaggagtgtcagacatcgtctcacacttgctgccatttcttagttcacttgacccaccactggtgttcgaggttgggatcaatatgctggcgcttgcagatgtccctggaggcaagccagagtgggcatcagctgcaattattgcaatcctgacactatgggaccggcaagagttctcttcgatgagggagacaattgtaagggctgttgtaaccaatcttcatttgctggatcttggaatgcaggtctctctattcaaaagactgcttcagatggtgagaaacttgagagcagaatcagatcgaatgcatgctttggcatgtatttgtcggactgctctttgtgttgatctttttgcaaaggagagtgtccgaagaggtcagaagcctgttcctggaacagatgtgatatcgctctttgaagatgtgagggtgaaggaagatctaaacagcgtaacaagcaaaaacttgttcagagaagagctagtggcttccctagtcgaaagttgtttccagctatctcttccactaccagagttgaagaattctgggacagagagcagagttataggagcgttagcctatggaactggttatggtgcccttaactggacagaacctgctttggatgtggtggaagtttgcaggccatgtgttctttgggactgtgatggtcgtacctatgcaattgattgctatctaaagttacttgtgaggctttgtcatatatatgataccagaggcggtgtgaagacaattaaagctggtgcatctcaagatcagattctgaatgagacacgacttagaaatttgcagctgcagcttatcagggaccttcgcgaggttcacactccacgtatatcttcacgcttgatatgggcaatttctgaacactttgatcttgaaggatacaagatgtgcaggctgttctaatttgcgctcagcggttgggagcaagaaatgcaagagcaggccaacttctcactaaagaactggaagagtttagggcaagtacttcagctgattctatgaccaagcatcaatcacgttatgtgttgcaagtaataaaatacgtaacaaaccatcctgacaacaggtgggttggtgtaggtgatgctacaggggattatccatttagtcaccacaagcttaccgttcaattttcagaggcgtctgctgcccaagataggaaattggagggattagtccataaggccatccgggagctttggaggccgaatcccagtcaattaattctcctacaaacaaggggaattggtgctttgcataaagagcttccaaaagcgtgtgctttgactggcagcagtgatccgtgctacatcgaagcatatcatttggcagatccaactgatggcagaattaccctacatctaaagattttaaatttgactgagctggaactcaacagggtggacatccgtgttggcctgtctggagcactgtattatatggatggtttctctcgcactgttcgtcaccttcggaatcttgtttcccaggatccagtccaaagtagtgtgactgttggagtttcacattttgagagatgctcgctctgggttcaagttttgtattacccgttttatggaagtagtggatcaacagactatgaaggagattatgcagaagaggattcacagatgatgaggcagaagcgctcacatcggcctgaacttggggaaccggttgttttgcggtgccaaccatacaagtttcctctcgctgagctcctcctaccattagagtgttctccagttgagtatttccggctatggcctagcctaccagccatggtggagtgcactggcacatacacatatgaaggcagtggtttcaaggccaccgctgctcagcagtatgacagctctcccttcctcagtggattgaagtcgatttcttctaagcccttccatcaagtctgctcacatttcatccggacagtagctggattccagttatgttatgcagcaaagacatggtttggtggatttgtgggcatgatgatatttggggcaagtgaagtcagccggaatgttgatttgggtgatgagaccaccacaatgatctgcaaattcgtcatgcgcgcatccgatgaatccatcacgagagagatcaaatccgacctccagggctggctggatgatatcaccgacggcgctgtggaatacatgcctgaggatgaggtgaagagtgtggccgccgagcagctgaagatctccatggagaggattgccctgctcaaggcagccaggccaaaggtcccacccgcaaagaccgatcaagaggaggaagaggagcgaaagcagagcgaggaactagatgggtttggaaaccccaagggcccctcgacgctctccaagctcaccgcggaggaggctgagcaccgcgctctccaggctgccgtgcttcaggagtggcaccagctatgcaaagagagagccatgaaagcgcagtgaggtcgatttggaccgtgtggatcttacgcgcatgtataattttgtatttttccttcgtctcccattctttgcgtgtctatactgctggtttcactcactgtataccgtcgccgatttgttcattgtattctcaaatacttgtgcacgaaaaaacctgttttgtaacatactactgttagggcgtttttaagcttcggtgtgaagatcgattgtacaagagaatccaaatgtcattgttgccttcccagttttatgaaaatgcattctgtaattgaagaattctccccaaaatgccacga

SEQ ID NO: 25739 - DNA, 1731 bp, Zea Mays
gtgcatcagatgcctttgtttttaatagggaatgctgctgctgacgctggcggtctccgtgccggcactgaagccgcctccctgcgaccccggcgccggcgccacctgcccgcgcgcgtcggcgctgcagctgggcgtctacttcggggggctgtacaccatcgcgctgggacacggtggcacgaagcccaacatctcgaccatcggcgccgaccagttcgacgaattccacccggcagagcggctgcggaagctctccttcttcaactggtggatgttcaccgtgttcacgggcatcctcttctccaccaccgtgctggtgtacctccaggacaacgtgagctggtcgtgggggtacggcgtgcccacgctggcgctcgcggcctcggtcgccgtcttcctcgccggcacgccgctgtaccggcacaagctaccgcagggcagcccggtcacgaaaatgggcagggtggtctgcgcggctcttcggaagtgccgcgtcgcggttcctggggacctgagcgagctgcacgagctggagcccgatcactacgccagcaggaagaggtttcgcgtgaacccgacgagctccatggggttcctgaacagggcagcggtgaaggtggcgggggaggaggaggtctccggcgggtggacgctgtgcacggtgactgaggtggaggagacgaagcagatcgcgaggctggtgccgctgctcgccaccatgttcgtgccgtgcgcggtgatggcgcaggtgggcacgctgttcgtgaagcagggcgtgacgctggaccgccgcgtcgggcgcggctcgttccgggtgcctcccgccagcctcggcgcggtggtgacgctgacgatgctcgtctgcgtggcggtctacgaccgggccctcgtccccgccgtccgaaggcgcaccgagaacccgcgcgggatcacgctgctgcagcgcatcggcgccgggctggtcctccaggtggcgacgatggcggcgacggcggcggtggagagccggaggctgagcttcgcgagcaggagccacggcgccacggcaggcggcgagctgccgctgaccatcttcgtcctgctcccgcagttcgtgctgatgggcgccgccgacgcgttcctggtggtggggcagatagagttcttctacgaccaggcacccgagagcatgaagagcctcggcacggccatgtccctgacggcgtacggcgtcggcagcatgttgagcagcgccatcctcgccgccgtggagcgggtgacggcccggcgcgggacgccgtgggtgaccgacgacctcaacgcgtcgcacctcgactggtactacgcgttcctcgccgtgctggctgcggccaacctgggcgccttcgtggcgctgagccgcgggtactcgtacagggcggaggccatcggcgtcacggcgagagtgcactcggagccggtggtggcgccgtaacaagtgcttccacatgcacggtttttagctcgtagtacgtagtacgtacgtgattgtgaccatcaactgaactcaccacgcatgcagctagcggagcaagtacgttcttcagacagattcgcatggtgcatctgtagcatgcagtgactggcattcaaaaatacagtagtttcatcgtgacgatcgctagcattcaaaaattgaagcagtgcacatgtagaagtgtcgttgccaaatgccaaagcccttatccaattattgagatccttattgtg

SEQ ID NO: 25740 - DNA, 2909 bp, Zea Mays
taataatcgtgtcggcagtcggcacccgactcctaagctagaatcgcactccactccactccactctccagtcctcactcccacacccgtacgcttcgcggcgcgtcacttttgccagccatacgccagcctgagcgcccgacgtcgcgggattcgccgggaacgcccacaccaccggccgcagccgaccaggcagacgagtagggtggtggtggtggtagcggtagcgcgggggcggggcggcgctgcgtgaccgacgccacgggagatgaaggccaaggccctccctttcatcgccttcgagcacaagcgagacgcctatggcttcgccgtgcggccacaacacctgcagcggtacagagagtatgcgaacatctataaggaggaggaagaggagaggtccgacagatggaagaattttctggatcggcaggctgaggatggagaatcatctggagaggatgccaaggttgcgccatccaacgaggaagatggagttgctgccaaggatggcaggacagagccaagaccacataaaatccaaatatggtctgaaatcaggccctctttgggccatattaaggagatgatgaactcacgcgtgaaaaagcaatcttcttctgttaatgacgggtacacgagggatgaaccacaccctggtaattctgaagggagcaagccatcggaggattcagatgatgagttctatgatgtagagaaggttgatcctagccaagaagtgcctgcaactgacatagccaatgctgagtcaggtacaaatagaggtgcagaacaagaacattatccttggaaagaagaattagaatgcttagtccgtgatgggcttccaatggccctgagaggagagctgtggcaagcttttattggtattggagctcgtcgggtcgaagggtactatgagggcctccttgcagcggacagtgaaagtcaagacaacaaatatccgggatctccaacttcggaatgtggtgacggaaaaccaaaaccatctcaaacattttcttctgaaaaatggaaagggcaaatagagaaggatttgcctagaacatttccaggacaccctgcactagatgaggatggcagaaatgccttaaggcgcttgctcacagcttatgctcgacacaatccaccagttggttactgccaggcaatgaacttctttgctggcttgctacttctgctgatgccagaagagaatgcattttgggcattgacaggcattatggatgactattttgatggttacttctctgaagaaatgatcgaatctcaggtggatcagcttgttttagaggagttagtccgagggagattcccaaagttagtaaatcatcttgattaccttggtgtacaagttgcatgggtcactggtccatggttcctatctatttttatgaacatgcttccctgggaaagtgtgcttcgtgtgtgggatgttcttctctttgagggaaaccgtgtgatgctgttccggacagctcttgcactgatggagttgtatggtcctgcacttgtgacaacaaaagatgctggggatgcagtaacccttttgcagtctttagctggttccacttttgacagtagccagcttgttttaacagcttgcatgggatatcaagctgtaggtgaagcaagactgcaagaattgagaaataaacaccgaccatctgttatctcctcaatggaacagagagcaaaaggtcttcgtgtctggagggatacgaacaggcttgcatctaggctatataattttaagcgtgacactgaaccattggtgtcgttatcagaagaacagtcaaatgacttgacagatggcgataagaaccaagaagccaattgtagtaatgtggatgatatgtatcatggcctcactgtcaactctgagattgattctctgcctgatcctaaagaccaggtagtctggctgaagggtgagctgtgccaactgctagaggagagaagatccgctgttctgagggctgatgaattagagacagcacttatggagatggttaagcaagataacagacgcgaattaagtgcaaaggtcgagcaattggaacaagagttatctgagcttaggcaagctctatcagacaagcaggaacaggaacaagcaatgcttcaggttctgatgcgtgtagagcaagaacagaaagtcacagaggacgcccgtatctttgcagagcaagatgctgctgctcagaaatatgctgcacatatacttcaggagaagtacgagggagctatggcttcacttgctcaaatggagaacagagcagttatggcagaaactatgttagaggcaaccattcagtaccaatctagtcagcagaaagcacagcttccatcgccctctccttctccaaggaccccaactcgagatgcatcaccaggccaagggaaccaagattcatcgcaggagttccagcctagaagaataagcttgcttgccccattttcttccctcggatggcgagacaagaacaagaacggctctgatgagtcaacaaacggtaagctcaataatagcaccgatcaaggggttgaaacacccaaaaaggacgacgaaaagaaggccgactcgccaaaagagagtgaacagattgtccgaacaccggaaagagacaatgaactgagactagggacacccaagatggatagtgaggtaccaagtgtggaaatggcggcaaacagtacgaatgggctggaggaccagttggaggagataaaattggattgatatcctttggctggtcgctaagccgcaacataaggtctgttgatcgcctgtaagctatcataagtacacatgaaaaagacgtaccaaatagaagattaccacgaaagcaatttttggaacagatcgcgccctaccgttgtcctgg

SEQ ID NO: 25741 - DNA, 1366 bp, Zea Mays
gtaagcttgcattcgagcacttctgcagttctgctcatgcgaatacccagtgtttcttttctgcacttcttctttccctcctcgccattgcgattgcgaccacattcgtcttcgtggtggccgcaattagggctccacgaaatactcgtggctcgataactcgctcgattcggttcgttttaattttgtagcgagcaagctagcattctagctcgtttctctaatgagccagctcgggtaagctcgtgagctagctcgtgagccaaacaagccaagccacaacacaagtttgtctagttattggtgtcatctcatctctcatagtcttgttttctcgtagttataatcttagatatggacatgtgtgaatgtgtcatatgctcttattgctatcttattataataagggtataaatctgtaagttaatacatatttggttatttaatttaatattaaaagtaagaacctagaacgatgatatgataataatattataaaggttttgggtgtgtagtgttaaacacttaaaatatgatttttcagttatatatatttatgtacatagatcttttatttagttgtgtagctcgcgagcctaacgagctgactcgagcttcctaacgagccgagtcgagccagatgtttagctcgttagtataacgagtcaagccgagctagcttattacagtaacgagacataagcctagccgcactcttcttctaatcaatcacaacacgacatatgcgtatgggcacaagcaagcaaatggcaaatccaatcattctattgtgatgggttgccagttgtcacgctatctctattatattactgcttggtccccgcggcaacggctccaacaactagggaaatcgacggtgaggatcgttccaccgcacatccaagccgacaacggcaacgccacccgcacgtcccgcgcggtccgtcggtcgcccccaggaaaccactgaagtttcagccccaaacagtccaatcacgctaattaattactttccccccaaaaaaaagccccccaccgcctcgacctcgattcctccgcccccatcgccgtcgtctcctcctccgcctccctgtctgtccgctccgcacctcccctaaaaaacccccccggccattgccgcaccgagctccccttcctcaaatgccccaggcccggacgcctcgacgcccagctccgtgctcgcatggctagcggcgtcctccatcgctccgcctccctatgtctccgcccggccgccggctcctccgccgactccggccggggccacggcgcggttatgatcggtgattcgaggacgcgcgttgctgctctgcggctgggaggatctagccgctgtctgtcttca

SEQ ID NO: 25742 - DNA, 3387 bp, Zea Mays
gatccatggaccagtccgacgtaacccaaaatttaaacggcctgacccgtgtcgcggaggacgcccgaatgtacaccctataccgctggttcccgttcccaagatagagctgccccagacgctccagaatccatccaatacctttccatcgattcttggcatcgccctctctctaaaccccaactcctcgactcgagcaatccctaggtctccgcgcgaggcggtggcggctgtgaggggattttgattgatttggctcgagatggcggaggacaaggtgcggcggatcttcgtcggcgggttgtcctggaagaccacggagcgcacgctcgagcgcaccttcggtcagtacggcaatgtcatcgaggcacagtcttgcaattttaatctgacagcaactgctgattcagagaggctgcagtcacttccatttctatatgttaggatcttaacaaagttgcaggaaaagaaattcactaatcaattgagctcactggttagcatctgtgggatgatggggtcagtaaaagtcaattggagaagtatgcactattaggttcaattttccgagatgtgctctgttttgtggacagaacttgagacttccttttgccttgctagtacataagagtataagacaactgccgacagctttagagcacagaaaagaatcatcacgggcatgattaatgaactccacgaaccaaacatggtcgccagtgctggaatgaacttgtggcaaaatttggttgcatcattgttctggatcagtttgatacgaaacacagagaaactatttgtcctttcagtagtgaggcaccactggtgatgctggagagtgctgtatgctcatctgtgcctacttctgcttcaaagagcattattctcagtttccattgtgcccttccaattgcaatggaaatgcttagttattcatgcaaaagaaaagccaagattagaaaaaaaaatgcatttagacttttggattatgttttcctgtatacaactgggccaaaagtaatcggtttcagttcagtttactggattggagttcactggtacttgcagcacatggtcctcacctggaagtgttcagactggccaatgtcatttgtggtcacatactcacatgcttgattattcagttctgagttctgatctttggctgtaccgctatagtaatctttaatgttctttaccagtggatggtcaaagcagttttttgatttgcatgcaatatttgagctgtggcataagaattgactgttaactcttgtagaggtgggacaatttcactggttttgcagaatgttcataagctgtttgatttcatatatcaccctactgcatgtgaacttcctattgatagaatttttggttgctcactattatatagttcctatcttcccattggttcattttcatcatatgtataggttgtagtgaaaagggaaacaggccgctcgaggggatttggatttgtcacattctcagaacctcgggctgtggatgctgccattcgtggaatgcataatgcggaactggatggccgtaatatttctgtgaacaaagctcatcctaggattgctgacgatgactatggctatggtggtggtggtggtggtggttactcgtctggtgctagaggtggatatcgtagtggcggtgatgtagttccagcagtgagtgatgaatgtttcaaatgcggccattctggacatgatgtagttccagcagtgagtgatgaatgtttcaaatgcggccgttctggacattgggctcgtgaatgcccttattcagatggcagtggtagaactggaagatattctcccgcttcaaggtatggtggtggcgctgggggacgtggtgaccgcgttggaggatcagatcgttttgctcgctatgatgatgaccgatatgatggtggccggtctgtagacagcagggatacttattatggtgctgggcgagatcgttatgctagggatcgccatctgccagcaacagaccaccattctggtgacaggtacagtggtgcagatcgttacacgtccagtggctttgccatagaaaggagctatgagagagatggaggcaggtccactggaacttactaccgtgatgacccgaggggcactggtggctatggcagaggtggttcacgtggcggcggcggcgggcctgctcgctttggtgggagttaccgagataggcctgctccgtatgaccgtcctagcaggggcggggcagctcgtgcttatgatgatcgttactgaagaatgtttccttgaagtagaacagagatgttggtgtattttagttttgcatcagtatttgcacttgccagcttgatccttcaattctatgctattcagcagcgcagtttgttttagtggtctctgaagacaatggttcagtatgtcagttactatcagtatgttggtaccataatctgtaggcagtgatcctggtccatttgacatgtttgtgtaattgcttggagtctgcactaaataatgaactaatcgcagcatgtgatctttgaatcagcctggtgttctgcttactgagatagctgtgccacattctgcattgtggatgaactttgcaccgataattctgagatgtgctgtgcggcaatgtgcagatcgatctgttcagctcttgatgctgttgggttttgttggtctaatatcaggaaggtttaattctgcttctagtctgggttgagtaagatggtgggaatctgagtctcagaaaaactgtggttcatgcagtcaggtgatggttatgatgttttcctgatgcagatgaatgcgttatgttactgatttactagcgatgtctggtgcagatccgcagataaatttggcttctttgctttgttctctggcttattctaaattttctttcaaagggttgttattcatttgaagattattattttttgttcgcggcttgccactgattggagttggattgcacacataagataacgatgtgttcaccatacaagatgtgatcccacgtcctcttaacagaaacagtgttggcagctgcaagcatacaaaagatgtactacacgacagggattaagttgcagcatatgaccctagctcatcaggatggcgtctgcatcctaggccttcgaggctccgattttgggggggcattggccatcggacgcattgtgggctgtgggggcaagttgccaccaaggaacaccctttgtattagatgatattgggtcggttaaatccatcccaatctattctaatacactctaatccaccacagcgatctttgcaagacctttgaagaagctctaaattgctcgccaccgcaaatttgtcgtcaaacaactttgttacgggacgggaaatggac

SEQ ID NO: 25743 - DNA, 383 bp, Zea Mays
ccacagtttaacacatcgaatagtacctcaccccaaatcgtggccgccaaagtgaatccaacggccacaacgtccgttgcggcaacagccgccacctccgaccgaggccgagcaggggcatgtgagcaggcttcgacggcgcacttgccggcgaggaatgatctagcgccccaacacccagtcaatcgttgacgcttgcaagatgatgtggaggagatagcgaacgcgcgaagggtgaatttaccggagattatgcagtgacgagatccaatttctttgcccagcggctgagcggtggaatcaaggactcaggcgacgaatttgcttcctctggtctccagcggctgacgaatttgtgacacggcgaagcccctccggtaccc

SEQ ID NO: 25744 - DNA, 2403 bp, Zea Mays
agtccactccaccaccgttcatgcatgaccatggagagatctcaaccgcagcaccagcagtctcctccgtcgccgtcgtcctcctcgtcctgcgtctccgcggacaccgtcctcgtccctccgggaaagaggcggcggagggcggcgacagccaaggccaataagagggcccgcaaggacccctctgatcctcctcccgccgccgggaagaggagctccgtatacagaggagtcaccaggcacaggtggacgggcaggttcgaggcgcatctctgggacaagcactgcctcgccgcgctccacaacaagaagaaaggcaggcaaggtgtgtgtgtatgcactgtgagctgctgttcctttctgactgtcatccagaatccatccccacactttttttatcgtaattacctttgaagcaacatggttttttctttctttcaaaagtgcaccgaaattcttaaggctgacattctgatcaggctttgtatatctctctcttcttcttcttttttatcttctgccgccatctctgtgggggtccccttgcgtcgcgacggtgatctggcgatctattgctgctggctgcatcgtccatcaacagtctatctgggggcgtacgacggcgaggaggcagcggctcgtgcctatgaccttgcagctctcaagtactggggtcctgaggctctgctcaacttccctgtggaggattactccagcgagatgccggagatggaggcagcgtcccgggaggagtacctggcctccctccgccgcaggagcagcggcttctccaggggggtctccaagtacagaggcgtcgccaggtggttactgctcattaatctactcattatactaaaaccttgatttgaacacctacgcctcgatctgatcacctaatgttagtttaaaccctctcactagtcactagaatttacttacaagtaggatctgtcattcatgtagaattgtactagtactactgtgctagctctgactcggaccaatgctctctagttgggtgattgtgaaatgggggtccaggcttcacactgactcggaccaatgttctctagttgggtgacacggtgcaagatgaggcccacctgtaacgtcagatcaggcatgcatcacctgggcctgtgacacgtcacacacgccacgccagccattgtgctgtgcatgactcatcaccaggcactgtgcttgtgcacctagaaaatgccagctctgaactgcaagcaccacagactactttgaaaccagtgcatgattttcagctcatttcggtctgaaaccagctaaaaaggacgaaacttttgatgttcttgttgcttccatggtctaggcatcaccacaacgggagatgggaggcacggatcgggcgagttttagggaacaagtacctctacttgggaacattcgacactcaagaagaggcagccaaggcctatgatcttgcggccatcgaataccgaggtgccaatgctgtaaccaacttcgacatcagctgctacctggaccacccactgttcctggcgcagctccagcaggagcagccacaggtggtgccagcgctcgaccaagaacctcaggctgatcagagagaacctgaaaccacagcccaagagcctgtgtcaagccaagccaagacaccggcggatgacaatgcagagcctgatgacatcgcggagcccctcatcacggtcgacaacagcgtcgaggagagcttatggagtccttgcatggattatgagctagacaccatgtcgagatctaactttggcagctcgatcaacctgagcgagtggttcactgacgcagacttcgacagcgacttgggatgcctgttcgacgggcgctctgcagttgatggaggaagcaagggtggcgtaggtgtggcggatttcagtttgtttgaagcaggtgatggtcagctgaaggatgttctttcggatatggaagaggggatacaacctccaacgataatcagtgtgtgcaattgattctgagacctatgcgtggcgtgcgacaagtgtcctgtctttgggtatacttggtttgtccaatgccacggtgccactgctgcgagtcagctgaacttcttgtagaaagcacatggcagcttggcattagacaagtgtgttggtgttccttaattctttggatatgctttaggcattgactaaccttaagggttcgtcactgtctcgcttagcttagattagactaatcacatccttgaatctgaagtagttgtgcagtatcacagtttcacatggcaattctgccaatgcagcatagatttgttcgtttgaacagctgtaactgtaaccctatagctccagattaaggaacagtttgtttttcatccatacatataacacgctttcagaagcagac

SEQ ID NO: 25745 - DNA, 2802 bp, Zea Mays
cccagtttggaaacgcgtagcttccatctccactcccacagtcccgctcccccgccatggccttggccatgacctcctcgtccacgcagccaccgtcccctcaccaccgccgccgtcgccgctcgcaacctaccaccgccacccccaatgccaactccaaacctaaacccaaacccagggccaaggcgctccccctactctccgacgtcggcgtcggccgcgaccccgccgccatcaagtactacgcccgcgtcgcatctaacctcgcgggcgccggccgcctacgagacttcctcctagccgccgagggcctccgcgcagccgcgtgcaacgaccccagcttcgcggcccgcatcagcgcccgtctcctgtcgcgcggcgtcgccgccgctgtccgcgagcgcggactgcccttcatgctcgagttcttccgagacgccgagcgcgtgcgcgtgccggtagtcgagatgctcgacgccgacgcgtccaacgctgtcgccggcgcctgccggatgttgctggaggagcgacgaatggtggagttcgtggaggtcgtcgaggcgctagctcgatatggattctatgttcaagacatcgtgaaccccatggatgtactgaaaatatttgtcaagcagcgtgacccagatatagctataaggtatgcacgcatatttcctagttcccaacttttactctgcaataccatggaagcttttggaaaaagaaaggagttgaaaaatgctttattgatctttggagcccttaagaatcagcttggaggcatcaatatgtttgcatgccgaagtataatagatatatgtggccattgtggctcttctgtacaggctcgaattatatttgaggggctgcttgctgataagattactccaaatacctatgtcttcaacagcctaatgaatgttaatgcccatagcttgagctacaacttttcagtctacaagcatatgcaaaatcttggtgtccctcctgatttgacttcatataatattcttctcaagacatgctgcagtgtcagagaattcaacttggctcaagaaatttatgaggaaatgaagaaaaaggaacgtgatggccttttaaagctagatgttttcacatatagtacaatgatgaaggtgtttgcagatgcaaaaatgtggaagatggcttccaacatcaaagaggatatgcaagcaaacggggttcgtcttaacctagtaacatggtcatcgttaatcaatgcttatgcaaattctggtctggttgatcgtgcaatagagatcctcaaagaaatgataagggatggctgccaacctactgccccatgcttcaatattatccttactgcatgtgtcaagtcatgccaatatgatagagctttccgcttgttctacagttggaaggagtctggtatcaagatctctctatcctctgaacagaagagagttattgatggtggctttacattctgtaaagagtatcctaataatgacagtactatattggtggttccattcaggccaacagtcacaacctataacatcttaatgaaggcttgtggtactaatgcagaacgtgcaaagtctaccatgaacgaaatgaggcggaatggcctttgtcctgatcttattagctggtctatactcatagatatttatggatcttctcaaaatagggatggagctgttcaggcactaaggagaatgcagcgagttgggatgagacttaatgtctctgcatatactgttgctattaaggcgtgtgttgaaaacaaagatttgaagttagcactgcacttatttgaagaaatgaaaacacaccaactgaagcccaatttggtgacgtacaaaactctcctggcagcacgcatcaattatggatcactacaggaggtccaacagtgtttagcgatatatcaggagatgaggaaagcagggtttcaggcaaatgattattatctcaaggaattaatagtggaatggtgtgaaggagttctgtctagtcgcagtgataatcaagatttttacaatttggatctacaacctgagactgagaggaaagaatcgttcaacctgtttcttgagaaagtcgtaacagtcttgcaaaaagatactgatcagaaccaaattgtcgatgttcgtggcctttcaaaggttgaagctcgaattgttgttctctctgtccttcggaagatcaaagagcaatacctcctaggaagagtggtccaggatgatgtggttatcatcacgggtcatgagaagacatcaacaactgaagctgaaaccacaactagtgcagttgacgtcgtgcaggcaatagttactgttttgacggatgatctgggtcttgaagttttgattggacctggaagctgccctcccgtttcatcaaaacccaaagcaccgactaaatctagaagtaatttagagcaaatatccaaagaatttactaggagaccacagggaatgataaaaatccctatcaactcacttaaccattggttaaggaagaaagccgtgaggattgcagagtgacatttccttaaaggcttaaactacctttttggtccatttagtataccagtaaatcagcacagctattccaggattgggtgtacatatgaaaacaggttactgctcctggtattccaggcacactgacacgacttgaaaagggacttgttggcaggcaataaactgtgcttctgtgttgatttaatggtcgtgtttctaaaggcatcaagcattcatactgttatatatcaatgtccagttcatttccattcaaaccgggttatcccat

SEQ ID NO: 25746 - DNA, 2256 bp, Zea Mays
aaaagccttgatgtgtccgtctccgtcatgaagacaaacattcaccgagccgaccgttgccttccccccaactcccagccccagcgtcaactgactacactcgctgactcgctcccccggttccccttctctgctcgccatcttttgctctccgcttggctcgtcaatcacctcctacgctccacacgccgccggcgactacaactgcttctgccgtggttacagagaagaagggtttggggagaagacaacctaaatcaattggatctgggagtatcagatctaaaaagctaatctagactagaggctggcgctggtccaagtgctttgatgataactctcaaggctcttccccatgggaagtgctattatgtaacctgtgttagattgctctgccaccaggcgtatacttttgctacatcaaatttcagaatctttctctgtaagatataatgcacatctgcagcagttgtgcttttcccgttagttaattcggttgaaatgttcagtctgtcttaaattagcatctgcttagcacattcaaaatcttttttcagtttatgtacatctaaatagtgcagggaagttgttacgtagtgtttctatattctgagtatctccctattatggtcgctagatcggtgagggattggagaggggtatcgatgggcaggaacgccggccggaggcctctgcccacggtcgagcaagaggagggtttctcccttctaattcttacctgctttatttctcatccattgattacataaataggccggttggcgctgcccctatctagctagagatccttatctcctaaaaactctcaacaaactactaactgataaccttcctagataatctcaactaatctcctaaataatctcaactaatcttctaatcttatctctaactatccttatctaatccccattgagggcccatggctgctgctaccgtagcccctccgtgggcctccttaggccctgacactacacccctcctggacaagcagctcgccctcgagctgccgcataacggatgctcaaagaccgagtctacttgacccaaaaccaaacacatagaagacaagccttttacatctcggcttatcttattatttcgaatctgatttttttaccccataagataaggcggacatgcacgtgtgcagccacctggatcccatggacgccatctgcacgaaaggggagcacatggatcatggatgggcacctgaaataggtcgcaacaataaccagcggaggcgccctcgtggcgaccggtagcggaatgtggtggcgctaaatagtgcgcccttgttgatgacgaggtgagtgccttccctaacgccgctgtcgtagagttgaagttcgtcgcccgcgggacatgtatcatgctcgcacttcgagatagcggcctggtgccactgctgatggccgtccgacagggtgaggtcgcgccaacgtgtgccgaggttaaccgtcaccaaggctgcctcgagcatctgccggcgcatctcccgcactttctgtcgtgcaaggaagccacgagtagcagcttgtatgcccatagccgccgacgtccggagccgtgcggacagcgccagctggtattgctcatgttgcactgctgccttgatttgcagcaacccttgctcaaccttctggagcgtggcttgcatctttgtgagatcagcccttatgttggtccacaaatctcccatcgatggagctggtgattgctgagtcgtggctgcccctagtggcgtcgcccatggggacggagacgccgtcaacgaagatgatgtgatgaaatttggcgttgtccctggggatgggcacgccggcgtccaggatgtggtgataaaattggcagacgatgctgcccatggagatagggacgccggttgccaggatggcgtgacgaaggtggcatgcggcgcagcccatggagatgaggacgtcggttgccaggacggcgtgacgaaggtgacatgcggcgttgtccatggagatggggacgccgattgccaggatgacgccgcgaaattggcagcaaaagccatgggatcagatcgaaacccaagctagccgataccagatcgaaacccaaggtgagggattggagagaggtatcgatgggcaggaacgccggccgagggcctctgcccacggtcgagcaagaggagggtttctcccttctaattcttgcctgctttatttctcatccattgattatataaataggccggtt

SEQ ID NO: 25747 - DNA, 137 bp, Zea Mays
gaagcaaccaacttttgttgcttctgttctaaggtggtatcaaaagaagaaaaccaagagtaaagctgcgcgaggaatggatcctccatagaacttttgtttaaaacttatcgagagggatttttgcctcccatggt

SEQ ID NO: 25748 - DNA, 476 bp, Zea Mays
cctaacaagtagagccggctcatatgcagccctacctcaagcctcagtccaatccgcggcccaaaaactccccccgacaaccgaacaggagcggcggcggcggcggcactaccctctccagcaatcggcatgggcacgcgggaggtgtacgaggagaagctccgcagcggtgcgcacctccaccgcgatcccaccatcaacccaggcctcggctcgccccggtgcccgcgatgcctctccctcctcaaccccaccgcgggaaagagggactgggccatcacctccgtcctgcacgacgccactgccgtggctggttccggtgccggcgctttgctcagtgctgtgcacgggtttaacacagggatcccttttgtccagaagcatgtcaaggggccgaagtggctgcagttgctcgttggggtgccaccactgctgatattctcaggtgccagtgctgtatttggtgtgagtcgaac

SEQ ID NO: 25749 - DNA, 3483 bp, Zea Mays
gatcctcactgccgatcgacggcgcgaatcgcagagttctctacttctcgattgtcccgccgccgtcccagctcgccgaacaccgacacgtcgcggcctctgtctctaggggccgccgatcctgcagagaggcaatagataagcacagtgcttctgaagaagttgtaatggataacattctgccaaacagtgatttttctgaaggtttacatttgtggcaatcaaatagttgtcatgcatttgtagccgttgaaggatcaggttaccattatggtgtaaggccacattcagggtcaacctatgctgttcttactcatcgcacacagagttggcaggggcttgagcaggacataacagaaaaggtcacccttggtaccgagtactttgttgctgcatatgttagagttcatggggaagttcatgagcccattggagttcaggtcactctcaaacttgaggaggacggttcttctaccaactatctttctattgcaaggattttagcctcacaagaacgctgggaaaaggtggaaggttcgtttaatctaacaactctaccgagacgtttggtgttctaccttgaaggcccccctcctggtgtggatttgctcatagattcggtcaccatctcctacaagaaaacagcttcatcagttggtggaacagagaacatcattttaaattatgatttttcgaaaggccttcatccttggaatcccatccgctgccatgcatatgtggcatcacaatggtctggtttccttgatggtattagagggaactcaggagagaactatgctgttgtttcaaagagaacagaacactggcagggtcttgaacaagatattacaaatcaagtgtctacaggcactgtttatgtcgtttctgctttcgttagagttgatgggattgttcaaggccaggttgaagtcaaagcaacccttaggttgcaaaatgcagatggatcaacacattataaccctgttggaagtgtggttgcctcaaaagaaaagtggaacaaattggaaggttccttttctttaacaaacatgccaaaaaatgttgtattttacctggaaggacctcctgctggtgtggatcttgtcattgattctgtcactgttgcttgctccagacataaacagtcaaaagaagtaaaagtaccaagtggagttgagactataattaaaaatcctcacttcgaagatgggttaaaaaattggtcaggaagaggatgcaatatctgcagacatgagttcagtgcatatgggaatgtccggcctttaaatggcagctatttcgcttcggcgactggacgggttcacaattggaatggcatccagcaagagatcacgggcagggtgcagcggaaagttctttatgagatcagttctgctgttcgaatatttgggagtgccaatgatactgaagtgcgtgctactctgtgggtacaagaatatggtcgtgagcgatatgtgggactggccaaaaaccagacttctgatcagcaatggacacatttgaaaggaaagttcctccttcatgctccctttaccaaagctgttattttcatagaagggcctcctgctggaattgacattcttgtagatggtcttgtcttatctccagcaagaaagctccaagctgcaccatgcccaaaaattgagaatgttctgtatggaactaatctattgcacaataatggcttcactcgtgggctttctgggtggagtcctatgggttcatgtcgattgagtatccagactgaagcaccccatatgttaccttctatcttgaaagaccgtgcaagccagaagcatataagtggtcattatatccttgccacgaaccgcacagatgtttggatgggtccttcgcaggtcataactgataagctaagattgcatgtcacttacagagtatctgcttgggtacgagttggttctggaggacatggacgtcaccatgtaaatgtctgtcttgctgtggataaaaaccaatgggtcaatggtgggcaagtggatgctgatggggatcaatggtatgaaataaaaggagcattcaaacttgaaaagcagccatccaaagttactgcatatgttcaaggccctcctgcaggtgttgatatcagagtcatggactttcaaatatatgccgtcgacagaaaagcacggtttgagtatctgaaggagaaaacagacaaggtaagaaagcgtgatgttgttctaaagttccaaggatcgaatgcagtgaatcttctaggttcatctttgaggatacaacagaccgagaatagctttccatttggatcttgcatcgcgagacacaacattgagaacgaggatcttgctgagttttttgtgaagaacttcaattgggctgtatttgagaatgaattgaaatggtaccatacagaagcagaacaagggagacttaattataaagattctgatgagttgcttgagttttgtgagaaacataagatacaggttcgtggccactgtttattctgggaagtggaagacgctgtccaaccttgggttcagtcattgcaaggtcaccacttaatggctgccatccaaaatcgtttgcaaagcctattgtcaaggtacaaaggtcgatttagacatcacgatgttaacaatgagatgctacatgggtctttctatgaagacagattgggaagggacattagagcttacatgttcagagaagcacataagcttgatccttctgctgtcctatttgttaatgattacaacgtcgaagatggatgtgacacaaaatctacccccgagaaattggttgagcaggtcgttgatctccaagataggggcgctccagttggtgggatcggtgtgcaaggtcatatcagccatccggtaggagaaatcatatgtgattccctggacaagctcgccatactgggtctcccgatctggattactgagttggatgtcacagcagagaacgagcacatacgagctgatgatctagaggtgttcctccgggaagcatttgcacatcctgctgtggggggaatcatcctctggggattctgggagatgtttatgtttcgagagcacgcccatctggtcgatgctgatgggacaatcaacgaggctggcaggaggtaccttgctctcaaacaagagtggctgacccgtatgaacggcagtgtcgatcaccaaggagagtttaagttcagaggataccatggttcgtacacagtggaagtgaacacgccttcaggcaaggtagctagatcgtttgttgttgacaaggatagcccggttcaggtgatcgctctgaatgtttaatgtgtgggaaatcatgcgcgtgtcctgtattttagcgatgtactgaggtgttgaacacagatagtttcatagctgatgccacgccttcagtgtacagaatattttcacgtttattctctgttctattttttgggtgattataacgcgatatttacattaccat

SEQ ID NO: 25750 - DNA, 7779 bp, Zea Mays
ctttctccgtcttcctttggtcggtggggtcgactccgcctcctcacccgcaaaacccctcgtgttcgcgagacgatcagacgaggcggtcagggagggggaggtagaatagggtttcggcagggccgtgccgggccgcctcctgctgaccttcctcctccagcgccgtgcaagcactcccgtccctgccaagccctagctagggtagctggtgcagcggattccaggacccacaaatctcttcttctcaacccattgccggtggagcgtggctgaggtagtggcctcgggttgttggggttcgggctcgccggcgattttgggggacgagttcgctgccggtgccgcgggcgggggcgtgattcgcacctcggaggaacaaacggttgaactgacccaggtgttgatctgctgctgctactactgatccatggctaatacccggtcaggaggaggaggagatgcccctccccccccttcttctcctccagctgctgcttctgcaactgccacaaggaagcttgccgatggaagggagaccaggaacaccgcagctgccagtgctcacacaccaaacctcaggaggtccactcgagaaaacaaaggaaagcacaaatctagacttgctgacacaccaccccttcacagatctgctaaaacgcccaccaaggatgccactgcaattgctacccccaaatccacacccttgccaaacaaccccaaagactcaacaaaaaagccctccagagttaggaacacaagtgtttcaccttctccttcaaaacaagaacctaatgaaacctcaacgcccgcctccaccaaaagaaaaacccaagatgatgctctgactgcctctacaccgtccaagaagcagaaaaggctcctgcatgcgaagagctacattgcactcttcaatataggagaagaatctgtgcttgctaccctcagggaggatgaggaaaaagcttctgaggtgcaaccggaaggagatggtgctgttttggtgcatgaagaaagtaatgcaccggaacaacccaaccaggaagcttcaaatgttgttgctagtgaggtcttgggaggtcactcttctgacttgcatgaaattgaggtgatattggagggagatggattgaagattggatcccatcagtctgatgttgttttagagcgttgcattcttactgagacgcgctcactaaataaggcagtggaaagcatccccatgttggaaactggagagcaagctactggtggttcaaaccagaaacctctactagaattgccaaatagcgcttgctctactgctcatcatgaagaggccagcaagtcggtggaagatggtaattctattgggattcaaggtgcatgcacttcaaggaatactgaagctatccaatgtgatgaaacatggtatgatgacaacatttgtgttgtttgcagaagtagggaaatctcagatatcctgaagtcttgtggtggaaaaggatgtaaacgacattaccatctttcgtgtatggatccttccttggacgtgtccctaggaatatggctttgcataatgtgtatgaaaaagaggattcagtttggtgtatattcagtcagcgagggaattgaatctttatgggatgtcaaggaaggagtggtgaacagcaagcaatatttcgttaagtataaaaatcttgctcatgtacataaccagtgggtttcagaaagtgatatagttgatagcaccccgcaaggttctgatcttatctccaaagttagcaagaagattcataaagaaaagacaataaggtggaagcaggaatgggctgaaccacaccgtctgttgaagagaagattgcttatgcctcaaaaagaagccgaagttttttttaattcactaggtgataaatttgtatactgtaatgtcgagtggctagtgaaatggaaggatctgggctatgaacatgctacatgggaactcgagtcctcatcctttttatgtactcctgaggccgaggagcttaaaaggagctatgaggaccgctttaaaactgcaagaaaagcatctgatccttcaaaagtagacaaggctaagggggggatatttcagcaactcgagagactgccagatggttgccctcctggtttagacgatgaccatttgagatcacttaaccagcttcgagcgagtaattaagaccattctttttgtggcatccatactgcctcacatctgtcaaccactcctcattgtgtctactactactactctctccttgtgggagactaaattcaatcgcttggcagcatccatcaatgttgttgtgtacaatggagagaaagatgtacgcaaatcaatacaagatctggagttttatcaggatggttctgtgatgttgcaagttctcttgtcccaccctgatgccatcttagaggacatcgaagtgattgaacgaattaactgggaagcagttatagtcgatgattgccaaaactctagagtttcaaaatggcttgaacaacttaggagacttcctaccaattttaggatggttctattgagttcctcactaaaggaaagtattgctgagcacatcagtctgctgtcttttctcaaccctgaagaaaatggtacattgagtgtttcaaatggtgtttcttttgatacagctggcactctagttgttctgaaagaaaaacttgcacgttatgttgcctttgagcggaagacagattcatcaaagcttttagagtattgggttcctgcccgcctttcaccagtgcaactagagatgtactgttacatattactatcaaactccccagcccttagatcacattctaaaacagatagtgttggtgctcttcgcaacattcttatatctcttcggaagtgttgtgatcacccttatcttgttgatcaatcgctgcaaagcacacttaccaaggatcaccctgtaactgatatccttgatattggagtgcgttcatgtggcaagttgctgcttcttgacagaatgctccaacagatcaggattcaaggtcttagagttcttattctttcgcagtctggtggtgaatctggcaagcctatgggtgacattttggatgactttgttcgtcagagatttggttatgagtcatatgaacgtgttgaacgtggattgctactgcaaaagaaacagacagcaatgaatatgttcaatgacaaaactaaggggcgatttatttttttaattgatagtcgtgcatgtggtccaagcatcaaactatcatctgttgatgccatcatcatatattgtagtgactggaatcccatgaatgacttgagagcccttcagagggtcagcatggagtcacagtctgaacctgtgcctatttttcgtttgtactcgtcttttacagtggaggaaaaagctcttattcttgcaaagcatgaccatattttggatagtaatattgtgaatataacccctagcctgagccattgtctgctcagttggggcgcatcatttctcttcaatagacttgaggagttgcagcaacatagctactcaaatgtctctggtgatgagcttttcatggataatgtagatttggagtttttgacaaaattactcagcaaggttgaactcagaactgaatcaggcaatacagccatatcacaagcttatctgtgtggatctttctattctagggctattgttgtagcgggtgagagggagggaattccatcagttgatggtgacctgccaaagttctgggcctactggttaagtttacttaatgggaggtctcctcagtggcagtatatatctgagccagtacaaagaagccgtagaaagataaataacatggaacaacaattgaaaaacacagacaaacagttgaaaataactactgaagaaactgatgaagccagagtaaagcgtagaagaattggtgaaatcatggattcatctgcaatagactcacctggcaaaaacaaggacaccatattgccaggaaacaataccccacctagttctcatcaaatatcagttgaagatacatggcaggaactagagcgaagcaatcttcatgccacacaaaaaggtctacacgttcaactcaagccagagatttcgaagttatataagttgctgcaactgccggagaaggtgaaatccttatgtgaggaatttcttgagtatattttgaagaatcaccaaatcagccaggagcctaagggcatactgcatgcattcaatttggctctgtgttggcgtgctgcttctctctcaaagcataagatcaatcacacagaatcactcgcacttgctgtaaaaaacttaaactatgagtgcaaagaagaacttgttgattttgtttatgggaagctaaagatccttaagaagaagtttgcacgtagagcaggggaagtgagcaagcaaaactatatggtttcagtgagcgacatatcaacttgtgaacaggtcacttctgttagattgagaaatgatgagttagtccctagccaggtaactttaactgatggtaactttgagaatggttcacatcacgaggctacaggtgacttttggaccgaggagatggtttcgggagagaaagaactgctacctgacccagtaactcatgaaggggaacacttattgagggatgaacttctcagcaaaataatggacaaaagaattaaattagttgacaaagttttctctctgagaggaaggagtatctatgataagcattcaaatcaggtttcatttttagacatgcataggcaaaaggtagtggataaactcagaagagcatgcagtttagttgtggagcatctacgtagtagtcaaaatcacattgctcaagaggacagagatgggaaaataaagctaataattgaatggtttactatgctgctgtatgcttttctggaacacatgaaatgccaacgtaacaggcttgatatgcagcaatcagcttccaggatcaaggagtctcaattgaaggaagaaacccttcaggcagcaagatgtggccaattagatcaaaattttgatcaacatattccttcaccagattttgaatttgctatggaagaatttaggcacttcagggaagtagttggtagctgctatgttgatccagctgctctggtaccagagtctttggatgacaattcagcaatggaaattatgttggttcaaagcgcaactgatgctgaagtcatcgaagaagtgctaaatcgacctactgaagttcttgttcaaggtccagcatcagaagttgttggtccatcagttgatgtgatttgcaattgttctgatggcatcaactcccaaagagatgcatctctggctgttcattcattggaaccttcaagtgacgaccttagaagtactgaccatgttgaggagaacacagttggctcacaaatacagggtggtacaagcaaacatttaggtgatgctgcaatggaagttgaaactggaaacaggaacactgctttggctgattcacctcactttgacaaaccagctttgactgctccatccaggcaggcaacattgctggtttctcgagaaaccgagatgctgagcaatcttgtggaccaatgtgcacaacagagtttagtgtcagcacaacctttgcaggatgagtcggaacaagcagatttgtctagtgcagcatcaactcaacccttgcaatctgagaggcaacaattaatctctgtttccaataatctgcttgaaagagcacagcttgatcagagtcaaccaaattatcagacagatgcggcacctggttgtgcgcagtctacagaactctttccagtgacgtcaatgatgtttaatcacgcacctattgattctgaaccactgaaaaatgagttgcacaaattacgattacacatggacacactcaataaagtccatgaaatgaagaaaacccaacttcagaccgcatgtagccaagaactagagaaggtaaagagaaaatatgatttgttaattaaagaacatgattccactcatcttcagcaaaagaaggcacttggtgatttttatgagaaagttcagcgcaaccaatcgctggctgaggattttcgggccaaattcatatcactgtctgcagcacaaggtgcagcaaaaggccatacccctccagttcgtcacacacctcaggctacccaagtggtgtcctccacatcatcaattgccctgtcatcagcttgtcgaccaccagtgccgaggcctagggttcaagctccacaggtggaccaaccattattgtcattgtcgcagttctcccgtccgtctttgcaagtggtccaacctcccaacctggaactaggcaatcttttcagagcaacgtcaacgactcttagtcatatgccacctcaacgtgggagctatggagttcagagtgaattggctcctcgctcacctgctcctcatcttcagttcagatcgccacgggcacattccatggcacctggaaatcagcagcaatcgccagcaattagtgtggatgcaatgtcctcaaggacacaaccagtgctggcggcaagcacatccccatcagatatacatgtgggacccctagcagcctcagccttgtcaagtttacactctgttctcccttcaacctcattaccctcaagcttgcatcctagtcacctggcacaacgtgtgccaccaactcctaacccaactttacaagccggggcaccgaaaggctcgaatgcaacaatgccttccatccctacaggcatgcagctgccagattctggttccctatcgctggatgcatggcttacagctaatcttgggttgaatgatgcgtctacagctcctgctaaggatacagccagtcttgggttgagcagtgatgcccctagggcagctcctgatacaaatacggccagtcttgggttgagcagtgatgtgcctaggggtacggctcctgctacaaatacagccagtcttgggttgagcagtgatgtgcctaggggaacgactcctgctacaactacaaccagtcttgggttgatcagtgattcacctagggtgattgctcctgccagcagtaattcgcctggggcgattgcttctgctacaaatggtggttccgagatagatgtggtatgcctgtcagatgatgaatgatgctagcacgtgtacaaggctgacagttatagatgactgcttgaaaggactaggcattattttacggctcccttgagtccgttctgacaaggtgggaatgttgtttgtgctgtgaatggctggtaacagcaatgacagttttattaagttcattgtaaatgtgtattatgacaaatgcctgccaacgtttgctgtaaatcgctaacctctggggaatgtggatattaacctctgagatggagttgggtttcaagcgctatgaggtttctgtacatgtttgtcattgattagttccctgaggtgttcgttgtaggccggagtgctagctccgtgtatcgttttggttctacgtatgtttcttttttttagtttgacttaaaaaaacagtagcaacaaaaaacagtagcaacatctccatgatagttattatgtataataaatgctgaaattttcttgtatatatttgattgaaacggcgggagtatgtaacagagcaatttagaccaaggcggtcacttcaacgttgtattgtatttctcttcttggtgaaatacggcagcactgtcctatgttaagttttatatctatatagctagctatctatgtatctgtatttatacctgttctatat

SEQ ID NO: 25751 - DNA, 1375 bp, Zea Mays
gcttccacttcgcccctccgcaccggccgcccgccacccgccgccccgcctccttatataaccgaacgaagtccaaagccatccaaagaccaaaaaccctcacgaaattctgagatccatccagaaacgtcgctccatggcgattatctccgacttcaaggaggacgaggccccgcagcagccggcggcggtcggccccggcgtcgaggagaccctggtggcagcgctagagaggaccggcggtgcactcccctttctccaggcggccatcgatgtcgctcaccgcaggtctggcctgttccgcgacccttcggcggtgagcaaggttaccgcgatggcggcggccgtcagggcgcaggtggagaccgaggagagggcagccagagaggtcaagaggaaggcggaggaggccgagaggaaggctgcggccgaggcgcagaaggctgacatggaggcggcgacggcgacggcggaggagaagctggagaaggaccgtatggatgcggataaggcggaggaaggcaacgttagacaaccaaatgctggcaatggtcttgatttggagaagtactcatggactcaacagttgcctgaggttaacatcactattcctgttcctcaaggaacaaaatcaagatttgtggtcgttgatataaagaagaaccatctgaaggttgttctgaagggccagccacctatcattgatggtgagctctataagccagttaaggttgatgattgcttctggagcatagaggatggaaaaactctttccatattgcttacaaagcacaaccaaatggagtggtggaagtctgttataaagggtggccctgaagttgatacccaaaaggtggaacctgagaacagcaaactctctgatttggatcctgagactagacaaactgtggagaagatgatgtttgaccagcgccagaagcagatgggccttccgacaagtgatgaaatgcaaaagcaagaaattctcaagaagttcatgtctgagcacccggagatggacttctctaaagcgaaaatgccttgaggatttgttcgggcagttatttctaccagtctgcttaggttgtctttgtgtgattgtgtctggtgttagtgtggaacagatgtctttgtgtgattgtgtctggtgttagtgtggaacagatcatctttttttagtagcgtcagaaatatcatttagaactgtgacgtctttcgaaactagagttcaagctcttggatatcattagtcacgtcgtcattaaaatctcagtaaagcctatttagaaacaaagtatttttatagctttcaggtaatatcagtaaagtatttttatacttttcaagtaatattatggtttctaagtaatactat

SEQ ID NO: 25752 - DNA, 2815 bp, Zea Mays
tcgcgatcgcgacgaccgacgagcacaagctagcttggttgtcggcttgtgtgtgttgcacagtcggccactacacacacgccgcccaccaacaccatggacgccgccgcgaaggaggcgctgatcctggacctgcacgcggtggaggccgtgaagctgggcaccttcgtgctcaagtccgggatcacctccccgatctacctggacctgcgcgtgctcgtctcccacccgcgcctgctcgcctccgtcgcgtccctcctcggcgcgctcccggccacgcgcccctacgaccttctctgcggcgtgccctacacagcgctgcccttcgcggccgcgctctccgtcgccgcctccgtgcccatgctgctcagccgctacgacaccaagcgcgtcgagggcgccttccgcgccgcccagaccgtgctcatcgtcgaggacctcgttaccagcggcgcctccgtgctcgagaccgtcgccccgctccgcgccgaggggctcgtggtcgccgacgccgtcgtcgtcatcgaccgcgagcaaggtgggcgcgagaacctcgccgctagcggggtcgcgctgcactcgctcatgaccctcacggagatgctcgccgtgctggcgaggcacgggaaggtcggcgaggagaagatcgcggaggtcaggcggttcctccaagccaacaggaaggtggcggtgcccggggtgcctgctgggccacccaagccgtcggctactgctcggaggaagtcgtttgcggagagggcggggttggccacgaaccccatggggaggaggttgttcgaggtgatggaggcgaagcagagcaacttgtgtgtcgcggctgatgttgggacagccaaggagctacttgagcttgctgacaaggttggtccagagatttgtatgctgaaaacacatgttgatatcttgtctgattttacaccagattttggggccaaccttcgcacaattgctgggaagcacaactttctgatctttgaagaccgcaagtttgctgacattgggaacacagtaactatgcaatctgaaggaggtatattccgcatcttagactgggcggatattattaatgcgcatatagttcctggacctgggattgtagatggcttgaagctcaagggtttgcctaaaggaaggggcctacttttgcttgctgaaatgagctcagctggcaaccttgcttatggagactacactgctgcggctgtaaagattgccgagcaacatcctgactttgtaataggatttatatcagtgaatcctgcatcttggtcaccagcaccgtcaagcccagcatttatccatgccactcctggggttcagatagctgctggaggagatgcccttgggcaacaatataacactcccttttctgtcatcaacgacagaggtagtgatataattatagtcggacgagggattataaaggccagtaaccctgtagagaccgcgagacagtatcgcatggaggggtggcaggcgtatcaatccggcttttcttgaggatgtttaagcaactcgccaaacgtagccggaggacattcgggcgagtgttgatgtgataagagtgcgccccatctatgatctatgtatgcaactgcgttctttcacttttacctgcccatcattgccacgcagtgattttcagtaatggttctgactgtacccccggatgctataatttgcaataagtgccggcctgcgtcgctctcccgcctccttatccgcacaggcagcccgcccttcatcctcagcgtcaccgtcatctcgtacggcggaggcgcctccatgcttgccgcccgcaccgtctccacggcgaacctcctgaccacggcggccacaacggccttcatctgcacatacgccatctccttaccgaggcacgccctcgggccggcgtggaacaccgggtacctcgccgcgtccaccgccacgaactcgcctccgccatcgagccaccgctcggggcggaactcgcggcagtcgtcgccccacagctgcggcatcctccccatcgcgtacgcgcagtagtccgcgaaccagccggcgcgcaccgtcgtgccatccggcagcacgtcccccgcggccgccaccctcgagttgatgggcaccggcggatacagccgcatcgcctcggtgagcgccgcgtgcaggtagtgcagccccctgagctcgtcgtagccgccttcgtcgtcgacgccatatctgtggagcgagagcgacgccacctcctcgtacacgcgccgctcgcagcgcgggttggcggcgaggagccagaagaaccatgtgagcgcggaggacgtggagtccttcccggcgagcacgaagctgacgacgatgtcccgcaggaaccgccgcttcgcctccggcgaccggaacatggcgccgagttcgctcccctcctcttcctccatcgccgccgcgaaccgcgacagaaggtgctgctcgtcgcagccgcctccgtcgccgacgccgcgcgaccgctcctccgactccatgatcgccgcgacgtgctcgtcgacgatgcggatggcctcgcggagccgcctctcgcttccgacgccagcgagctgcatcgccttccacacgacggcggtcgggtggagcatgcgcgcgaaggagatctcgacggcggcgtcgaacgcctcgaagaacgtgtcgtgccggcggggtcgtcccctgccccggccgccggcctcctcgagctcgagcagcgtcgagccctcgactccgaacgcgacgccgcagatgttgtcgaaggcgaagcgcttgagcacgtcctgcaggtcaacggcct

SEQ ID NO: 25753 - DNA, 1703 bp, Zea Mays
cactcccccacttcgacccgggggcgccctctctctgtctccggaacccttccagccttctcgctcctggaacccagacctcaacccttccgtccccgaccatcgacccccgaaggacctggcggtgtccagatttccagaagcatcccccatccagcccccggcgatcgtgcggaacctggcggctggggacgcgggagaagcggcgagggctagctggagatggacacggcggagaagatgcggtggcccttttcggacggcagcgtcaccgatctcctggacgcccgcagcctccacggctcccccgacattaagaaaaaagcacagtttcattcttctctagtgcaaaagcttgctttggaaaaggagatggagggtcatgttggttgcgtgaatgctatcgcgtggaactcaagtggttcgcttcttgtatcaggatcagatgacactagaattaacctctggaattataataatcgagagctggtgcatgatattgacactggccattctgcaaatatcttttgcaccaagtttgtccctgaaacatgtgatgaagtagtagtttctggagcaggagatgcagaggttcgtgttttcaatatgtctcgattaagtggcagaaggcctagagaaatttctatggaaccaacaatggtttaccagtgtcactcaaaaagggtcaagaaactagctgttgaacttggcaatcctaacgtagtgtggagtgcaagcgaggatggtactctgagacaacatgattttcgggagtgtagttcctgtcctcgtgcaggatccgctaatcaggaatgtcacaatgtgcttcttgatctacggtgcggagcaaagaagtctttagccgatttacccaaacatccattggcactgaagtcttgtgacattagctctgtttgtccccatcaaatcattgtcggtgggagtgatgcatttgctaggctgtatgataggagaatgcttccaccattgagctcgtgccaaaccaaaacgaagccgccaccgtgcgttaaaatgttctgcccattgcatcttgctaacagtaagaagacatatttgcaccttacacatgttgcattcagcccaaatgggaaggaggttcttttaagttacagtggtgaacatgtttatctgtttgatgttgacccagataatctgagttcagttagatacacagcagactatgtacgggaacaattatttgtacccccttttcacaaagtaccagcaaaagaacatgcaaaagaaaagaagacttcagtaaatacagctccaagaaatttgtctaggatatgtgcaagaaatttatgcaagttgcaacaagatctctggagataggcaagaacttaatgcacgggattgaagcatgcagtgaagttcttgaatcaacggaaccagatattgatgatgacatgaggcatgggtttttgtgtactcgagcagcattgtacctaaagaggaagtggaaaaatgatgtttacatggcgattcgggattgtaatagagcgcggaagattgatgccacatcatatcaagcgcacctacatatggctgaggcactattgcagttaggaagactgaaggaggcatctgagtatgcagaggcagcaaataggcttcttccccctcattgtcaattgagccagcaggtggatgatttcaagcaacgcgttgcttcaggtgag

SEQ ID NO: 25754 - DNA, 3567 bp, Zea Mays
cgagggaccagcgtgcaaagcgaaggcgaccaagcaggcaagcctccctgccgaccagcgactggcgtgctgcgtgccggacagacggaggaggaggaaagccgaaagcaccaactccccctctcgagtctcgtctcctccactccactgcactcggcgctccactccacttcctccctcggtcgcttacgcagcttccaacgattccattcccagctccctcctcatcctttccgttcctcccatcccccacccaacccgtttcaaatcgcaccaaaacccccctcgaagacctggagcgaggcctgccccttccgcgctcgcccctgccaggtgtagatcccccattcctgtcgctcgctcgccgccggccggattcctgatccgacgggaggtcttgtgcggaggcgggaggcgctgttgcgtgcctgcctgatcggttcctgcttcctgcgagttggtggtggtgcggcggcggcggcgggttctggcatggggttgcgctgccggggcatttcctcgaccaggcggtgggcggcggcctaagatgcgagggcggctggcccggggagtggggcaccaggtcggggatagcttctcgccgtgcgccagcctccgcctgctcatgctgccggccgcccggggccctcggcgacgggcattggggcgcgctctccccgcgaggtgctgacgctgacgcgcgcgcggcgctactagccgccagccgcccgccatgggcaacagcacgtcccgggtcgtcggctgcttcgcgccgcccgacaaggccggcggcatcgacctcgacttcctcgagccgctcgacgaagggctcggccactccttctgctacgtccgcccgggcgccgtcgccgactcgcccgcgatcacgccctccaactccgagcgctacacgctcgactccagcgtcatggactcggagacccgcagcgggtccttccgccaggagcccgccgacgacctggccgccgccgcagccgccggcctgcagcggccctgcaggagcttcggcgagaccaccttccggaccatctcgggggcctccgtcagcgcgaacgcgtcctccgccaggacgggcaccctcaccgtctcccttatacgtgacgtgcaggagcccgccgccgcgttcgagagcaccgcctccttcgccgccgtgcccttgcagccggtgccgcgggggtcgggcccgctcaacaccttcttgtcggggccgctggagagagggttcgcctccggcccgctggacaaaggctccggcttcatgtctgggccattggacaagggagccttcatgtcaggccccatcgatgctggcagcagaagcaacttctcagcacctctttcctatggacggaggaagcctcgtctgaggcttcttgtacataggattagtagacccatgaaaaccgcactgtccagaacattcagcaggagctcacaaaatccaggctgggttcaaaagtttctgtcgcatcctatgtctcaactgccctgggcaagggacgcaaagtccagatcagaaggttcacaggatggattggaatctgggatacccgagcctgagtataacgtgacaaggaaccttcagtgggcacatggaaaggcaggggaagatagggttcatgttgttctatccgaagagcaaggatggttgttcattggaatttatgatggatttagtggccctgatgtgcctgactttttaatgagcaatctatacaaggccattgatagagaactggaaggattgctctgggtttatgaagacagctctgaaaggagtgatcatgtatcgactcatgaagagggtggattggttgctgcttctgtggatgctcctcatgatgatagtggccagtgccagagtgacagtgggagacaagaacttggtaattttggaaaacaaaatgtatcacctggaaagggttgtgatgatagtgccttgcaatttcagccaaactgtaccagcagtgaagagaaagatttggctccacatggttcaagtagtgagatgttgggcagggatgagatagttgaggaaatggttgaagctgatctgggaaatgatctccaaagtagagaaccccacagctcgaacagagatctttcaggtacagatctaaacaccagctgcagatgtgcaacagaaaccagttcctattgtgatcagcatgccaaattcttgaaaggaaacagaaaaagcaagcgtctctttgagcttcttcagatggaactgctgcaagattataacacaaggttatctaaggagccaccagaggaaagtaaaataccaaacttgcatgttacacaggcagacactgcagaagcgcgctcaagaaacacagctgaggtctccaggtgttcattggcagcaactggagaatgttttgatgattctgaaggtcttggaagttcaagacacgctgatagtgtacttggcataggtattaaagagtgtacagggtgttctatatctacatcttcatcagggcacaagcaagttacgagaagaattttaatcggatcaaagttgaggaagatgtacaaaaagcaaaaaatgttgcagaagaagtttttcccatggaactatgattggcacagagatcaacctcatgttgatgaaagtgttataaaatcttcagaagtcactaggagatgtaagtcgggaccagtagaacatgatgctgtattgagggcaatgtcacgggcacttgaaataacagaggaagcgtacatgaaaattgtggaaaaggagcttgatagatacccagagcttgcattaatgggttcgtgtgtccttgtaatgttaatgaaggaccaggatgtatatgtcatgaatcttggcgacagccgagctatcttggcacaggacaatgatcactttgatcagtacgatagctcaagtttctcaaaaggagatttacaacatcgaaataggtcaagggagtcacttgtccgtgtggagcttgataggatatcggaagagtcgccgatgcataatcctaacagtcacctaaacagcaacgcaaaagctaaggaactgtcaatatgtagactaaaaatgagagcggttcaattgtcaactgaccatagcacgagtattgaggaggaagtcttgaggattaaagtagaacatcctgatgatccacaagctgtctttaatggtagagtgaagggacagctgaaggttacaagagcttttggtgctggttttctaaagaagccaaaatttaacgaggcactacttgagatgttccgcatcgactatgttggaacatcaccatatatcagctgcaatcctgctgtacttcaccaccgtctctgcgcaaatgataggtttcttgtgctgtcttcagatggattgtatcaatatttcagcaatgatgaggtagtttcgcatgtgctttggttcatggaaaatgtaccagagggagacccagcgcaataccttgtagctgaacttctttgtcgggcagccaagaagaatgctatcagatattatatctcaacctttgacggtgaagttttcctgcagcattgctcatagca

SEQ ID NO: 25755 - DNA, 2631 bp, Zea Mays
cctatatacaaaaagatcaccactactgtactacggcaccccttcctcccccgctcccccacctccgctcccgaaaccctcgccgccgccgccgccgccgccgacgccgaaatcctcgtcgcggcggcgatcactgctcccctctatgatagcggcgcgtgagggcggcggagcgcggcctgtcgctccccggtccgcgtgcccggggcggctctgagagcccagagctcgtctcggttccctgccaagcgcagccgagcaccgcgccggcgccgcgtggcagttcaggccgtagtctgggcgctgttctgctctgggtctactggagtgcgtttgggattttttcggttcctactacattcgggggcgctgaaaataaggcgtctctctttcatggggcagccagggatggattctgttccagggaaggagaacaacggcattgcccctaacctcaatggggtcgtgtctccagcgaagcagcagctggaggggaaggaagcgatgcggcgcagaacctaccaagacaggccattgagtgctttacagaagctgtcaaaatcgagccaggaaatgcgtctgctcttacacattgtgggatgatttacaaagatgagggtcacttggttgaagcagctgaggcatatcaaaaagctaggatggctgatccttcctacaaacctgcttcggaatttcttgctattgtgttgactgatcttggaactagcttgaagcttgcgggtaatacagaggaggggattcaaaaatattgtgaagctctggaagtagacaaccactatgcgccggcttactacaaccttggagttgtttattcggagatgatgcaatttgatatggctcttagttgttacgagaaagctgcactggagagaccattgtatgctgaggcctattgcaacatgggagttatctataagaatcggggagatctagatgcagcaattatctgctacgagaggtgcttgaccatttctcccaactttgagattgctaagaataatatggcaatagcactaactgacttgggaacaaaggtaaaaattgaaggtgacatcaatagaggtgtagcatattacaagaaagctctatactacaattggcactatgctgatgccatgtataatcttggcgttgcatatggtgaaatgttgaattttgagatggcaattgtcttttacgagcttgcgctgcacttcaatcctcgctgtgcggaagcatgcaacaatttaggagtcatatacaaagacagggataaccttgacaaagctgttgaatgttatcaaatggcactgtcaattaagccacttttcgctcagtcgctaaataaccttggagttgtctatactgttcaaggtaagatggattctgctgctagcatgattgagaaggctatacatgcaaatcccacatatgctgaagcatataataatctaggtgttctttacagagacgctggtagtattactttagcaattcatgcttacgagagatgccttcagatcgatcctgattcacgaaatgctggccagaaccgtttgcttgcaatgaactatattgacgagggctcagatgacaagctttatgaagctcacagggagtggggaaaacgctttatgaaattgtatccacaatatacaagttgggataactcaaaagttgctgaccgcccattgatcatcggttatttgtctcctgattactttactcattccgtgtcctacttcattgaagctccccttacacaccatgattccacagtttgcaaggtggttgtctactccggtgttgtgaaggcagatgccaagacacttagattcaaggataaggtgttgaaaaagggtgggttgtggagagatatatatggtattgatgaaaagagggttgctagcttggtaagggaggataaagtggacatacttgtggaacttactggtcacacagcaaataataagttagggacaatggcatgccgacctgctcctattcaggttacctggattggctaccccaacacaacaggtttgccaacaatagactaccgaatctcagactcattgactgatccacctatgacaaagcaaaagcatgttgaggagttggtgcgccttcctgaaagctttctttgttatactccttccccagaagctggtcctgtttgtccaacaccagcaatttcaaatggtttcgtcacttttgggagctttaacaatctagcaaagattacaccgaaagtgttgcaagtttgggccagaatattatgttcagtccctaactccaggcttgtggttaagtgcaagccattctgctgtgagaacataaggcagaaatttttggccacactggaggagttgggtttggagtcattacgggttgatctgttgccactcatccatctgaatcatgatcacatgcaggcgtattctttgatggacatcagcctggatacatttccctatgctggtactacgactacatgtgaatctttatacatgggggttccatgtgttacaatggctggtgctgttcatgctcataacgttggtgtcagcttgctcagcaaagtcgggttggggaggctggttgccaaaactgaggatgagtatggagcaa

SEQ ID NO: 25756 - DNA, 2184 bp, Zea Mays
gggcttgtggctagccgtgcagaatacagagcgaaagagagagatggctaatattgggaatcttgttatctgttctccttttcaagctgctctccctaggcttttgggtttgtgaggcgttggctcccttccccactgcttcctcccccactgccggtcgctgtgcaagagctgccacgagacagcagattccccatcatccaaagcgaggctgagggggaggagaggaagcaggaatagcctaacaggggtatagatctcaggaagctccatgcgggtgagcttgtgcccaagcctgtgtcccggtgcgcgaggctgagcttcttgcccgttgcccgtggcgcccccgagctcaccgatgcgccgccgccgccacggcttgagctccatggctgtccagcgcgctggtgcggattgacaggcaggttgtcctgcccgttcttttttctgcgaggtagctgcttgggcagacaagtaggagcagcggctcaaacttcggatctcggcatgggctcctttgggatggactggaaccagaaggcctccgtgttgtgggactgggagaacttgccgcccgtagccgtaggcgcgagcgggagcgagaaccccaggatggctgctgcgcctcaggctttgcattctgcctgtggcaccatctcttccagctcagagatggggtatggctcatccaagagctccgtatccgcgtcggctgatgattcttcacccaaggccaaggggaaaagcatggagctcaacttcgcacctgacaaagtgcctgacaagaacactgattcagggaaggttgacgacgccaggacctctccgtcgtcgccggtgattgccatcagcagtgcagagcccgtgcttagcctgaagcttggcaagagaacgtatttcgaagatgtctgtggagggcagagcgtcaagagtttgccgtcggatacgagtgcagtgactcctcctcctgcttctccgaagaagacgaaggtgactccaaacaagaaatcttactgtcaggttgaaggctgcaaggttgatctctcttctgctaaagagtaccatcggaagcacagagtctgtgaacctcattctaaggctcccaaggtggttgttgctggtctggagcggcgcttttgtcaacagtgtagccggttccatggattagctgagtttgaccagaagaagaaaagctgccgcaggcgcctcaatgatcacaatgcccgcagacggaaaccacaacctgaagcactttcttttgggtcatcaaggctgtcggcaatgttctatgacacaagacaacacacaagccttctgtttggtcaaggtccttatggtcaaatgagaagttgtgcaagttcttcatgggataaccctggaggtggcttcaaatttgcagagacaaaaggtccctggttaagagctggtggtgttgatgggttgcatcaaccaagtcagcaggtgtggaacaactttatgccacatggtgtccatcaagattttgatgggttcacagctttcaaaggaaccaatgcaaaggtccttcatcaaggcgttgaagcttctgcggtcgcctccaaccagaacggcgccccacaaccggaccttcatcgtgctctctctcttctgtcaaacagctgggctggtggtggtaccggtaccggtaccgaccagcacccgacggcccagctgcgccacgctgccctgagcagcagcctcgccgccagctccgtctccgtggcgcaggcctcgccagcagggctgtggcaggacggcggcgcggccctgggccaccacgactacgcccacgcgttccaggctatcaacacgccgggcggcggcggcgccgccgctcccattgcagtgggtcaggagctgcttcagctcccgcgtccgccgtccctgtacgacgacggctcctcgtcccgctacgacctgatgcgctgaaccttggggcttctggtggagcgcggggtttcgatttttgaacgaactctggatggaactcggagttttgaacgaactgctgtatgcttgctatcaaggtctgctggctcgggctcggacgctcgtgggatcgccagcagctccgtgtgcttgaataaatccacagtttttttttgtgtgacgctagctatttatttatttcacttgtgtaatgtgatgcgagtatgcgactccctc

SEQ ID NO: 25757 - DNA, 3958 bp, Zea Mays
acaggtgcaagatccatccttcagctggagaggatgagataaagcgtgctatatcaggcctaaaagaaaattggacaagtgtctttgttgtgcgcatgtcatatcagttagcccttaagtttttccagcttgctaaggatgagggaatgatgggccagggctatgtctggattacggcatatggtctgacagatatcttcaatgtagttggttatcctgcacttgaagtgatggaaggtgtagttgggatcgagccttatgttccagaaactgtgaaactaaacaaatttagacggagatggcgtgagaaatataggtcggaaaatcctggtacatcaattaatgagcctataacgtctggtctatatgcatatgatacagtatgggcaatagcattagcagcagagcaggccggatttgttaattcagactttgtgctgtccgaaacaaacaacgggtccactgatttcgacaaaataagtgcttataaggctgctgaaaaatttcgtggtgcattcttgaaggttaatttcacaggcattagtgggcaatttgtcattcaggatatgcagttccagttagtatcaacaacttacaaaattatcaatatagctggtcgggagaagagagcagtcggtgtttggactccaggattgaacatgtccaaaattctagaaaagaaagatggtatcagtactatcatatggccaggaggcagtgaaaacacacctagaggatggcttttgccagcaaataaagaactcaaagtaggagtacctgtgaaacctgggtttggcagttttataagatctgaagatggtatcccgaaggggttctgcattgatgtatttgaggaagttatcagtaatctgacttacaaagttcccaagcactatgtggagtttggaaatggagaaggagaaagtaatgggacttatgatgaactcgtgtacaaagtttatcttaaggaatttgatgcggtagtaggtgacataacaattttggccaaccgttctctatatgtggactacactcttccttatactgagtcaggggtacgcatgctggttccagttcgggaccagagacagaagactgcatggacattcctagaacctttaacagctgatctatggtttggaactggatccttcgttgtcttcacaggttttatagtttggtttatcgagcacagaacgaatcaggaattcagaggaccgccagccagtcaaattggatcagtcttctacttctccttctcaacacttgtatttgctcatagggagaggattgtgaacaatttatcaagaattgcagtagttgtttggctttttgtggttctaatattgcagcagagttataccgcaagcttaagctcaattctcacggtagaacagctccaaccaacagtcaccaatttagatgaagttatcagacgaggggattatgttggctacctcaatgattctttcatgcctaaccttttgaaaaggttgaaaattaacgaaacaaaaatgagggccttcagctctcctgaggagtacaatgacgccctatcaaccggaaaagttgccgtcattgttgatgaaataccatacctcaaagtgtttcttgcgaagtattgccacaactacactatggttgggccaacttacaaatttgatggatttggttacgcgttccctcgaggctctccacttacacctgaaatttcaaggggaatactggaactagcatcaaatggcagaatggatgaactggagaaaaagttgtatggtgatacatcgtgcccagacaaagatgactcccaaacttctagcagccttacgttgcatagctttcttgggttgtttatcatcactggggcatcttctttactggctttaattttgcatgtcattataaccctttatgatcatcggagcaattggatcaatggcagtggtcagatatcatggcgtgaattgcttgctattctcgtcaagatctttcatgagcgtgatagcgctaatactccagatgaagaggtgcctggaatggaagatatagatcctgctacagccgagagtccatggagcatgtctaatcacgtcatcgagaacgttgattcagacactgataccggaagcacaccagaaggagaaggaactccaggcagggaagttgcgaatcagggtcctggtccactatcatttgcatacatgcattctgagggggcaatggagtaacatagcattctttcatctcgcgcttccagcaccaagatagaactctttggtcatgtcgcgtactgtacagtgaaattgatttagatgtatcgcctgcctctagtttcatgtttaatacaagtgtgtgttaacatgtaccgctggctgttgtcatgactagttaactaggaaatttaacatagtaatatctttgttgaaagaggtgcctgtgcatcttatagaagtgtggctctgatatagacagtaactattttttcttatctcctgacacttcaccagattcctaaaaacaagccattgctaagaccttgtttgtttccctccagaattatataatccagcttatagaattatataaacacctaatgacctgcttacagattatcataatctaggtatctaaattatataatccacctaataatttgtgttgtttatttatttctttaacttatttaagcagaattatttaatctgtagggtaaacaaacaggaccttaagtaccattgtactatggcgtttttaagtgagcattatttgaacataaaattagactgtccagtttattagtcacctcttgagcaattgatcaaatactgtcaccgagtcaaagctttgttgtcttgttgatggtcactataagatgcatacaatatacaaacgcctaaccaaagaaaagataccattttcatacacaagtgtcaccaggctttactcagtgcaaaactgtataatactaaggtcatgtttgtttatcttctaaattatataatctagattaaataagctgagagacaaacaaacaacacagcttattaggtggatgatataatttaggcacctagattatattatgataatctataagcaactcattatgtgcttatatagttatatatgactccataagctagattatataatcctatagtgtcattgtaaggaaaatggaccccgggtcatttggcttaatagattttggtgtttgatgattaacacaacatgtgaactaatgtattttccaaatgtttgtgtgttgtagttcacaggatgcgaagtggattggattgaggctctgaggatgcaacacctcaaagaagacattataagactcatagaagacattacaaagtaatattgaagacactttatatatgctaagagtccaacacatcaagaagtagaagtgagatacaaagctacaaaacaaaagtgaagttgataaagttgagaggaagggatgactgaattagaagtgtttcacaacatcaaatctattcaaactgacatggcttcaactctgagatgtagacaattttataagctttccaaaaagtccaagatcatcaaaatcggagttcggagctaaaagttatgcccacaatacgaagtcggaattgctgaaaaactgcagtagcatatgtgatgtctggtgcacactggcctgtccggtgtgccaaatttgctcaaactgatatggctttacctctgggatgtagagaatttcataagatttccaaaaagtacaagatcatcgaaatcggagttcggagctaaaagttatggccaaaatacgacaagcggacatgggatgtccggtgcacaccggaccgtccggtgcaccatcttcggaagctccaacgactaattttaatggctagtacatgtggcatgtccggtgcaccaccggacagtccggtgcacctatccggtgcgccacagaaagctg

SEQ ID NO: 25758 - DNA, 2198 bp, Zea Mays
atggcggcccacgaggccacagcacgcctgcagcctgcaggctgcaacgtcgcggtctaccgcacgaatctcgaagcgtcccgcacccacatttgcccatcgccagctatatcaccacgaccacgggactcctgtcgcaggttccagtattccaccacgcggcgtcgcctgccgaaccccgaaccttctcgaggtcgaggcccctcccctttcgccaggagaaaacaatgagcaggcgcaacagccgtaccatctatgtaggcaatctccctggggacatccgtgagagggaggttgaggatctcttctacaagtatggccgtattttggatattgacttgaaaatacctccgagacctcctggatacgcattcgttgagtttgaggatccacgtgatgctgatgatgcaatttatggccgtgatgggtataactttgatggctacaggttgagggttgaattagctcatggtggcagaggccagtcttattcttatgatcgttcaagcagctatagcagtgcatgccgtggaggtgtttctaggcgctctgatttccgtgttatggtcactggtttaccctcatcggcatcgtggcaagatctgaaggaccacatgcggcgcgctggtgatgtctgtttctctgatgtataccgtgaggctggagaaactattggaattgtggattatacaaattatgacgatatgaaatacgcgattaggaagcttgatgactcacagttcaggaatgcattttcaagagcatatatcagggtgagggagtatgatgctagatcacgaagcagaagccgtagccactcgtactctagaagccccagctacagcaggagcaggagtccaaaatctgtttctcagtcaccctcatctgtggatgaaaggtttgcttttgtttttcctagatttggccatgcggcgatctgggggctgcattgatataatactggatgttttgagaatcggagtggatggtttgggacttcggatagtagagatggattgtgatgcatgtatgacaagtgggctacaatcagtcctaggagcaagataggctgacagtaagaaaatgtgaagtaaagcttgtggtgttattaaaacaaatgtctactattaagttcaatgaccccatatagatggacagtaatttataggtttgtgtttttgtttaactaatgctgccaccttagtaaaaatttctatggcgccttttgcattttggctctctttagccatttccttgtcaaggttcacactagccgaagttgacattacaacaaaattcagtatacacattgctttgtttgcttatttgtattccagttatgagctaattacctgataggctgaaaatctatattatttttctgagagtattaccataaacaccaaaatgtgtccttacattgcagcttcgctcctgtttcagttcattcatatgccgtggaatgttgcctctttattcacatctcgagttgccagtttaatttttatcacaattttatatcagatattagagtgctactaacacatcattaagtaatggaatttgtttcttgtaccttctgcagatcgctatcaagatctcgatccccaatttcttctccttctcatgcaagatatgcgacaagccctaggagcagaagcgcatcccgttctcggtctcctgtgagatccgattgaactttgagagcccttgaagcagtgagcagccccagggagaagaaaggaacttgagagtatgccgtgccatcacaatggtccgagtgattatgctgttgccactgctccctcacatttaagaggtttcctcttatttagacggagcatttaattaacattatcttgctaaagagagacttatgcgtagtctacttgtgtactcgttcgtttgtcctcatgttcttggcttcaggaactctggttttttatcattgtacccatagtaaaacctagatgtagttggggtatgccgtatgcgtctatattcggttggtcgaatgtaaatctggatgcatatatgcatctgtttggtttcatttaggcctttccttggtttcgtgattaatgacaacataagcttattgctgtgatcaaagtatattttgtagaggtaattaaagctagtcacacaataatggagattgcttagacaacgtatggtttttatgcctctaattatgg

SEQ ID NO: 25759 - DNA, 873 bp, Zea Mays
tgcagtactggtcattttttttgattgccagtacaggttggacctggttctgttttacggggcccacttgtaaacagaagtagcgatgatgtggccccaaagctgaattgtgaagctgatagctgccctgtggaaataattcatccaccagaagattgcaatctaaattcttcattgtcatttacccttcaggtctgtcgtgttgaagatattgatgtctggggtctcgtacaaggaactgtaattcatttcaatagggcaagaagtgtcactgtgcatacatctggaaccatcagcgcatcaggcttgggctgtcgaactggagtagggcaagggaaaatgttaagcagaggtatatgtggtggtggtggacatggtggaaaaggcggggatggtttttataagggaaaccttgctgagggtggagctatctatggcaatgctgatctaccttgtgaacttggcagtggcagtgggaatgactctaccgagttgtccacagctggtgggggtataatagcgatgggctcatgggagtattctttgccaagtcttgccctctatggctcagtagaatcaaatggtggtagctatactaatggctctgttggaggacctggtggtggttctgggggcacaattcttctatttgtgcatactttgtccttagctgaaagctctgtcctctcaagtgttggtggcttcggaaatgctggtagtggtggaggtggagggggaaggattcatttccattggtctaacattcctactggagatgatggaggagtcagcaaagggctgggatattctggtggcaatggaacggtcacaggaaaagcttgcccaaagggtctttatggaacattttgcaag

SEQ ID NO: 25760 - DNA, 1447 bp, Zea Mays
gatcccagtaccgctaaatttcctcagtgttgctagtctacagcaggcagattcaaagtgaatggtgttgcataggccttgtttggcacagctttagctccgaggtttacctcaaatcttgactttgtatgctaaatcatgaatcttgagactcacgtttgtctagaatagaaaggaaacagttcaacttcaaccaaacaattcaggtgtaacctacctccatctccacaaagtttctagggttagaaatacctagctccgggaaatcacatatttattgaaggtggagctccgcgcaactggcctatattaccattctcatgcaatttccatactataggtttcaggttattgtggccttttacttggaagtcctatcattttgtatgagatcattgcatttgttatcccagatggggcagtggaatcgttgtggtcaatagaccagtactttgaattcatacttgtgctgatgtttagcacagggttgtcctttcaggtccctgttatccagcttttgctgggacaacttggattggtttctagtgaccaaatgctttcgatctggagatatgttgttgttggtgctgttgttgctgctgctgtgcttacaccttcgacggacccgttgacacaaatgctcctggctggtcccttgcttggtttatacttgggtggtgcatggatggtcaagataactgggcgctaactgctttgtgcaaggtgatggtgctccggatagcaagagtcccagtgtaacctagtcttgtaaaaatgaattcactctgcttgcttgtaaaaatgaattcactctgcgtgctcattagatgatactagttagttatccgacactatggtttctatatatgatatatgttttctttatacaacaaaaaacaacataagctgcactggttagtgacaagtactcctagtagttgcacgttatatgcgtgcgcagggagtaagacgacacaagacgaaactcccgctttatattataattactgaagacagtctaaatttcatgagcagcagaaagttgagcagacggttaaatagtttcatctaatcgatgttgaacgttgaagtggtgctcaatcgcaaaaggcagaaggcttccatccactacaacatcgctcgctgtgtttgccgctggactttcttggttgccggcttggcacagctgcgtcggagggcaggtatgccatcatacatacatatggttatatatcatatatggttttcttgtacaacacaaaccaacataagttgtagtggttagcagtgagtactctcttcctagataccatagttcgaattctagcaattgcacctcatttcttatagttcgctgacgagtggggagcaggacgacatcgaagaaactcccactttaagggtgactaatatgaatgtatgagttgaaaaggagcttaatttaatt

SEQ ID NO: 25761 - DNA, 1914 bp, Zea Mays
gctccgaggttttctattatttccactggtggcacggcatcaagtttggaagcatctggtgttaatgttacaaaagttgaagaaattacacagtttcctgaaatgcttgatggaagagtaaaaacattgcaccccagtatacatggtggtattcttgcgcgaagagaccaggagcaccatctgaaagcactgaaagagcatggcattgggacatttgatgtggttgtagtgaatttgtatccattctatgataaggtcacctcaggtgcaatatcttttgaggatggcattgaaaatattgatattggtgggcctacattgatccgagctgctgccaagaatcataaggacgttcttgtcgttgttgatcataaagactatcctgctctactggaatatctagaagggaaacaagatgaccctgatttccgcaggacacttgcatggaaagcattccaacatgttgcttcctatgattctgctatctcggagtggttgtggaagcaatctaataaagcagattcatttcctcccagctttactgtgcccctcacaatgaagtctacacttcgctatggtgagaatcctcatcaaaaggctgccttttatggtgacaggagtctttctctagtaaatgctggcggtattgcaacagcaattcagcaccatggaaaggaaatgtcctacaacaactatctggacgcggacgctgcgtggaactgcgtctcggagtttgagagcccgacttgcgtcgtggttaagcacacaaatccgtgtggcgtagcgtctcggcacgacatcctggaagcgtacaggttggctgtgagggcagaccccgtgagcgcgttcggaggcatagtcgccttcaacacgacggtcgacgaggatctcgcgagggagatccgggagttcaggaggccgacggacggcgagacgaggatgttctacgagatcgtggtggcgcctgggtacacggcggagggcctggaggtgctgaaagggaagtcgaagacgctgaggatactggaggcgaagcggaggaggagcgggaagggcacgctgctgtcgctgcggcaggtcggcggcggctggctggcccaggagcccgacgacgtgaccccggaggacgtggccttcacgaacgtgtccgagagggctcccgacgcccgtgagctctcggacgccaagttcgcgtgcctctgcgtcaagcacgtgaagagcaacgccattgtgatcgccaagaacagttgcatgctgggcatgggcagtggccagccgaaccggctggagagcctgaggatcgctttcaggaaggcaggggaggaggccaagggagctgctttggccagcgacgccttcttcccgttcgcttggaacgacgcggtggaggaggcgtgccagcgcggcgtggcggtgatcgcagagcccggcggcagcatccgggaccaggacgccgtggagtgctgcaacaagtacggggtggccctcgtcttcaccggcgtccggcacttcaggcactgatcgacggcgacggtggcagcggagaccgtgacgacggacgatgggagggacctctatatagctgcgtcgatctggccggtggctggaaggaaggatctggcgtttcatcccagcgctgatgccggctggcgtttcttggctactagggagactctgatggtgctgatacaaccaaatgtcgcctctcgagaggatgggtcggtgggtcccggtttgtatatatgacgtcgtcagcctggcaagaggttgattgagcttaatactaactcttgcggtggatggaaatcggaaacggtcgctgaccggtgggatcgcacagtctgctgctagaagcatgcaaaggctacatgccgtgttattattgttattaatatttattgctgtcacgttaca

SEQ ID NO: 25762 - DNA, 171 bp, Zea Mays
ccacttggagctcccgattccgtggcacggctcaccgaagcagccgcgccgtcctacctatttaaagtttgagagtaggtcgagggcgttgcgcccccgatgcctctaatcattggctttacccgatagaactcgtgtgggctccagctatcctgagggaaacttcggagg

SEQ ID NO: 25763 - DNA, 1681 bp, Zea Mays
atacggacagatgcgaggcttgttgagtctccgtatgtgaagtgtggctttgctggtgagaacttccctacatctgtgttcccttgtgttgtcggacgaccgctacttcgctatgaggagtcacttcaggaacaagaattgacggatattgttgttggagcagcttgtgctgacttgagacatcaacttgatgtatcatatcctgttaccaatggcattgttcaaaattgggatgacatgggccatatctgggatcatgccttctacagtgagctcaaggttgatccatctgagtgtaaaatcctactgacagatccaccactcaatcccgtgaaaaaccgagaaaaaatgatcgagacaatgttcgagaaatataactttgctggggtcttcatccagatccaagcagttctttcactgtatgctcaaggcttgctaactggacttgtgatagattctggtgatggtgttactcatgtggtgcctgtagttgatggatactcttatccacatctgacaaagagaatgaatgtagctggaaggcatataacatcttatcttgttgacctactctcaaggagagggtatgctatgaataaatctgctgactttgagactgtcagagaaataaaagagaagctatgttatataagttatgattacaaacgagaataccagctaggacttgagaccacaatccttgtgaaaagttacactcttccagatggaagagttattaaagtaggcactgaacgatttcaagctcctgaagctcttttcactcctgaactgatagatgttgaaggtgatgggatggcggatatggcattccgttgcattcaggaaatggatattgacaacaggatgacgctctatcaacatattgtcttaagtggaggaagtaccatgtaccctggtctgccaagtcggttggagaaagaaattcttgaccgttatcttgatgtagttttgaagggaaacaaagatggcctaaagaaattacggctgaggatagaggatcctcctcggagaaagcacatggtgtatctgggaggtgcagtgcttgctgggatcatgaaggatgcacctgagttctggataaccaggcaggagtaccaggaagaaggtgtagcgtgcctaaggaagtgcgggcagtcataagtcttgccacatatcatccacagaagaaatggaggttgcatgtgtaaagaagagctctgttgttggtgttgtgtattgtagtgagctatagctgtcctgaacatgcttggggataaaccatgtttgtattggcctactcaatttgacctctgttattgatcatcctttttagatatggaacatgacggccacctttatttgtattttttttggttgccccgattgattccacgaacctgattgacggagtctattaggtggtcccaaatcagaaatttggcactgtgctgtagaatcacaagttttaaactgtgtgtgcaacaggagaagtggaggatctgatttggtaaatatatatttacttcatctgatctgatggtgaagcctttggtgcaggtttagattgctccgacaggtttctttatcatggtatgcaccgcataaaaaaagaagtcagaaaattcatttgtggtaatatggccctctttaagaatcttgagcaacagtaggtagtcatggg

SEQ ID NO: 25764 - DNA, 1260 bp, Zea Mays
aacagcccaccacgtgaccacagacagccagatggctgagagcctgagacgggcgacgcccgcacgcccgcacaagctgctccgggctccgctgctaggctagggtttggactttggattggagccgcaccgccgcaccgccaccgcagccgccgcagtgccgcacagccgccactcccgtcttggtcttgcggccagtcgccctcgggcctcgaccatcagcccctcgcccgctcgccgagacaccgagtcggcatcgaccgtcgtcgcgtctccgaggtccagcgcctagtggcccagctccaagcctccagccatcggcgcccgccctcctccgccgagacgccgagtgccgagcgcccgagcaccccggtccccagcgcccaacaagctagcaggctgcaggtatgcgctctttgttgatgcgtccaaggagttgagctgaatgcccagaaggctagcaggctgcagaaactgaaggaaaaggcggcattcaggaacccggatgagttctattttaaaatgatcaacagtaggactgttggtggaattcatagacctaagcctgaagataataagtatactgaagaggaacttcatctgttgaaaaataaagatatgggatatatcctttagagcgttcaaagtgaaaaagaaaatcgaaaagctaagctcaacacttcatgaacttgataacaagcctcaaaacaagcatgcttattttgctgaagacaggttactgaattggaatgggaaaaaatctataaagtgctaaagactaagtggatcgagcgcgcgcgagggttgtcgtaaaatgtccaccgttattaagagggctaatgaattcccagtcgattgtagctacatgcatggaggagtgcacacacatgcctatgttgtttgaattaatcaaattgcttgtttgttagtaattattaccgcctccaactaggctctgtacgtccacaagatcgtcagctatttcatgcaagcatccgcacaagtgtcctactgctatatgttattgtgttctgatacttgagacttttattatgactatgtatgagatattgtctcttattagtactggatgagatgtgtcttatttatgattatggatgagacttttgtgatgtaattgatgagactatgaatttaaatattgttatgtgattgtgtgtgagatgttttatgtgaaaatatgttgtgttatatatttgttatgttgtgaaatgtggtgtaaaataaaaataaacaata

SEQ ID NO: 25765 - DNA, 2032 bp, Zea Mays
cttcccaccgttctcttgacgactcctcgtctcctcgtcgtagtagttgcagccaccggtcttgagagctgccacctatttgccttgacgcggagaaaagtatacctggggggttggggcttgccgccgcaactatccccggcctcggctcgcctgcactgcacctctctccttggtttcttcccgttacccgtctcggcagatgcctctcttcctgcagcttcaacttcagggtgcctgtccacttagtcagtactgcagcggcgatatctgaaggtccgactaatgtgatgtcaatcacatgctgcttgcctgtcgtcgagtgcgtgtactgcctggcgtgtgcgcggtgggtgtggcagcgctgcctccactccggaggctacgacagtgagacctggggtgttgcatcggctgaagagtttgagcctgtgccgcgcttgtgtcggatcatcctctcggtctatgaggatgaccttgagaacccccaatgggcgcctccaggtggttatggcatggagccacgttgggtggtgcagcggagaatatatgaagacactcatggtcatgcaccaacataccttctgtatgttgatcaccagcattcagatgttgtgcttgctgttcgaggaatgaacatggcgaaggagagtgactatgctgtccttctggataacaagcttgggcaaaggaggtttgacggcggctacgtgcacaatggcttgcttaaggccgccgagtgggtttttgatgctgagtgtgatgttctgaaggaccttctggagaggaatcctggctatacactcacatttgctgggcattctcttggctctggtgtggtgtcaatgctagctttgctggcagtgcacaacagggagctgctcggtggcatagacaggaagaggatacgatgttttgcaatggcaccagcccgatgtatgtcactgaatttggctgtccgttatgcagatgtcatcaatgcagttattcttcaggatgattttttgcctcgcacagacattcctttggaagacatcttcaagtcactattctgggtacctgatgtagtcctctttgtacagcttaccatgccttctatgtggaagatgcctaatagacacatgtatacctgaaagtgtgatgttgagagatccaaggcgcctctatgcacctggtaggctttaccacattgttgaaagaaaacctttcagatgtggaagatacccccctattgtgagaacagcagttcctgtggatgggagatttgaacgcattgttctctcttgcaacgcaacatctgatcatgctattatatggatagaaagagaggcgcaaagggcattagatttattgctagagagtgagaaaaccatgcaagcacctgcggttgaaaggatgagcagtgagatcactgttacaagagatcacgacgaagagcagcaggaggctctgcggcgtgcgatcatgctaggggttgctgatgtaaacatgccatcaacatatggtacgttcaacgaaaatcctacttctgaaccagccgaggcctccccattactatcagacagcggaaggcgcagggcagtatgggaggagtggatcgcaaggatcttcgagaaggatgaatcagggcaaatggttccacggagatgatcgtggcgacagctcaaggcatgcttgcttgatgggtcggtttcttgatgctgcttccactctgtttcgagcctattttgaaacttcggaacggtaatgtaagatgagtaggggttagggattagatcatgtatttagggctagtttgacaaccctatttttctatgggatttttaatttcctaagggaaaacgaactaattttctataagaaaatgaaaaacccttggaaaattggggttaccaaaccagcccttagtgagtgagatggtgtatagcatgaataattttccctttggttgacaaaaaatgtgggtgcctattgtacttacacatcagtaatttcattgtataagaatataagatattgtagaatcttgggt

SEQ ID NO: 25766 - DNA, 2112 bp, Zea Mays
  misc_feature (2111)..(2112): n is a, c, g, or t
cgaatcgccttctcccagatctccagactccagatctctgctcctgcccccgcctgcctcttgccagcgacaaccccgccgcagcacgcggcggccgcggggagatgctccgcctacgggcgttccggccgacgagcgacaaagtcgtgaagatccagctccaccccactcacccctggctcgtcaccgcggacgccaacgaccgcgtctctgtctggaactgggagcaccgccaggtgatctatgagctgaaggcaggtggcgttgatgagcgtcgcttggttggagcgaagcttgagaaactcgctgagggagatgattcaaaaggaaagcccaccgaggctattcgagggggaaggtttccttttatgatgatgatgttcgcttttggcaacattggcgcaattgttctgctgctgctgaggccccaactgcagtcaatcagcaatcttccatgttcagtgcacctgcaccttcgacacgaggaagacactttgttgtcatttgttgtgagaacaaagtcatatttttggatttggtgactatgcggggccgcgatgttcctaagcaggagcttgacaataggtcacttctttgtatggagttcctatctagatcatcttctagcgatgctcctcttgttgcctttgggtcatctgatggcgtcatcagagttctttcgatgttgacatggaagcttgtgcggaggtatacaggtggacataaaggagcaatagcttgcttaatgacatacatgtctgcagctggtgaggtacatttagtttctggtggcaatgatggcctgctgatattatggagtgctgatcatatccatgactcacgcgagcttgtgcctaagattagcatgaaggcccatgatggaggtgtagttgcagttgaactttcaagggtgatggggagtgctccacagctcattacaataggggctgataaaactttagccatatgggatactgttactttcaaggaaataaggcgcattaagccagtgcctaaacttgcttgtcatagtgttgcatcgtggtgtcatccccgtgcaccaaaccttgatattctaacttgtgtcaaggactcccatatttgggccatagaacacccaacttattctgctttaacaagaccgctctgcgaactgtcatcacttgttcctccacaggttcttgcacagcataagaaactgagggtttactgcatggtggcacaccccttgcagccacatcttgttgctactggaactaatattggtgtcatattaagcgagtttgatccaagagcacttccagctattgctcctttaccaacaccaacaggcagcaaggaacattctgctgtttacatagttgaaagagaacttaagttactgaatttccaattgtcgaacacagcaaatccatcccttgggaatgctggtgttgcatctgatgcaggaagatcaaggaatgattcattggaacaactgatagtaaaccagagcaagaagcatatcagcactcctgctcctcacgattcctattcggtcctttctgtcagcagttctgggaagtatgttgcaattgtatggccagatattccctcttttgctgtgtgcaaagcaagtgattggtcagttgttgattcaggcacagggaagctttttgcctgggacacctgtcgagacagatatgctttagtagagagtgcattggccccaagaatgccacttgttgtgaaaggtggttcttctaaaaaggcaaaagaagcagcagcagctgcagctcaagcagcagctgctgcagctagtgctgcttctgccgccacagtgcaagtgcgtatcttattagatgatggaacagcacatgttctgcagagatcgattgatggtcgtagtgaaccggttattggactgcatggtggtgctttacttggtgtcacataccgcacatctcgtagaatcagtcctttgacagcaacagctatatcaactgttcaatcgatgcccttatcaggttttggtggaagtggatcatcttttgcatccgatgatccgttttcttctaaggaagggcctccacaaaatttccaattgtacagctgggagacctatcagcctnn

SEQ ID NO: 25767 - DNA, 6096 bp, Zea Mays
catgtcttattttactattaaatagaaagctgtggaatgcttacgtggaatagagcaatcaccggggtcctcagtgatggaagctattcaaccaagtcttaaggctgttaccagagaagaattgctgaagcatgaggatgacaatgtcaaagttctcttggcaacatgtttctgtgaaattacaagaataactgcacctgatgctccctacaacgatgacattttaagggatatattctatctgattgtgggtacatttggcggactcagtgatgttaatagtcaatcctttggcaggagagttgctattcttgaaacagttgctagataccgagcatgtgttgtgatgttagatcttgaatgtgatgatcttattacaaacatgtttcaaacatttttaggagttgtcagcgacagtcatgaagaaaacattgtaaagtcaatgcaggcaataatgatccttattatagatgagagtgaagatgtacaggagagtcttctacgtgtactgctgtcagcattggggcagaaaaaaactggtgctgcaatgtctgctcgtaaacttgctcgcagtgtcattgagcattccgctacaaagcttgaaccttacataaagaagtttctaacgtcatcatgggctgggaatggcagttcttctaatgatcaaattgatcaccagggagttgtatttgatttatatcagtgtgctccgaaggttcttaaggcgatcgtgccgtatattactggggagctactggcagatgaagtagataacaggtctaagtcagttgaattacttggggaaattttttccttacctggagcctctattgtggaatgtttcaagactcttttcacagaattcctcaagagactgactgatagagttgttgaaatccgtatttctgtggttgagtatttgaagagatgtctaatatcaaatccttccagagctgaagctcctgaaatcatcaaggcactttgtgacagattgttggattatgaagaaaatgtgcggaagggagtggtggctgcactttgtgatgtagctacccattctccttatgctattccaattgatacaattaaagtagtagcagagcgtgtccgcgataaatcgcaggctgtgaagtgctataccatggagaggttggcagatatttacaagctgtactgccagagggattctgatagctcaacaaattctgatgattttgagtggatacctggaaaaatattaagatgtctttatgacaaagagtttaggccagagtcaatcgactctattttgagtggttcattgttctcaccagagtaccaaatgaagggaagagtgaaacattggattacagctgcgacatacttcgataaagttgagatgaaagcccttgaacaaattctcctgcacaagcaaagactgcaacaagaaatgctgaaatacatatcgcttcgggaaccaagccaggaagatgcccctgatctgcaaaaaagaatctttggatgtttccggaacatctctcgcttatttagtgactccgcgaagtgcgaggagaacttgaacatgcttcatcagctaaaagatgccgatttctggaaaatattcactagcctgcttaattgttcaactacatttgagaaggcttggtctcttcgggcagagttgcttaagatacttggtgaaaaccatgtgctttataattttgttggcacattaacaatgagatgttcatatttacttgtaaacaaggagtatgcaaaagagatccttgcagaagcttctgcacagaagacttctgggaatacaaaactcatctcatcgtgcatgaatcttctaacggcaatatctagtttctttccatctcttttggctggacttgaagaagacattgttgaactcctgaaagaggataatgaagtgcttaaagagggtattgcacatgtgttatcaaaggctggtgtcaatattcgtgaacagttagcctcaacaagttcccttgatcttctattagagcgtttatgcttagagggtacgcggaggcaggctaaatactctgttcatgcacttgctgccattacaaaagatgatggtcttatgtcactatctgttctttacaagaggcttgtggatttgttggaagagaagaaagtgaatataccatctatcttgcaatctttgggttgtatagcccaaatagcgatgccgatttttgaaacacggaaagaagagatattaagtttcataattaaaaaaattcttgactgcaatgatgatatggttcaaaattcttctaataaatctgaatggggtgatagtacacataattgtttgctgaagatttatggcatcaaaactttggtgaagagctatataccttgcaaggatgctcatgcacagccaggaatagagaagttaattgatattctgaagaatattcttacctatggtgatatatctccaaatatggtctcaagtgctgctgataaggcccatttgaggcttgcagcagcaaaagctgttctccgcttatcaaaacaatgggaccataaagtgcctgttgatgtattttatttgactttgaggatttcacaggacgattttcctcaggtgaggaaattatttctttgtaaagtacttcaatatatcaaggaaagggccttggatgcaaaatatgcttgcgccttcatgtttggtgttaacgattatcatggcccacagttagaagagttcaagtacaatctgactgaagtggttcagatatgccaacaagttaagatgcgccaactttcagtccaagcagatatgaatttgttgacggcttacccagaatatataatttcctttttggttcatgcccttgctcatgatccttcatccccggacattgaagaacatgaaaatgtcaaagcatttggtccaacttactggcgactttacctgattctttcaatcctcctgggggaagaaggtttgcaacatagtgttccaggcatgaaaaaggatagcttcactacaataatatctatattcaaaagtatcaaatcttcacaggatgtggttgatggaaataagaacaagactctgtgggctatatgtgatcttggtactcttattgcaaagaggctatgccaagaccaaacgagtttatcagaagctcaaaccgttccattgcctccccaactttatgcaccgcttcaggataaccaaaatgaaaattctgtggagagttatgggcagatttggccgggatgtgagaaagtactggctcattttgaggctgtaatgactgcaaacatggataaggttgaatctcccaaacataagatgcttattgatatgactgatgaatttggaaatgaagttcctcttgggaaaattgtcaaacttcttaaattgcgaggagaaaagaaggcggagaaaaagcagaaggcaccatctagtagttcagtaaatgccgagaacgatgatgatgtcctgggtttagtaagagaaattaacttgagcaaccaagaagatttggaggaattgcaaaagggcaagcctaagaagcgccagacagatacaaaaaatagtaacaagaagccacttgatttttcttcacctaaacgcaaaagatcaatttctaagagtagaccacattcagcaaaaggtagtaaaaacagtgatgaccgtctaatacatactcctaacacagagaggaccagtatctccttggaaactaaattgaaggagaaaaacagagatgattcaatcgatacggaactgttagtatctcccagcattagaacccctgtatctaaaggaaataagggtgctaagagatctcatattgatattttgagcagtgttccaaagaagtctgctgatgcagagagtactaagagaactgttgagccgagaagtctaaatgggtcactcaaaagtcaaaagtcaaaaccgatttctgggttagtacagtgctcaacacaggactcaagcggtaccgacttggtaggacaccgaataaaagtttggtggcctttggataagcgattttatgaaggtactgttcaatcatacgattcatccaagaaaaaacatacggtgctatatgatgacggagatgttgaagtgcttatattggctaaagagaagtggatattgattgaaagtaatgattcatcagtgaagaagcaaaagaaggatcttgggacaaaccaaggaaggtaagctggtattttgtttgctttagaatctactatagcaaactgctgtgacactgttggaagctaagaaacaggcccatgcagtattggattaacataaataactaaacataaatttagtattgaagtccttgtattctatagtaacatgtgtcatttataaactattgacccctagttaccttgcagagcatgggagggaactagcagcaacaagtctccgcctagccaaccaaagtcaaaaaagaggtccttgcctccaaagaagaaagggcaacccaatgataagcgaagaaagactgcagaaagaaacaattctgtagaagaggagggtattggagctggtgacaatgattcagattcatccagtcctcttgcgcactcagatgttgacaaagatgtaaactctgttggccacatggaggaagtaatagttagcttagctgagaaagagaagaccaggaaggactccaaaggcatggaaatgaaagagaagggagggaaggactccaaagacgtgaaaataaaagagaaggctgggaaggagtccaaagacgtggaaatgaaagagaagatagggaaggagtccaaagatgtaaaaatcaaagaaaaggcagggaaagaatccaaagatgcggaagtgaaagagaagacagggaaggactccaaagacgtggaaacgaaagacaaggcagagaaagactccaaggacgtggaaatggaagaggaggcagggaagcactccaaagacgtgaatatgaaagagaaggcagggaaggagtccaaagatgtggaaatgaaagagaagacagggaaggaatccaaatatgcaaaaatgaaagagaaggcagggaaagaatccaaagatctggaagtgaaagagaaggcagggaaggactccaaagacgtggaattgaaacatgaggcagggaaggactccaaagacgtgaaaatgaaagagaaggcagggaaggagtccaaagactcggaaatgaaagagaagatagggaaggagtccaaagatgtaaaaatgaaagataagtcagtgaaagaatccaaagatgtggaaatgaaagagaagcccgggaaggactcaaaagatgtaaaaacgaaagagaaggcagggaaagagtccaaagacctggaagtgaaaggggaggcagggaaagaatccaaacatggcgaagcgaagaagccagggaaggactcaaaagatgtaaaaacgaaagagaatgcggcaggcaaagagtcgaaagacgcggaagtgaaagaaaaggcagtcaaggacccaaaagatgtggaaatggaagggatggcaggaaaggagcccaaagatgtggaaaagctggatggccatactttgagcaacgaggaatcagacaacgatactcttagcgtgtggaaaaaacgtacagcaaaagcaacatagtcttgctttctcagctgaccattcatagtaggatttgcagatttcacaggcaggcaaacgttcggagatgtggatatctcattgattgaccctttgcaatttgacagttgtactgtagaaaatgtttgtttggatagcaacacgttagtatacaacagtggaataggatttgtttgtaatgttattagatgcgggcacctgttgcccattaagctatggcatggtatccctggtttcttgtatatcttggagagcgtcagctcttttgcaggacatagtgctatgccgtcgaactcttgtagaaatgttgtaggcaataaaccagtgacacttgtcgaactacctgtgggcatccatttttcgtttgccatattactttggatctagaatctgacgctggaggtttagtatttgtactcggtatggtttctgtttagagttttggcataattaccgcacaagtt

SEQ ID NO: 25768 - DNA, 3765 bp, Zea Mays
caagatcgcaagtccagatcgaaatttctctcttcaccaaacacacgctctctctccccttcccatctccttcctcccgccccagatccgagcccggcgcccgagttcatggcgagcgacagcgacgtcgacgaggacgagctcctgcagattgcgctgcaggagcaggcggcgcgggacctcagccaccagcgcccgcccgccgccaacaagcccgttgtcaacctcgtccgcccacccgcccccaatgctcgcggcggcaacgccagggccgggggcgccgcagcgaaggcgcgccagcccagccgcggcggcgacgaggacgacgactcggaggtcgagctgctctccatctcctccggcgacgaggacgacaatccccgcgcccgcggcccgccgccgccccgcgggggcgggggtggacgcgccggagcgcggagggccgcgtcacgggacgatggggacttcgacgatgaggagcccagaagctggaagcgcgtcgacgaggcagagcttgctcgcagggttcgagaaatgcgtgaagcaaaggtggctcctaacattcaagaacttgatcagaaagcagcagctgctgctgcagctgctgctcgaaaggccctcacgagtgtacagactttaccaaaaggagttgaggttttagatcctttgggccttggtgtcattgataataaatccctgcggttgatcactgacgcttcagtaagttctccaatttcaagggagaagtctcaaggtttggaccccaatatgcgagacacgagcgctgctgacttagaggctggtgctctcaccttgaaaactgatctcaaagggagaacacagcagaaaaaacagttagtcaaggagaacttcgattgttttgtctcgtgcaaaactacaatagatgacattgagtcgaaattgagacagatagaggaagatcctgaaggtgcaggtactgctcacttgtattcagtgacacaaaaaattagcggtgtggcaaatcgtgcatttgagcctctatttgagaggcaggcccaagctgaaaagatcagatctgttcagggaatgcttcaaagattccgaacactatttaacctaccaagtgcaatccgtgggaacattagaaaaggagaatatgatcttgctgtcagagagtaccaaaaagcaaagtcaattgttcttccttctcatgtggggatactaaaacgtgtactcgaagaggtcgaaaaggtgatgcaagaattcaggggcatgctttataagtccatggaggatcctcatcttgatcttgctgagattgagaacattgttcgtctattgttggagttggaacctgaaacagatccagtgtggcattatttaaatattcagaatagcaggattcatggattgtttgaaaagtgtactcaagatcatgactcgagaatggaagttttgcaaaataaaattcgcgaaaaagtgctctctgattcgaagtggaggcagctgcaacaagattcaaataaatctctggaagttgattctaccattggtgattctcctcgagttgatcagttgtcaacaaactttatggctgaggaagctgatagtttaagggccacctacattcgtaggctaacttctgtactgatccagcatgttccagctttctggagattagctttatctgttttcagtggaaaatttgccaaggcagcttctggtaacgtagtttctgattttgatgtgaatgcaaagccgactgcaaataagaatgatgaaaaaggtggagaagtaaagtacacaaaccacactcttgatgaagttggtagtatggttcaggctactatatcggcttttgacactaaggttcagagtaccttccgtgattttgaggaatgcaacattctttgtccatacatgagtgacactataaaagaaatagctaaggcctgtcagactcttgaagggaaggattcgtctccaactgctgtaaaaatgttgcgcacacttcattttgaaatgacaaagctttacattctacggctttgttcatggatgcgggcaacaacaaaggagatatcaaaagatgagacttgggttactttatccacccttgagagaaacaagtcccagtatgcgatttcatgcttgcccctggagttccgtgacataacagtttcagctatggaccgaattgatactatgattcttaatctgatgagcgagactgcgaagtcatatgacatttctcaaccacttcaggaaatcaatgagtctgttagacttgcatttttgaattcctttctggactttgctggttatctggagaggtttggaggtgaactaaccgagaacagaccaaacaaagaaaacaattatgtctcaaatggatacataaatggtactagagaaacatttgttaacacagatggagatttgcacaaaaagctgctggttgttttgagtaacattgggtattgtaaagctgaactttcagaagaactttacagcaaatatagacacatttggtctccagtcaggaataatgaggagcgaagttctgacatgcgagacctgaggacttctttctctgcacttgaagagaaagtcctggaccaatatacttttgcaaagtcaaacttgatcagaagtgctgcacaaagttatcttttggattctgggatttattggggagcagcgccaatggtaaagggcattcgagatgcaactcttgacttactgcacatccttgtagcagtacatgcagaggtatactctggcgctcggcctctgttggagaagacaatgaaaattttggttgagggtttggtcgacatctttcttagtgtttttcatgagaataagaccaaagatattagattgttggatgcgaatggtttttgtcaactgatgcttgagcttgagtattttgagactgtactgcacacgtacttctcacctgaggcgcaacaggctatgaaatctttacaagagaatttgttggaaaaggcctgtgaaagtgttgcagaagccatggaaaatcctggacaccaacgtcgaccaacccgtggcagtgaagatacagcatcggatgacagacagccatcagtatcacctgatgatttgcttgtgcttgctcagcagtgcagtagtgatctgctgcaaggggagttggagaggactcgattgaacatagcctgtttcatggagtcgacccttcaaccaacagctgcgccagcaggcccaaagcctgccgcacattcttcttaccaagcacagcatgctcccgtccaaacgtcctcgcctagttttagaaggcagcagactggtacaagttcccctgtagtctccaggcggcgccggtgagcttagtgcatctttccatcattggcgtagcctcttcccggagtttccttccttttcccccctcacatgtgtgctttttttaatcacttgtaattgtcatcctgttgtcatgtgttacgaatttcgatccattcttttggtgttgtataagatgaaaaggaggagtacagtactggtgctgctgcacgggatcatggaattgtataatatcgacgagtcaaatattattgctgcttgaagataccaccacagctttatgtatatggaattctggagttgtcggtctgcgccaacttccttcctgcggtcgtcaccgcatgtttgtacattcgtcgcttggacagttttatgtatcccgagatttgttaatattgtatcagttggttcgtgattgttgatatgtctgcatgcttt

SEQ ID NO: 25769 - DNA, 2124 bp, Zea Mays
atgggccagtgctgctccaagggcgccggagaggccggcgccaccgaggcggcgccaaaggcgcaggcgccaagccgcggcgcgtccgcgaacaacgccgacggacaacgggcgtcgtcctcgtccgcggtggctgctgccgctgctgctgccggtggtggtggcggcggcacgacgaagccggcctcacccaccggcggcgccagggccagctccggcagcaaaccggcggcggccgtgggcacggtgctgggccggcccatggaggacgtgcgcgcgacctactcgatgggcaaggagctcgggcgcgggcagttcggcgtgacgcacctgtgcacgcaccggacgagcggcgagaagctggcgtgcaagacgatcgcgaagcggaagctggcggccagggaggacgtggacgacgtgcggcgggaggtgcagatcatgcaccacctctccggccagcccaacgtggtgggcctccgcggcgcgtacgaggacaagcagagcgtgcacctcgtcatggagctgtgcgcgggcggggagctcttcgaccgcatcatcgcccggggccagtacacggagcgcggcgccgcggagctgctgcgcgccatcgtgcagatcgtgcacacctgccactccatgggggtgatgcaccgggacatcaagcccgagaacttcctgctgctcagcaaggacgaggacgcgccgctcaaggccaccgacttcggcctctccgtcttcttcaaggagggcgagctgctcagggacatcgtcggcagcgcctactacatcgcgcccgaggtgctcaagaggaagtacggcccggaggccgacatctggagcgtcggcgtcatgctctacatcttcctcgccggcgtgcctcccttctgggcagagaacgagaacggcatcttcaccgccatcctgcgagggcagcttgacctctccagcgagccatggccacacatctcgccgggagccaaggatctcgtcaagaagatgctcaacatcaaccccaaggagcggctcacggcgttccaggtcctcaatcacccatggatcaaagaagacggagacgcgcctgacacgccgcttgacaacgttgttctcgacaggctcaagcagttcagggccatgaaccagttcaagaaagcagcattgaggatcatagctgggtgcctatccgaagaggagatcacagggctgaaggagatgttcaagaacattgacaaggataacagcgggaccattacactcgacgagctcaaacacgggttggcaaagcacgggcccaagctgtcagacagcgaaatggagaaactaatggaagcagctgacgctgacggcaacgggttaattgactacgacgaattcgtcaccgcaacagtgcatatgaacaaactggatagagaagagcacctttacacagcattccagtatttcgacaaggacaacagcgggtacattactaaagaagagcttgagcacgccttgaaggagcaagggttgtatgacgccgataaaatcaaagacatcatctccgatgccgactctgacaatgtaaggaacaagcattatttaaatttcagccgacaaactaaactatagaaaccacatcatcatatcaaattttgaggtggcggtgctacagaaatagaacccagtacaccaaaatgactaacttgtcatgattagttgttcctcgtaactgaacatttgtgttcttagtttcttattgttaaaccaaagacttaaattcacttttgcacatgcaggatggaaggatagattattcagagtttgtggcgatgatgaggaaagggacggctggtgccgagccaatgaacatcaagaagaggcgagacatagtcctatagtgaagtgaagcagcaagtgtgtaatgtaatgtgtatagcagctcaaacaagcaaatttgtacatctgtacacaaatgcaatggagttacttttgcaacttagttcatggatggttgtgtacgttgtgctattgattgcaagtgatttgaaagacatgcatacttaggaactgagaaagatagatctactactgctagagacacaacaataggatggcaattcagcaagtgcgtatttcagaagactacag

SEQ ID NO: 25770 - DNA, 134 bp, Zea Mays
caaaaattagctgggcatggtggcatgcgcctgtagtctcagctactcaggaggctgaggcatgataattgcttgaacccaggagttggaggttgcagtgagccgagatcacaccactgcactccagcctggga

SEQ ID NO: 25771 - DNA, 3928 bp, Zea Mays
cacaggaccttgttctgcctccccgcgcatcggctgctgccgcgcacaaatccgccgcgccctcggtcccgcaaatccgccgtgccagctccgcccgctcgattcccctcctagcgcccgcattccccgccgccgtcctcgcggccgcagcgcccctggaccccacgccagcaacgcccgcagtccccgccgtggatctcgcccgaaggcgccgccatggacgccctagatctaccacctcctcctctccccatcactgcgccgcctgcccccgccgcacacctacagcgcgccccttcccccaccgtggatctcgcccatacgccagcggatctcgcactccttccttcgacggcgcggtggcgaggaggtcagcgacggcggcgtcgagtcgaggtcgggcacgaaggcgcggaggccgtgggagcggtcgtggcctacgcacgcacgacgccgctcccccagttcaaaccgaggtcagcgacgacgcacgcacgcaccaccccttcccccttcgtcttccattcccagctggaggtgcacgctgccgggcagagcgtcttgctggaggtgcgatagccatgtctggacctccgtcgccgccatagaagtgccttgtcattgatgaagccgatcgcatacttgagcaaaactttgaggcagactgttcttttttctgctacacagactctagatgttgaaaaaattgctaaactgtcatttgagaaaaatgaagtaaaaaaagcctgattatgttggagttgatgatgataagtcaaaggctactgttgaaggcctgcagcagggttattgtgtcatttctagcgataaaaggttcttggttctgtatgctttcctaagaaagagaagataatggtgttcttctcatcatgtaattcagtaaagttccacgttgaacttctgaatttctttaggatagagtgttttgatatccatggaaaacagaagcaactgaagcgaactactacattctttagcttttgcaaggcaggaaagggcatcttattgtgtactaatgtggctgcccgtggacttgatactcctgacgtgaaggaaggcagtgttcatgtctcatccagttcaaatgaagtgacaggaaccattccagagacgaatggaggcgatcatcatatacctggaagctcttttcatgtttagtgaaggtctatgacatgtctgatagtcaaatgaagctaaatgattttatttcaagccttgttcttgagaggatggtcaagattaatttgagtagggtgacttcataatggacgacgaggaagaagtggaaggagaggaagaggaacaaaagagtgatgaccagaagcgaagaaacaaaactaaaaagaaaaggaagagtgctatagaggagcaacggtaccaggacgcgtcaaggttgacaaagctatctgggaccacttttgtaattgccaactcttcactgattattttcctatatgttgctccagaataaatggatcatagtgcggtggtcatgggattgggatctgctccgtatttgcagggtgaagccttcgtgtctcctcgagggaaagtcactgacctttcttgggacgtggaccactgacggcccccgtcatcccccatgacggtgatcctagggtgaagccttcgtgtttcctcgagggaaatctaccagtgcgggattgatttagtcagcaccattggacacagggtttagttccattgcctggacccatcaatgaatcatggtgccaaggtcttgatggttcgacttcaaggtactgatattctccaggactattgttagcatcccttgtggtccatctgcattagcagtgaagaaagtcgcatggggacttgcttgatatgttgttattgctcagacatggctgagaaggaggaaacaaagggccgctgccctgcctgccacacacgttatgacaaggatatgatcgtcaagatggccgccacttgtgacaggacagtggcagataaaaatgcggagaagaagcaaaaggcccaaagggttaagccaaaggcagcaccaacagcaacaacaacatcaaccgtagaatctaagaagcatcttgctactatcagggttatccagagaaatctggtgtacataattgggctacctgcgcatttatgcaatgagagcgtacttgagcgtagggagtactttggtcattatgggaaagttttgaaggttttagtttcccgtccgactgggcctccctctcagcaggcatcagcaaacagcagtattagtgtgtatgtctctctgaattatacggtgtacatgcatgatctgttcatacttcatatgaatttagatttatactttcagtactggtcaattagcctgatggaatatcaaataactatctactgattctatgcaattgcatgtttcaagtttctaatgctgccttgtaatactggaacattggtattataagaaagtaaattcaaacttcaatattgttatgtggttttctattgaacctggtgaaaatgtgataattatgtccatatccttgcaagcagttcagtcatttaagtttaatctaggctacttagcagtgtgattttcctgtagcctcttgatttgcatagccgcacagcccgtgcttgaaagtaacatttttatcctcattgctgacattaggatatgtattgtattattggtgtgaaattcaaagaatcagatagatgcaagatatctgtttgtgggataggatcagaacccaatcctgtgtgtgcagatatagataaaaatcatcttttaatgaaatgtctatttttttctcggtttgagtactttatattgttctcctgggatgtgttttttttctttatgggtgatttctcttggaaatcctaggatagtgtttcgatgtattctgaaactttgttgtgccagaaacatgcattgttttatcattaaccagaattgagttagggattatcattaaggcattaaccaaaatggagttaggatgtctttttttgtagtgtagaaaacgttgtgtatactgaaatgtgcatgcttgcaacatgtctaatatagattatatttgagtggtatctttgttgaagaacatgtgaaattagagttctggtggtcttctagaacacacactgctcctcatctttactttctctacataattcttcaatatgttggtatgttcccgtgactccttggtttagctatccttatacatgcatgttgttacataaatcaattagtttttccctgaaggacaggcctggtgcagtggtgagaggcctttccactgagccaaagggcctgggtttgacgcagcctctgcgcaaaaatgtagggttaaggcttgccttggttattacttccccagacccgactcatgcgggagccgtcagcattgggtctgttcttttactgatttgttgcgggtctagacaaatatgagctcataatgtattatctttcaggagatatacgtggagcgtcagaattatatgtgcatctacaagaacagttacaacaattctccatcaggttgatgttcatacatctcagatataaatgtgggggagacggtgcctcatcaatgatgagtaggttgattctcatctagcggcaccattgctcactacaactggtttgcttgagcaacttaatgtcactctcaagaggaccctcctttcgaccgacaccctgaagcaccacacaagctttagaaaagtcggaattgtacttcgtatacataaattacatgatattatatgttcatgtaattctatgttgattctttagaaataatatatatgatattgtaatgtgtgttcgacatcaatttattttatttgagttcgccgtgcgtacgtttggggttgtttctccctcgcttcttcctggcggcgaaagatagagaag

SEQ ID NO: 25772 - DNA, 235 bp, Zea Mays
ggcgggtcggtgggatttgactgggtcctcggcctcgcattcgggatataaaaagaacggccgccgcataccttggatgcgacaatcagtgaccctccacatcgacaaatagagtcgccgtcgtagcaggggtagagcatgcggccgccgtggtggatccacgtcggcatcgtcgggccgcaagacttcggctgtggtctcctgcgtcgcgcaatccctcgcgtgaggtcacgag

SEQ ID NO: 25773 - DNA, 3089 bp, Zea Mays
aagcaaaagcccacagaacgagtgaggccaggcgacttcatactgctcgcctcgccgtctttcccccaatctgttgctcctccaagctgcgggcgatcgccgtaccccggccgccgcagggaaccccctcgccatggccttgcaggggaagaagctcatcaacaaccccgacgatgtggtgacggagttcatcgaagggttggtggagacttacccgggtctgcagtacctcgacgggttccctcagattaaggtcgttcttcgtgctgatgtcgagcgcggttcctatgacaaagttgcagtcatctcgggtggtggaagtggccatgaaccttcccatgctggatttgttgggccagggatgttgacagctgctgtttctggagatgttttcgcctctccacctgttgattctattttagctgctattcgagctgtaactggtcccatggggtgccttctaatagtaaagaactacactggtgatagactcaattttggattagctgctgagcaggcaaaatctgaaggctataagatggagatggtcattgttggagacgattgtgcccttcctccacctagagggatagctggtagaagaggtttagctggaacaattcttgtgcataaggttgctggggccgcagcagatgctggtttatctcttgcagaggttgccgcagaagcaaaacatgcatctgaggttgttggtacgatgggagttgcactttctgtttgcacattgcctgggcaaataacttctgatcgtctaggtccaaggcaaatggagcttggccttggaattcatggagaacctggagttgctgttgttgaactccagccagttgacgtagtggtagaacatgtccttaaacagatattgtcacaggaaactcagtatcttcctgtcacaagaggttgcaatgctgttctcctagtgaatggattaggagccactcctatcatggaacttatgattgcagcgagaaaagcagttcctgagttgcaattggtgtatggcattgctgttgacagagtctacactggcacacttatgacatcacttgatatggcaggtcagttttttgcgcgattcttcgaaatgatgatgtgaatgagctttgtcatctctacattcagttaacatgattttaccaaaccttgcaaatcattaactggtcaaggtacctgctttgctccaactgtcacacccataacaaaaatgttttatatattgttcattatcatctgatatatgaacataacagtttacttaagtggaattgtttatctaatcacaatgcataaaaaagggcgtacccagtgccgtaggcttcccgcactgtgcagggtctagggaaggggtatctttaagcgccaagcctacccgcataaatatgcagaggctggggccggttactgacagtaggctctaccgctgcaccaggcccgctcttctatctaatcacaatgcatatgtcagcattttatgttgactcagcttcttaagtaatcaggaaggcaaaattgtttcagactcttcccctttccaggattatctattaccattatgaagtccggcgaaagcattttgaagagacttgatgctcccactaaagctccagcttggcctgttggttctgaaggaaaccgtccaccagcaaagtttcctgttcctctaccaccatcaccttcaatgaaggatgacgagattcttgctccatctcaggagctgagcaagcaagggtgtatcctggaggctgttattgaagcaagtgctactgaaattatcaatctcatggatagcctaaatgaatgggacagtaaagtgggcgatggtgactgtggaagcacaatgtatagaggtgcaacagctattcttgaagatatgaaaaagcgttaccctatgaatgatgcagcgggaacaataaatgaaattggggcaacaatccgaagggtgatgggtggaacaagtggaatcttgtatgccatactctgcaaggctgcgtatgcaagcttaaagcagagctcaactgtcactgcgaataaatgggctgatgctttagaggcctccattgctgctgttagcaaatatggtggtgccagcgcaggataccgcacaatgttggatgccctaattcctgcttctgctgttctgaaacagagacttgaggctggggatgatcccgtgactgctttcatcgcgtcttctgaagcagcatcagctggcgctgaatccaccaaacaaatgcaagcgaaggctggacggtcatcatacatcgctccagatctcctggcctcaatccctgatcctggtgcaatggctgcagctgcatggtacagagctgctgcccttgcagtgaagaacaaagtgcacggttcaaagagctagtagcatacgcaatgcttcattgctagacccaaaatagactgacaggaaaaatcactggggcattttctcactccccttagatttggtttccgcttgtgcttttgcatgggccgagaaaaaaaatgacttccatattgtctcacccttctcacatcatacaaagagatgttcaaagagttcgtcgtccgtacaagttaagggaagctatgcttttgcactgccgtgatatctcagcatgctgtcagtgttggaatgaccattgtttaatttgcccgagtttcgttttaatggctgagcccatgctgtcagtggtgggaatgatcgttgtttattctgcccgagtcccgtttcaattgtgcgcatttcggtaggatgtttaacaaaaaaacgttgtctttgaccgaggggtagtttgcactactgttgacttgtaatgttttttatcttgatcaatggcttgctgcatggtttctttctttctgggcaagattctcgaatggaacctaagacgtctatttatcgaggttttgcatatcatgaccaaattatcttgaggaaaacttgttactcgtacttgcctttgtatgcctgaacatctaattgtttttgtggttccgcaatttgcactttgatagcccgtaaataaaatattcaaatggagagatgcctatttaaaaaaaaagaaaagcaactg

SEQ ID NO: 25774 - DNA, 2074 bp, Zea Mays
aaattacaagctgcaaaaaagatcaggcacttcatgagaaggagcgaaggagaaaaggtagcatgacacgcaaccagttcttcacggtggcattcatctgcagtttcgcctactacatcttcccgggctacctgttccagatgctcacctccctctcctggatctgctgggtgtttcccagctctgtgattgcccagcagctcggctcaggcctccatggccttggcatcggtgcagttggactcgactggtcgtccatctcctcctacctcggaagcccccttgctagcccctggtttgccaccgccaacatcgcggctgccttcttcattgtcgtgtacataatcacaccgatcaactactggttcaatgtttacaaggcacgcaacttccccatctactcagatggcctctacacggtggctgggcagaagtacaacatctctagcatcatggactcccatttctacttcgatacagacgcctatgagaagagtgggccactgtacatcagcacgttcttcgcttccagctacggtcttagttttgcatgccttaccgcgacggtttcccacgttctccttttccatggaagtgaaatatggcagctaagcaaatcagctttcgaggataagaagatggacatacataccaagcttatgaggagatacaggcaggtccccgagtggtggttcatctgcatccttgtggctagtgtttcagccaccatgcttacctgcgagtactacattgagcaactgcagcttccttggtggggagtactgcttgcatgtgcccttgccattttctacacccttcctattggaattctcaaagcaacaaccaaccaggctccaggcttgaatgtcatcacagagtacatcatggggtacctatatcccggacgacccatggcgaacatgtgcttcaaagtatacggctacgttggcccacatcaagcactagagtttttgcaagattttaagttgggccactacatgaagatacccccaagggccatgttcacggctcaggttgtgggcactttgattgcgggctccgtataccttggaacaatatggtggctcctggacacaatacctgatgtgtgcaacacagagcttctcccagcaggcagcccttggacatgcccttacgatcatgtgttctacgatgcatccgtattatggggccttatcggcccacgcagaatatttggtgatttaggcacttactccgctgtgaactggttcttcctgggcggtgccattgctcccctccttgtctggtgtacacacaaggcattcccagctcagaaatggatccggcatgtcaatgcgcctgtactgattggcgcaaccaccttcatgccacctgccactgcagccaactataccacgtggatactcgttgcgtttctgtcaggttacgtggtctataagtaccggcgtaactggtgggagcgacacaattatctgctgtcaggtgcccttgacgccggtttggcgttcatggctgtgttgctctatctatgcctgggactggagaataaaagtttgaactggtggggcaatgatctggacggatgccctcttgcttcatgccccactgcaaagggtataactgtggatggatgtccagtgcataactgagagaggtcaccattcagtatttgagggtagaattacattatctctaaagggacatatgcacagatcactgaaccatacagataattgagaggttcccttattgctgcatccatgcctaggagtggagaacaaaagtttttgctaggacaatggtttggatggatggcttcatgccacgctgcaaagcacattgaacttcacatagatgtctggtgcataattgagagtattctaatcattgccagtactgggggataaaactagattatatcttgatgacaccatcaaagatcaatgtagtctttgccaaattataaaagatctcaactacatgatgaagacacagtcagaagtgtgagtgtatttcagataagaactaaccagattcagattagaactaatcagcaggaatagcagccatt

SEQ ID NO: 25775 - DNA, 2279 bp, Zea Mays
atggactccatggtgtttgaggttgctgaattggatggagcaacaatgatttgtcacactaacagtaaaatgaaagggaggttcgaagttttgttcctagccttccttgtagcgttgaagatgatgagagatcaaagaagaaaacagtcagagccattttggtcttcaatggtgatgaaaaaatggctaaacatcaggccgaaattaaatgatttcagcgaagacgagtttgatacaggcagtgaggatagtgacggtactaactctggagatgataataacttctttgagatacatggaaatctcaaatacatgattagcaaatcatcaggagagaaaacaattcctctgcgaagtcttcagagaaggaaatcagagagtttacgtgttaactacatcagtaacaaagatgtgagggtgatgataggtacatggaatgttgctggaagagtgcctagtgatgaccttcgtcttgatgagtggctttgtacacaagagccagcagacttgtatgttttagggaagttgtcccactaagcgctggtaatgtgttgggagcagaggacagtagaccaatacggaaatgggaagctcttatccgccaaacacttaacagttctcagcaaaccaggacaatctgcaaaagctacagtgctccactctcgccattactaaggcctgttgcttcaggcgatgggaaatccaaacctgaagatagagtgacaggaagtttaactcagcttagagattggcaaactagtaagagtgagcttcattgcagctggttcgatgggaccagttcattggactggccagaatatccactcgacactccatcaaaggttttggtgtcaggtacaggcttgaggcgagtcatgagtttggggttatttagctccaactttgtgggaaaccctcgaggtcttgagctccaggatgtagatttgcatgctgggatgagaaggcagtatcatagctcgggaaatcttagcatgttatggtctgaacagcaggagaagcttgatgttttaaattcacttgatcgcttatctgatttggcgtcagaagaagactcaacttttgaagacaccgttgagggctgtgctactcttgggaaaagagaatcttccgtgcatcgtgcaaattatgtgcgaattgtcagtaaacaaatggttggtatacatgtttctgtatgggtttcccgaaaactgaggcgacatgttaacaatctggaggtatcaccggttggggttggactcttgggctacatgggcaacaagggatcgatttccatcagcatgtctcttttccaaactcgattgtgctttgtctgctctcatcttgcatctggtcataaatcaggagatcaacaaaaaaggaatgctgatgtttacgagattttacaaagaacaaggttttcttccttgtttgctgctggtcgtccacaaaagattccttctcatgatcggattttctggttcggggatcttaactaccgcattgacctgccggactctgaagtgcgatatctggtgggtatgaagaagtgggatgaccttttgaagtctgatcagctaacgaaggagctagtaagtgggaatacttttgttggttggaaggaaggcttgattaactttccaccaacttacaagtacgaaaggaatacaaccagatatgttggcgagcttcataatgaggaggagaaaaaaagatctccagcatggtgcgatcgtgtgctatggtttgggaagggtaccaaacaactatcatattggagctccggtctgaacctctcagatcaccggccagtcagcgccgtcttcttggttgaagttgaagtgttcaatcaacaaaaactcgagagggtcttgaacttcaatcctggatttgtttcaaatggggattattacatgatggcagatccttaaaacttttttttttgagccagtggcattgtgcggggtatataaattttgcagtgattcttctgtaggatttagtcctgccattgtgtgaattgccacagtttttttggggaatacaccgataattcgggtaaggatttctattatgttggggccacgggtatcatgtcactgaagtacgcctcgttacattgcacatggaaatactcttaattctcaaaaatccttgagagacgagtgttatctactctactagactactactactattatctattacttgtgtttatgtctataatgttggtttatattggacttgcacacctatttactactttaatactattatcccta

SEQ ID NO: 25776 - DNA, 1921 bp, Zea Mays
attcgctggaggagaggaggaaccgtacgcgcctcattacgcccatccacgtgctcgcctctccccatcggcccatcgcataattttcctcggcggcgtcgccatctcaccggcggcgggcctgcggccggcaaccggaggcgatggcgagctcgtctgtggcggcggacatggagctggaccgccccaacctggaggactacctcccgcccgactcgctcccgcaggaggcgcccaggaatctccatctgcgcgatctgcttgacatctcgccggtgctaaccgaggcagcgggtgccatagtcgatgattcattcacgcgctgctttaagtcgaattctccagaaccatggaactggaacatatatttgttccctttatggtgcttcggtgtagtaattcgatatggattactcttcccactgaggtccttaacgcttgcaataggatggttagcattttttgctgcctttttccccgtgcatttcctattgaaaggtcaagacaagttgagaaataaaattgagaggaagttggttgaaatgatgtgcagtgtttttgttgcttcatggactggagtgatcaagtaccatggaccacgcccaagcacacgacctcatcaggtatttgttgcaaaccatacatcaatgatagatttcattattctggagcaaatgacagcatttgctgtcatcatgcagaagcatcctggatgggttggatttattcagaagactatcttggaaagtgtgggttgcatctggtttaaccgtaatgatctccgggatcgtgaagttacggcacggaagtaagttgtctttgaatgacaaacccatttattatgtagttcattttgttcagagaattactttgtcaggttgcgtgatcatgttcaacatccagacaaaaaccctctcttgattttcccagaaggaacttgtgttaacaaccagtatacggtcatgttcaagaaggtgaaccctaccttcatttactctgtcatttgtgtgtgcgttggagggtattcttatatttgcttctctacctcggtcttcctagtagccaaacagtaatttaatgccagaaactagaagttagtcacagcatggcattaaattgcatagttgctcacttgctgttgtttactatgacaatgtttttttatttggtgtgttttgtagggtgcctttgagcttgggtgtgctgtctgtccaatagctatcaaatacaataaaatatttgttgatgccttttggaacagtaagaagcaatcttttacgatgcacttggtccggttgatgacatcatgggctgttgtgtgtgatgtttggtacttggagcctcaatatctgagggagggagagactgcaattgcgtttgctgagagagtaagggacatgatagcagctagagctggtcttaagaaggtcccgtgggatggctatctgaaacacaaccgccctagtcccaaacacaccgaagagaagcaacgcatattcgccgaatctgtcttgaggagactagaggagaaatgaagagacatcaaacactacaagcgcatttggttagtggtttaccgttcagctaccttgtaattcggttggctccccgaaaaaaaaaagtccgggacacgtcaagtgcccagctcagttttgttgtaaatttattagaaatttgacagaattggtagtgtgaacttaccaagaaaggaagaatagccgcatgtgttgtggctgttcattctatgattggttaggaattgacacttgaaacacggtactctattcagaggctgtgtccgtatttatgaatcgacgatgtaatggttttaattcatgtgattattgattcaataatatgagtagattacatcctctgtaccttcttgagatttaaaacattggatttgaagaggttgcca

SEQ ID NO: 25777 - DNA, 1200 bp, Zea Mays
ccagcccccacccggccgtccacctaatcccgagtctcgagcgagtagcgacggccgcgcctgcgcctgcctgcgtcttccgtggcggcgcccctacctctcgaacccgtcaggcggtctggccgacctcgcttcctcggctagctacctactcgccagcgtctattgtccagcaggcgcccagctcccaagcggccgcagtgcccctgcttctgcccttgcacgttcggcccctgtgctgcactgcacagtaaggtttgttttcttccattcagtttgttgtactgtggagatcaaactagctaagggcagagccaaatttggggattcttcaactgaagccttgtatagatatagtttgaaagatgatgaacgaacacagagaggaggatgccttgagaggtcaagcagtcaaaaaccagaaggcgatatgggacaagaccatggaaatgagattcttgctgcagaaggcgttttctacttccaacaagttaccccaggaatccatcagaacaaggttttgcaatcatgataagcagatagagcaagcatatgatgatcttttgaattcgacgaaacatactttgagcagcatgatggagctgcaggaggctttgcttgagagtaatcaggctacaaaggatgccaatgaaattccttctgcctcaaatggagacaatgacgagtggtcagaagtacagagattgcaggcaaggataacaacattcagaaataccgagatagataaatggcacaggaaaatacaggtgacaacgggtgctgctgcacttaaaggaaagctacatgcatttaatcagaacattagtgatcaagttgctggttacatgagagatccaagccggatgattaacaggatgtacttgaccaactctgctgttagagtatttggaaaggatgtgggagaacctggaacagctgaggaggttcgagcatttactacatttcccttaaaaatatttcaaaccttatttggtctccttcagtctactgaagtgtaacggcctgtagttaattgaagctcatttcttcccctgagatgatttccccttttctatcataaccttggttatttatctgttacactaacattgctatcagaatgctactatttgtacaaatagaagatataatgcggactacactacctgagcttatttcatcgcctttgctataactcag

SEQ ID NO: 25778 - DNA, 2841 bp, Zea Mays
cgcctctccctctcccctcccctcgtcccattcctcctctgtcctcccccactcgctcccgttctcccctgcctcgccgcctctctccctgtcgtacccacctgccccctcgcggtctctctctccttcctgattggatcaatctggcctcgcggctccgactgatccgtggcgcctcgctcccgagcggaaccaccacctgatttgacgagagagctaggtgggccgtagaaaaggcttcagttcagatctcatttcagatagcacaggaccaatctggtctgcagtgttcaactggaatataagatttcgctgcataggtcaaaggtttgtacgagtgaaaaagactagcagatactgtcatggctcaggatgaagctgtggctacccaaaagactggaaatacaacatctccttctaaggattacccaactccttctccatatcctgattggtcaaccatgcaggcatattatggccctggtgtcttgccaccaacatattttactcctgcaatagctccaggtcatccaccgccatatatgtggggtcctcagcctataatgccaccccctttcgggacaccatatgctgcagtatacccacatggtggagcttacccacacccccttgtgcccatggtaatgatgcctatggacattttttgtttaattaagcacactatatatgtccaaacttggctgatcaagtgaccaagccattcaatgtaggaaatggaaagtaaaacttgattatagttggacaacatttctactcttttggtctgtagttcaccattgatgcacagcatgtagaatgttgtccataacctgtaattttgtagcctcatcagaacaaaggatctgcactgtgcatctagctctattttatattagctgcccgaggcttgccctaccagcagaagatgctgcgcacttattaatcatccattgccgctactccattcggatctgggacaagatatatgcctggcttgcggctgttttggagcctcgtggggtatgtgaaaattttatatcggtgacagagtggtggaatgaggttgtacactcaaaactcaaaagggtgtcctagaaaggcattttgttcgatcccaattctgtaacctgggaaatctcgaaggagcgaaatgcaagaatttcaatcggagacactctttggcaatctatcttgtgacaaagataaaggagcaggccacgacttggggcagtgcaggtgcaagacaccttaaggagatcctacagagcacttagctttttgctgtaaattcttgttagtctttccttcctctcgtatttatgcatgtttaacaatgtatacagttgttggcttaagcctcttcccctatttttaaataaatggcagatcctgcctgtctacgttcaaaaaatatatatttacacttcatcatgcccttggacgatctactaatctcctttagttccttctaaagttattatgttcatctttgtcttaatcactaagaataaatcattcgtttttgaagttttccattctaatcaatgttatcaatttgatgttctcatgctgctttcaagatgtcaactccaatgagcgtggagccagccaaatctacaaatagcaaggagaaaaattccaataagaaacttaaggaaatagatcggactgcagtgtctgctggcagtggtaacagtaaaagaacagtgtcatccattgaagattacagtgcagaaggctcaagcgatgtaaacgatcagaatgtgaacgaaacgtccaggaagcggagctcagatggtggacctggcgcagaaaccaccacaggtggaaacacggaatgtgttttagctcctaaccatacgctggggaatgctaccattttgccacaacactgcttttcagctccagtaattaagcccagtgctacaaatgtcgcgaactcgagggcgataggcacagcattatctccaccacctggtgtgatggttccagttcataatgcagtaccatctgacttatcagttaaggatgagagggaattgaagcgcgaaaagaggaagcagtcaaatagggagtctgctagacgatcaaggctgagaaaacaggctgagacagaggagttggctacacaagtggagtctcttgcagcagagaacacgtcccttagatctgaaatcggccagctaacagagagctcagagaagctcagactagagaattcagctctaatggtgaagctgaaggacaccgcagaaccgtctccgattaaagcatccgcatccccgtcctctccccgtgcctccgcggagaacttcctttccatgatcgacagcgccaacgcgccgagcgtcagcaggcacacggagcacggcggtcccaggctccggcagctcctggactccagtccggcgacagacgtcgccgccgtaagctgatgatgaagccggtccggcaaatacgccacagcacatgcatgtgtcctggggattccgcaggctcatgctgctcgagtgctcgtcagcgttacggactcggactctgtactccagtttaggcactgattccagtgaagtaaccgagggtaccggtaattttatctgctctcgcgccagagtgccgggctgccttgcctgcgaccactcctgtcctgtgtacccagagttgtaacgtagtagggtgttgtgctgcatgccgaccttttgaaactttcgagaccgtcatttggaccatttttttcgtcgcagtaacacaatacagatcggagtttgtacaggacggatgctgcctggtgtgcgcaattctctactgcaaaataccgacaaaaattctgtttgttttttg

SEQ ID NO: 25779 - DNA, 5129 bp, Zea Mays
ttcttttttaggaaccggccttataagcaatattgtgatactctttacatgaatgtaggggtgtcagtataatcatgatgctttgtgtaattaggtatccaagcggcctcgttctgaattaacagaagtctcttctcatactggcaaagatgtttgtgaaaacatacaagacccgaatggtcaggttggacactcttggggctgggacgatgagggtgtcgttatggacatcaatatacttctgtcagagtttggagattttagtgacttctttcaacaagaggagttagattttggtgaggtactgctgaatcacatgctctagtaattcctgcttcagactgtggagatgtcacattcacagatagtccatcaacagcaatggatatccctgaacaaagactttctcctgttggtttcacaactttggatgcatttgaccatcaaattatggccccagctcaagatgttgttgctaaagttcaagaacctcataatgatactgcaacacctgcacagtcccactcgcaagttttatcatctggaagatttgattatcttaccaaagctgaagcaaagctcacatttgctccagaatatgcagctgttgaaattttgattgctgaggccccaacaccattgtttacaaatccatactttcctagatcaaagaaaccaggcagttctagttttagtgcaagagtttattcatatgatgttgcacaaagctctcaaattgaatccacaggagacaagccagataagacttctaaactaatatctggtaatcatttacatgatattagttcatcaaacttgtacacacttgtccaaggtgggaataaagggagtgataagatcttaaagagtactgatacacagccctctaagggagaattgtcaccacctatttctggtgtgacttcatttaatttttctcttgtttcacaaaagaagagtggcaacatgttcaatgctggctattttctgctgtctatgaagactgctttggcaactgaaattgaatgcatcacgttccaggctgccatgtgcagaattaggcatacactattgtctctgagaagcaaagcatctgccgagtttaacagtgcaacatccagcttcatacagacaaatgtcagcaacaaatcagatctcacccccagatccttaatggacaatgtgggagtttggaggcctgttgttacacctaaagggcctaaatctcttgagtctttgtctgctaacacattaactggtgcaagcccaagtctgtctatacaaagacaacctgttgtagatcttctctgtgccatgactctgcttgttcaacaatctacttcgtttgttgatatgtcacttgatatggatgacggggacggttcttttttctggctttccctggatgagcaaaagagacgtggattttcttgtgatccttctatggttcatgctggctgtggtggcctattaggaacatgccattcaaaggattgcgctggtgttgatttagtcgatccactttctgcagaggtttcagagccatccatgattagcttgttgcagtcagatataagagtagctcttaaagctgcctttgcaaacatggatggcccgttatcagtaattgattggtgcaggggtcgaggcaatgctgctgagtctgcaggtacgggagatgcatactcttttcagtactccagtggtgatatcctggagccgtcaagttcgttgtccattggtggagattcaatgagcccaccccagccaaccagtagcaatcgaggcatttcagaattagagttccaaaagggatatcaccgtgtcagaccaaccattgctgtcctcccttcaccttctatgctagtcggttaccaggatgattggttgaaggcctcggtgaatagtcttaaaacatgggagaaagctccttttgaaccttatgccttgccgaagcctgttacttactatgcactttgccctgatattgatatgttgacttcggcggtagctgattttttcatgcagcttggaacagtttatgaagtttgcaaactgggaactcattcgccccaaaacaatggaggacaaatggaactatctcctggaaaatatttgccttcaggacttgttctagttgattgtcctgagcagttgaagaaggttcgctgtggccacttaggtcccatcagttcaacaagtgactgtcttcaagctttttcaaaacattggagcgtgaaaagttttgtaacatctatttcaaggatacttaaggatataaagctgacttcaaacatatctacaaatcagaaagagagcagtagtggaccttgcacagtaatttatgtagtttgcccatttccagaaccttgtgcaattctacagacgctagtagaatgttctgttgctcttgggtatgttatttcatccccggaaagggaaagaaagttactatattcacaggttgccaaagccctaaacagcagtgcttctgtagatgaagcatcagcatcaaatgtcgttatgctatccgggttcagtatacccaagctcgtcttgcagattgttactattgaaactgtactgagaatggataagccaaacaaggagcttgctgttttgaaggacatagcattcacagtgtacaacaaggcacgacgaatcccacgggctgtctccacaagcgatatgttccagtcaccaacttatttgggtagatctcagtccacaatgatgcatgttacatctcctgctcctactctttggaaggaatgtttagttcctcgaatgtctgggccaactctctctcgagaaaccgattttgatgcatccatgaggtcggcaacatgggataactcatggcagcctgctcgttcgggaggacttctggacccaagtaagctgcctgatttatgtgctcaggatgataggaaatatgcctttgagccacttttcatactagcagaccctgggtctgccgatcttaatgctttaatggaaccatcaaaatctggagcagatgcatctggcagcagggtatatggctcaatttcaggaagtaactctgatagtggagtgagccctctactcgacgtatctgagagtgacagtgcagcaagtcttcattgctgttatggttggactgaggactggcgatggctagtgtgcatttggacagatgctagaggagaattattggacagcttaatatttccttttggtggtattagtagccgccaagacactaaagttctccaaagccttttcatccaaattctacagcaaggctgtcaaataatgtcgtcttcacctgaggctagcaatatgagaccacgagatgtcataataactcgtatcggaggtttccttgagcttgaaatccaagaatggcagaaggcaatatactcttatggtggcaatgaagtgaagaagtggcctgtgcagttacggcgatccatacctgagggtattccacctagttcaaatggtcctacgctccagcagcagcagcagcaagacatggccttaattcaagatagaaacatgccttcctcaccaaaccctctgtatagccctcatccaaaatcaagcttcatgaaaggtgcacttggacaatctggcaacaaaaaacagatccttgtggaacaaagtggaatggacacttcaaggggatcactgcacttagttcgtagcatcagtttggttgcagtttcccaagatcattcgttgcatctcacatgccaagcagatctactgagcagacctgcttcagctggcgaagggagtcaaggcagcagtggcccttggagttacctggaaggtttcactccagtgaagtccattgggtcaatgtcagcgtcacactcgtaccttctagttccttcgccaagtatgagatacctctctcctgcaacattacagctcccgacatgcctcacatcggagtcaccgccgcttgcccatctactgcacagcaaagggactgcgattcctttagcgatgggctatgtcgtctcgaaagccgtcccacctgttaggagggactctgcacaactcaccaaggatgaacagccctctgttctctcagtcagcatcatcgatcactatggaggcagcagtgggactgttcaagagaagatgagccgaggcggcggcggcggcagcaaacaggcaaggaacttgagtcaggagacaacaggtcgtgagtgtgagatggagatgcatagtgtgctggaagctgtggccgcggagcttcactctctgtcttggttgacagtaagcccggtgtacacagaaaggcgcacagcactgccctttcactgtgacatggtcctaaggatgcggcggcttctacactacgcagataagtatctatctgaacctaagggagagacaactcactaattgtcatgtacaattaatatctagctaggtaggtatgtgagggcacatttgacgagctttgtagactgattttgcaataaccctgataacttacaggtggatgctgtaacctttttctctttttttaggtctgtattgtttgtcgacacaagatttgagatatgattccgtttgttgactgtattaatcagaattacaagtacagcgtttactgggattgccgtgccctactgcgacgacgtttttttttcctttaatcagaaatacttgtaaaatcaaaatcatctctccgctacggctattgctcacaccccctggctggaataggcagcttaaaacccaggtaaaactgacaggtccgcaatccccttgggcaaactctcaatcttcctcagcaacgttagccggttgttgcgaactctctcgtcttcctgcgcataatatacaccatcatcactctcactcatcagcacaagttaagtttttcaagggcctcacaaaactcaccgccatcacgaagacactattgaagaaatcttctaggggttgtatcaggataagagaagcatccacaaaggtcttaatatcaacacctacagaatgggtagttggaggaatcagacaaatgaacatttaaattgaaatgaaaaatggatatgaaaaacatgtaccaggatggatcttatcagcaacctccaagtaggcgctccacaaaactttctctt

SEQ ID NO: 25780 - DNA, 2432 bp, Zea Mays
ggcccggccaccccagcaggcttgggccgtggtctgctactctgctcgccctctcgcctcacttccactctcacccaccaccgcctttctccttcccccgcgccgatcacgccacggcggccacgccatagggctagggtcggagatccgctcgcccggtgatcgattcgcacctcctcctctacccgaggcctcgaccacggaggctgtggggtccattggtcccactcgatcacttgcatccttttgcgaaacctagcaaaccatatgctgctcccagtaagcataatggttttatttatgcaaagatatatggtggctttgagaagatacagtctacagctattaaatgccactctggttattcctgagatacaagcaacaactcgtgcaaaaggcataagtccgaagttcaaaagcttttcatatatatacgatgaagatcatttcatacatgcactttccagtgatgtggttattgtgcatggcttgccaaaggatctcagagaggctaggaaaaagataaaatttcccacactatctcctaggaattctgctactccagaatactacatcgaagaagtattacccagacttgtaaaatcgaaagttcttgggataattgttaatggaggtaattgtcttcagtcaattctccctgcaagcttggaggaatttcagaagcttagatgcagggtagccttccatgctctaaggttgcgccctcaaattcaggctcttgggagccaaatagtaggaagattgcgagcatctggccgtccttatgtggcctatcacccaggactgcttagagatactctagctttttatggttgcgctgaactgttccaggatattcatacagagcttattcagtatagaaggaatcagatgattaaacgaggaacagtaaaggagcagctagcagttgattcagtgtccaggaagatggctggtttgtgtccactcatgccagaagaggttggacttctacttcaagcagtaggttacccaccaactacaataatattcttggccggttctgagacttttggtggacaaagaatgcttattcctctacgagctatgttcgctaacctagtagaccgcacttcattatgtagtcagagggagctgtttgatttagttgggccagaagatcctcgaaccccagatttgccacagcctccacctcccaaaagtgaaaaacaacttattgaagaatggaggagagcagggcctcgtccaaggccgctgcctccacctcctgcaaggccattctatgcacatgagaaggaaggctggtatggttggattggtgagaatgacacagaaccggatgcttcactgatcgagttcaggaggcaagcacaccagttgctctgggatgcacttgattattttgtttctgttgaagctgatgccttcttccccgggtttcacaatgacggtagtggttggccagactactcaagtttggtcatggggcaccggttgtaccaaacaccttccggtataacctacaggccggacagaaagattattgctgcactgtttgaagatgttaatgatcatcggtatcatccacctcggaattggacaattgctgcacgtgagcacctcaacaggagtgcaaatgtggagggcgtagtgtcatcagctatgttatcaagacctgtatcttttctcgcccaccctttgccagagtgctcttgcagcacatcgaagtcacctgctgttgaaccggtgaaagatagcaatggcagattcctatttggaggtgaggaagagtgtgctggttggatggcacgcagccctgcgatggcgtctgccaggaataatgaacctcaaattgaggactatgaggataatttgcctgaagaaggctctagttcagacatgcaggaatctgacagaagtgactcgaataaatcttcggagcaagatgaggagatggatctggatgattagagatatgtggagcatggatgtatggcacacctttcaaccgctaccagctccaggtccaggctactcgaagacaagcatacatacgctcagaatctcctggacaggtgggaatcatcttgcatcgcgcagcgacacatcagcatctggattagtcccaggatcacaattcacaaggtcatccagcgtgggagcttgcctggaccgtactcggtatacaacaaggctttaatacgaaactaacactttgttcccttcttcattcacgtgtcattttttgtgggtacagccctaagaaactgtttatgtacaaatgtcttaactgggaatacatcattttttttgggtgagtttgatatctaatggcgactatgagctaatgagattggcttatggtggacagatgtgcacctgtatacaggacaacattgcaattgtttgtgagttttattgatcgccgaaga

SEQ ID NO: 25781 - DNA, 2154 bp, Zea Mays
ccgccgccgcctcaaaaccctagctcgatggagacattgagggaggccacagcctgcaggtaggttcgttcgactagtcatgggccgcgaaccatctactgcaatttgcagcccatgagagacgatcgggctctccaagtgggcatggtgcagggtagctgggctccctgggctccaacaaggaacgaggcccatctataatgacggttagacaaagaagtggcgcagcggcactaggccatccgttgaagcgttatcccgcagcgggcaaccacggtcacgtacgcgaaatctctctctctcgtggtcgtgcgcttccttcccgagactccaatgcccctgcctcccctgctcccgcgcctttaccccacgccgcctccacttcgcgccggggacaggggtaacgccgtccctctctctcctggaagaagaaggccggcgcttctcgctgtcgtccgcgcaaagagaaaggacgaggcaagcttcaccgaccgcatccttgactacatcgagggagggccaaagttaaggagatggtatggagcacccgatttgcttcccaaggatggggctgcggaggatgaggaggacgagtctcaagatattgaggagtctcgggacgctgtgctagtcaccaatggcgacagtgagattggacagatggtgatattagcactaattctgaaaagggctagaacaaaagcacttgttaaggataaacgaaccactgaagaagcttttggaacttatgtggagtgcatggttggtgatatcggagataagtccttcacaaagagagcactaaggggcgttcgtgctataatttgtccagctgatgatggttttttctctgaaccgatcgacctcaagggtgttcaacacattgttctgctatcacagctggctgtctacagaaatagtggtggtttgcaagctattatgaacagcaagctgaagacgctagcagagaaggatgaagaagtggttcttgcatctggcatcccatgtacaataatcagaacaggttctctgcaaagcactcctggtcgcgagagaggttttgattttactgaggtctcagcgatgaaacccagcttacccccagtgcatattaattattgtgcagtttctcttcccagcattcagtaattgaactaatgaatatcatgcaattaggacacacatttagacactattgtattcatagatgtctgatataatttgcagtccacaaactgaatattatacctgcatttctagacttaggaaactgaatggaatattatcatcttggagtacctatactattcattgttgtgatgtatcgccctatggtattgtccacgaaatgtgtagggcatagcaagcaagggaagaataagcaaagaggatgctgctaccatatgtgtggaagctctgaatagcattcccctaaagacacacatttttgaggttgcaaatggtaaggagaaggtgatagactggaaagcatggtttgaagagcagaccaaaagagaagaagaaatacagtaaaaaacaaattggaagtgtttttcgcttgttggtccatgagaaaggaaaatagaaaagagcaaaaaaaggagaggatttataaaaacttgatggctagtttggaaactcaaatgctcttcggaattgaaggggatgggagaggaaattagttcatttctacctcaatcctctccaattccgaacgagatttgaggttcccaaatagcctaaaggaaatgagctgaaggttacgtttgatcctctagccttgctggcaattgaatcatactagtatatccgatgaagaaacaaaagtgcgtggagaagtggaggcacgtctatgaactctacactctgcagttgggctgaagcccctgatccctcattgtttatcaactcattcattatcttatataaaatgcagttcaaattatttgattaaagactttaaccatccacgagtatttctgtacacatgtatctagcgtttctgccagtattgtttgttgttcaatttgaagattaggccatcaagttattacttcagggcaacagaagcctcaagtcaatgtcacatggtactggatttctgcagcaaacatgttaacatgctgccgtctttaagggtttgttcgctttcct

SEQ ID NO: 25782 - DNA, 2551 bp, Zea Mays
gtaaagtcaatcggtccattttctgtccctaagtggagtgggtgcgcttactctgttcaccaggtttttgcctcagggcatgtggatctgttagttcacctgctgcaagcaagtatagctatagggttgaccagtgcagaagtatgaatccttactttgttgggattcttgtccccgtcgcggtctccctgctgctccgcaagaggagaaaggcccaaaggatgaggggagtgccagttgaggttggtggggagcctggatatgcagtccgtaactatcgttttgaacaacctgttgagacacactgggagggggtgtccacacttgctgatctgtttgagcaatcttgcaaagagtatgtatacatgccactccttggcacaaggaagctcatttcaagggaaactgaagcagcacctggtgggagatcgtttgagaagctgcatctgggcgagtatgagtggaagtgttatgcagagtgcttcaagagcgtttgcaacttttcatctggactaattagagtaggtcaccagaagaatgaacgtgttgctatttttgctgagacacgggctgagtggcagattgggttgcaggcatgcttcagacaaaacattacagttgtcaccatctatgcctcattgggggaggaagctttgtgtcactcactaaatgagactgaggtcactactgtagtttgtggtcagaaagaactaaaaaagttgattgatataagtgggcaacttgacactgtcaagcgtgttgtctatatcaatgaggaaggcatctcaactgaagtttctttagctcaaaactgcactagctggatagttgaatcatttgaggaagtaactaggttaggagctgaagcacctgttgaagcaaacatgcctctaccttccgatgttgcggtgataatgtacacaagtggtagcaccggattgcccaagggagttatgatgacccaccgcaacgtcctggctacactctcagcagtcatgaccattgtgcctgcacttggcagtaaagatatatacttggcctaccttccacttgcacacattcttgagttggcagcagaggcactaatggctgctgttggggcctcaataggatatggatcacctttgaccctgattgatacatccaataaaataaaaaagggaactctaggtgatgcttctgcactaaagccaacattgatgactgctgtacctgctatacttgatcgtattcgtgatggtgtcaggaaaaaggtggatacaaagggtggtatagcaaagcaattgtttgacattgcctataaccgtcggcttgctgcaatcaatggaagttggcttggtgcctggggactggagaaactcttgtgggatacacttgtgtttggaaaggtgcgtgctattttgggaggaaagattcggtttgtactttcaggtggagcacctctatctggagatactcagagatttatcaatatatgccttggggctccaatagggcaaggttatggtctgactgaaacttgtgctggagggacattttcagagtatgatgacacatctgtcggtcgtgttggtgctccactaccttgttcgtatattaagttgattgactggcctgagggtggatacttgactgctgatttaccaatgcctcggggagaaattgtcattggaggtccaaatataactaaaggctatttcaagaatgaagctaaaacaaatgaagtctacaaggatgatgagaaaggtatgcgatggttctattctggagacatcggacggttccatccagatggctgccttgaaatcattgaccgtaagaaagatatcgtgaagcttcaacatggcgaatatgtatctctcgggaaggtagaggctgctttgattgtgagcccatatgtggagaacattatgatccatgctgatcctttccacaattactgtgttgctctcgtggtggctgcacacattgagctggaaagctgggcttcgcagcaaggaatcaaatacaacgatttctcagatttgtgccagaagcaagaggctgttaaagaagtgcttggatctttagcaaaggctgcgaagcaagcgcgacttgagaagtttgagataccagtcaaaatcaagctgataccagagccatggacccccgagtcgggactcgtcactgctgccctcaaactcaagagggaggtgatcaggaagacgtacgagaacgatctggctgagttgtacgcatgatggttctactctttttgatacgtttagtgtggaaaatgtgtagagtgtcaatgtcacgctgagatctatggtaatttgataccgattatcgttctgggattattattattattttgttcagttagaggagatatataaaccttgaagttttgagttatatggcttctcttgatgccgagaagctatattgcgatgattcctatgtgtttaggatataacgctttcgaattcttattgcgcttgttcatctcgtaccttgaggtaactactggtattgctgtctatagaattgtatgtacggtttcggtgta

SEQ ID NO: 25783 - DNA, 1566 bp, Zea Mays
gagcggctggaggagggggatgagcagggaggggagcagccgtcgggggaggagaactcaccggcgggggagcaggaaggggagcagccggcgggggagtagccggaggccaaagacccagccatggcgatctcccagatctcacgcatattcctggccatccttctcctggccgccgccttcgccgccgccccagctgcgcttgcggacggcgacgacgtggtggcccttaccgaatccacgttcgagaaggaggtcggaaaggaccgcggcgccctcgtcgagttctacgccccctggtgtggtcactgcaagaagcttgctcctgagtatgaaagacttggtgcaagttttaagaaagctaaatctgtcttgattgctaaggttgattgtgatgagcacaagagtttgtgcagcaagtatggagtttccgggtatccaacaatccaatggttcccgaaaggatccttggagcccaaaaagtatgaaggacaacgcactgcagaagcccttgctgaatttctcaatactgaaggaggcacaaatgtaaagctggcaaccattccttcaagtgttgtggttctcaccccagagacctttgactcaattgtccttgatgaaaccaaagatgtccttgttgagttctatgccccatggtgtggtcactgcaagagtcttgcaccgacgtatgagaaggtggcttctgttttcaagttggatgaaggagttgttattgctaaccttgacgctgacaaacacagggatttggctgagaagtatggagttagtggatttcctaccttgaagtttttcccaaagggaaacaaagctggtgaagattatgatggcgatagggacttggttgactttgtcaagttcattaacgagaagagtggtaccagccgtgacacaaagggtcaactaacctcagaggctggccgtatagcaagtctggatgtcctggctaaggagttccttggtgcttccggtgacaagcgaaaggaagtcctctccagtatggaggaggaggcagataagctcagtggttctgctgcaaggcatggaaaggtctatgtaaccatcgcaaagaagattctagagaaaggcaacgagtatactgagaaggaaaccaagaggcttgatcgcatcttggagaagtccatcagcccctccaaggccgacgagtttatcatcaagaagaacgttctttcgactttctcatcctaaggcatctgctagctccattttcacgtttcagatataggcgacaaaaactgcaggattataagtgtgataatgagagttaaatggtgctagaactaattttggggctttccctcgaggatatgtaatactcgtacgtcttgcgaattagttcttttccttgtgcttctggatttattccgtagcaccatagtttattttttggtttgacatggaggacattgtgactacagaactgagttttactatccaataacactgctcacttgatggggcttatgcgaacctgttctggtacgtgctttgggaatacatgatcacgtgcctgcttatccagtcatt

SEQ ID NO: 25784 - DNA, 1311 bp, Zea Mays
gatattttctcacgctcaatggccgatggccttatctatcgccgcgctgctctgcgttcgtctccatcagtttcacgcgcgcaggcttcttcctccagctcctgctcacgtcgtcgccttgcctgctcgcccctgcgtgctcccctgtcggcgctcaccttcatggccgcgcccctctgctcgtcgcccctccccagcagagatctctccccagcaaggttcctcccatggccatcgtgtgcagccacgagctccagtcttcttcttcctccctgcgtgcggatctcccctgctggcgcgcctaactccagcccgccgcggtctgtgacctcgtcgttgaattctatgatatgcgactcgacctcacctcgcttggccacgcgccaatgttcctgttcgtctccatctgtgaccaagccgagcccctgactccatcgtcgagtctagccccatgttactgcgctctgcgtcctcgccgcggtcgtgaaactgccgtggaattgcggtcgtttctctttgtgtcatgtgcgcagcacaccatcgtcttcatgtttttggcaagtcccggcgtgcgctcgcgctcgccatcccctgctcgacctcgtcgtcgaacttcgccttgccagtcgtcgttcttcgctcagcaaggtttcgttctaagctgcgccacccttcaagttcgcgtccttggcggactcgcacctctgtgtcgtgtctgctcgtccatgctgtcggcccgtacggactcgggtcttgctagtgtcgcgctgccgtcgatgcaacgcggggttgtccctctgctctgcccagctcgtcaagtcccaaaaatctgcacacacgtcatagttggtgctcaacatcttcgtgtcgcctttcgtgtgctgtaacacccccttgttactcgtcgtcaatccacgtcacgtccgcgacgtgctcgtcgaccccgatgatctatcttccaattacgcgctacttgtgttgagctctgaagccccctgtcgagctcttcctctggaagtcgccttcgagcacaacccctgccaagtgttcgctgggaggtctgaaccaatactcatcatcgatttgcgattatcaaatcattctggtcacggtacgttaattaatcgcgtgatgcggaagacgatccaagtcgaccccaagtgcggactaatccgcaagatgatgctggtggattaacctgaagatggataatcggaacaagtatcagaacaaaggatactcaccaagtcgtcatctaacaaacactaacctagtgtttcttccaggcaagccccggtgcatgcaacccct

SEQ ID NO: 25785 - DNA, 2380 bp, Zea Mays
acacatcgccacgccactgattggctcgcgattatctcttgtttcagatgtagaggggcgacatcatcgtcatgtctgtcctcatttctcctgcggtggtttaagcaatatatcgtatccatttcgtcggcaaggtgatccatctgggtgcggtgtccaatcgtatgagctggtttgcacggatacagatgctacaattcgcatcggcagtggaacatacaaggtgcttagcatcaactccacatattcttacttctgggttattgatgccgacctggacatccagagcagttgcccccttccccggtgggattaccatgctcgttggatcaatctctacttacatctttggaggattgagttcatctatcagtatttctatccttcttctttttatattgattcggggcggtgggctatctttgtgaattgttctcagccaatagagaacattgatactgataaatatcatatatatgagccggtgtcttgcttgagcaattcttctttcatctacttgctggtaactcactactgggatgctgacaactgggatgttactgctggggttctggagccttcatgcggttacctagccatgactcctttgggtggtccaggcatgcaggtgccctggaatacaagctatccagatgttgttaagttcatgaggagtggatttgcccttggatttcccgtttggtatggtgataacatcagagaatgtctcgcaaacaatatgcgtactttccataaagaaccaagaaatagtacaggcatcaggcaacagatcttggacattcttacgttcgagacattatggttttgtgttattgaacaacttggatcaactaataatggtgtcaaatctgttctcatccacatcatcgaagaaataccatatgttctttccggtctgaaatctgcacatgttatttgcaggttcatattgatgccgctggcagtatttgtcttcctagcctataaatactggaaaacacggataacaatagatgcagttgagaagttcctgcgaatgcaccatatgctcgttccgatgagatatgcatacacaaacatcattgctatcaccggccatttcagagacaagctcggacaaggaggctacggtactgtatacaagggggtgctacagccaggtgaagttcatgtcgctgtcaagatgttgggcaactcaaactgtaatggagaagagttcatcagtgaggtcgccaccattggcaagatccaccatgtcaatgttgtgcgcctcattgggttttgctccgaggaaaatattagggcacttatctatgagttcatgccccgtggatctctcgataagtacatcttctcgtcggagaagacattctcatgggacaaactcaacgagatcgctctgggcattgctagaggtcttaactacctgcatcacgggtgtgatatgcagattgtacactttgacatcaagccacacaacatccttcttgatagcaactttgttccaaaagttgctgattttgggctagccaaactgttcccaagagatgacagtttcgtgccactaagcgctatgcggggaacgataggctatatagctccagagatggtatctcgaagctttggtgtcatctctagcaaatccgatgtgtacagctttgggatgctactattggagatgacgggcgggcgaagaaacgcagatcctcatgcaggaagctctagtcaagcatactacccatccttggtgtacaggcagctcagccagggtgatgcgaacaggatcagtgaaggtgttgatatgcacgagttagagaagaagctatgtatcattgggctttggtgcatccagatgaagccgcaagatcggccgacaatgagcgaggtcatagagatgcttgaagctggtgtcgatggcatccaaatgcctccgaggccatacttttgtgatgaagagggtgaaagttcttactctacaatctctgaactggatacaatagaagagtagtagtagtaaaatgcacttgtgtctatgtgctcttaatgtatcagactattaagattgcaaggttgccataagctaaggtattggttgtatacttttattgagagtgtgataatgtgatatcatataaaatacctccatgaagttttttacaaagaattcctcaagaacattttgtttgcctacaagcagaggatcagagtcccagccgttgtatcttccaaagggctgcagttcctatatacgaatccttgcaaaggcttagtgtacaatttctatgttatgcataataaattaagtaaactagtatattgcttgtgctaacactgcaatagtatttggcaatacaaatcaaataaccaaaatattcaaaaa

SEQ ID NO: 25786 - DNA, 1066 bp, Zea Mays
tatacatactttaatagagtaaatacttatcagttatcggatcacggatacccatttctagtccccatcagaaaaaagctgaaacaagactcggcttccacctgtcaatcaaaaaaaaaaaactccacattggacagcatccaggccccactgtccaggcacccggatccagccctctctcccttctccacttccgtttccggattcttgcgtttccaagtccgatacaaaccagcgccgcgccgcgcgagcacgtcgggcgacgttgcggcaggcgagatccgagaacactcctccctcgcgcccccgcacccgcatggccgccgctggccgcagatagggaggcgcaggcgggggcgtgcagatccagatccggtgggcggcgaggacgagatcgccccctaccaccatggcgggcgccgtgtcggcgctcttcctgctggacattaagggccgcgtcctcgtctggcgcgactatcgtggtgatgtctccgcgctccaggccgagcgcttcttcaccaagctcctcgacaaggagggcgactcggaagtccactcgcctgtggtctacgacgacgccggcgtcacgtacatgttcatccagcacaacaatgtcttcctcctcaccgctgctcgccagaactgcaacgcggccagcatcctcctcttcctccaccgtgtcgtagatgtgtttaagcactacttcgaggaactggaagaggagtcgctcagagataacttcgtcgttgtgtatgagttgctggatgagatgatggatttcgggtacccacaatacacggaggcgaagatcctaagtgagttcatcaagacagatgcgtacaggatggaggtcacacagcgtccacccatggccgtgacaaatgctgtgtcatggaggagcgaggggatccgttacaagaagaatgaagtcttcttggatgtagtagagagtgttaacattctagttaacagcaatgggcagattgtgagatcagatgtggttggggcactgaagatgcgaacatatttgagaaaacagcttgcattgctgtcggcgaatttgttc

SEQ ID NO: 25787 - DNA, 2617 bp, Zea Mays
gctgtcccccctgctcctgctcctgcctccggggcgcggcgccttcccgtctcccttcctcctcctctcccaccgctcggcctcctccaccacacgcgctcggcggtgccctccccggcgcggcgccgaaatgcaggtggggcctcgtcggcttcccgcggctgcgacgggccggagcagctaacgccgcggcctggggctgtgatctggggccgcgccgcattgccgactgcctgccgccgggctcgcgcgcgcagttcctgcctgccggtggcgaggggaggcaagatgcggcatctcgctctcctcgcgcttcttctcgctcccgttctcggatccacaggcaccactctgtccccttctccggccgccactgattctcctgcaaaccaaggacaggcttctagtcctcctcaatctgcatttgctcttggtccagtagctgttccaactgcgccgaccactccatcggcgagtccttccccggagaaagccgcggctgtaagtcctgctgctcccacggagccacgaattgccccggctccagtggctcctcctaaagagtatagtgcacctcctccagttgaggttgcacccactgatcccaccgatgaggttcctccaccagtagctccaccacaagctgcagttggaaatcccactccaattcttcctgggacacctgcattgctaccttatgttcaggctcctgctccatctgtcgttctcaagcctaatccaccagtcgtggtgtcacctccacctgcgaataatcaaccaagtaggccggttgggtctgtccctccttatccaccccctgcatcgccccctccggcaaatggcattccaccatacccaccttcaggaaggtttcctgctattcctcctgccacttcagtcccacctccagccacatcacctgttattgcacaagcaccacagcgacgagcagatcctccaagtagagattataagaacggaaacgcagtgccgccagcaaatacttaccctcctacaaatctcaagaagcatcatgttccacatgcatcccctccaaagggatccactggtcaaactgtcccaggtcacaaatcaccagttacaggatctgcgcctgcaacaagtcctttgccccagaacacaaacatgccttcaatcccgaagaatgcttcatcagtgccacatgcccatccctcaccaccaagtatagctccagaattggcacccactggtagatctcatgctcagggatggaaatccagtaatcccaataacaaaacaaatagattacatgccccatcttatccaccgcctcgtgctcaagggcccgaggtctcacgaaccccaagacagactgggactaaaaactatactcaccatgcgcctccaccattccctcaaggacaccctagctttcctgtacactccccatccccttcaccagcctcatcgaggggtcctgcgaacgcgaagaaaaagccaaaagcaccgtcagcgcatcctatttggacattacctccaccaccacctaattcagattgcaattccttatcatgcccagagcctctaacagatccacctgcgggagcaccatgtgcatgtgtgctaccaatcagagttggaattcgtctaagcgttgacctttactcattttttccattggtctctgattttgctgaagaggtagcttcaggggtaaacatggcacagaggcaggtccgtgtaatgggtgcgaacgttgcaggtgatcaacctgacaaaacaatggttcttgttgatctagttccagtgcaagtgaagttcgacaatgctacagcattttcagcatttgaaagcttgtggagcaaaaaagtttctttaaaaccatcagtctttgggaactatgagattctctatgttgtatatccagggcttcctccttcaccaccttcagggcaaggtgttggggatggggcgtttggcaacaacagaaatgcaagggccgtgaagccccttggggtcgatgtaagaagtcccaagagaaaagtgaatggcagcctcattgctattgttgttttgtctactgttatagcattgattatttgctgtctggctgcatggtcgctaatcctcagattcaggggtccgagccacacagctcggggatttccacatactgcacttccaaaattttctaggtcatctggtacgtgtaactaacctgctaattttctgataattgcaccttgatgtgatgtaattggactagctctttgattcgtagcagaataacagtaacttttctccaatgaagtagtgccactgttgaaattcatcatgaacttgtagtctataagcaagttttttttatttggtatcctttccaaggaaaattccattgcttatttgaaatgccagccaacagtgcttgcaatgacttttcagttaaaaggctttcgtttcagtttctgcatcgtgttatgtgcccttgctagaataatatgcacagtttaggcagtactagttttcgttctgaccagtgttttaaaggtgtcgcctaggcgtccaggcgtctcagtcgcctagctaaatcagcaagagggcagaggggaagaggaaggggcggtgccgaatcggg

SEQ ID NO: 25788 - DNA, 4306 bp, Zea Mays
cacgccggccccacaagacccaagctgcaaaactatccagccaccattcacccctccgcactccgcctccgccgcctccctgccctcaactccacgcccggcagggtggccgctcgccggcagccaaaccctaggcgatcgcggaggccaaccacgcttcgggcgcgatcagccgccgccatgcagggcttccccggcggcgcccccgatccgcagcagctacaggccaccatgctcgccatcgagcaggcctgctccctcatccagctgcacatgaatccatctgaagcggaaaaagtgataacttcgctgcattcgtctctcatgccttatcaagtatgcagattcattcttgagacatcccaaaaaccaaatgcaagattccaagctgctggtgcaattggtgatgctgcggtaagggagtggggagttcttacagatgacaataaaaggagcctaataatatattgtttaaactatgttatggagcatgcaagttctcctgatggctatgtgcaatcgaaagtttccgctgtggcagctagattactgaaaagaggctgggttgagttttcggaccaagaaaaagcagctatcttctttgaggttgagcaatctatccggggcatccatgggcctaatcgacagtttgctgcaatcaatttcttggaaaccttggtttcagaattctccccttcaactgcttctgctatgagcctgcctaaggaatttcacgaacaatgtgaatactcactcgaagtgcagtttttgaaggatttttactgctgggcacaagctgctgtgttcaatactgctgacaaaatcttgaattcaactgtaacaataccggacgaaagagcatgttcagcagcattgcgcctgatgtttcagatactaagttggaatttcaaacatactgtggagcacgagagttcagatgctaagataaatttcggcttaaggattgatacgataaatctgaagaagtttgaacgttcgttggtgaagggtctatgtggagagagattctaatatcaagtggacaccctacctgggttttaaacttctataccaccttgcgccaaaagtactcatatgatacactgtggggtgattctccaattgctgtctcttgcagacagcttatagtgcagttatgctccttggcaggctctgtgtttcctaatgataatggggatgcacagattaaacaccttatgctgatattatctgctgttgttctatggattgaacctcctgatgtaatcacagcatcaatccgaaatgggggaagtgaaagtgagttcatagatggttgccatgccttgctttcaatcgcatctttaactactggctcactttttgacaacctcctaaaatctataaggccctatggtacagttaatctgctttctgctttgacgtcagaagctgtcaagtcggttctgaataaccagagtgaagaggaaacctggggcatagattcccttgatattttgttagaaacatggaatgttcttttgggggacgtagatgccgataaaaatccaatctcaaccgatggagcacttgcatcttcaagtttgtttaagatgattgtggagtcacacttgaaggctgctgctgattctgcgttcgaggatactgatgatactgaatattttcatgtttctgtttcaaaacgtgatgaacagttagccttgtatgctctaatagcacgggcttctgcaaatactactattccatttcttgcacagttgttttcagaacgatttgcccggctaaatcagagaaatggtgaaagtgatcctactcaaacactggaagagctctattggctgttgttggttactagtcatgtcctaactgactctggcgaaggagaaacactacttatccctgaagcattacaggctggattccctaatgtgattgaagcagcacatcatcctgttgttacactctcctggtctataataaatttttccaggcagtgtttagatccaggaattagggcaaaatacttcagtccacgactaatggaggctgtgatctggttcttggccagatgggttgcaacctatttagtgccacttgacgtgagtagaggaaaagtaagcagagaaattgataatgtgggtacaaatggatcccaacattccagaaaactgctaaacagttttgcttgggaaaataaccaaggagagcttgttcttgattttgttgttctcatttcaatgttagctcttactacctatcagggagaaaatgagttgcagacactgacatgccagaagctacttgctacagtcgttcgccggaaacacacatgcacttatcttgttcaactggattcatggcgtgatcttacaagagcttttgcaagtggacggtctttgctttcattgagtggacgtttacaaaggtctctagcagaaacacttgcctctgcagcttcctgcatcaaagatcctgaagcatctgcacagtacctgagggatctcatgggaccagtggcagggtgcctggtagaaaatgctagcaggagtgatctaaaatctgtggcacagcaagcagatgttatttacatggtctgttgcctattggaacgactaagaggcgctgctagagctactcaaccccgaactcaaaaagttctatttgagatggctcatactgtgatgaacccacttttgactcttctggaggtctacaaaaatcattccacagtcgtatacatgatactcaagtttgtggtggactttgttgatggtcaagctgtattcctggatgctaaagagacatcagctttggtgagcttttgcttgcaactactccagatatactcctctcataacattgggaaggtaatgctctctctttcttcaagtctgcgtaatgagtcacaagcagaaaaatataaggatctgcgagctttgcttcgtcttctgacaaatatatgttcgaaggatttggttggctttctgtctgattgtggcggtgaaggttcacctgatatcgcagaggttatctacattggtcttgatattgtgacccccttgatatctttggatcttctgaaataccctaaacttagtcgtgattattttgtgcttatatcgcacttgttggaactgtacccggaaaaggttgctcacttaaatagtgatgcttttacaaggattattggaagtcttgacttcgggctccgtaatcaggatagcgatgttgttgagaggtgcctggcagcagtaaatgctcttgcttcatacaatttcaaagaaagattaggagggagaggaagactgaactcgcagctcatggaatctgaaggatctaatggcaaactgcaggaaagcatatcaagtcacttcttgagacttctgttgcaaatacttctttttgaagatttcagatcggagttagcaggttatgctgccgatgctttgcttcctttattgttctgtgaacaggagctatatcagaggttggtccatgagttgttggataaacagcagaatccgaccgtaaaatcaaggctggcaactgcgttccataaccttacaagttcaaacaatctctcaagctcactcgaccggccaaacaggcagagattcaggaaaaacctccttagcttcatggcggatgtatcgggcttcatgcagatcaagtagatgcgatggcagggaacaggtgatgtttgaccggtcaattaaaccccgaggaagcactgcaccactgtggtaggggtgcatgtgggcaccacatgtctgtggattgatgagagcgaagactgccacgacaagtctagtagatcttgaagagctagtgtcaccagaaaagacagggagatgagctagtcttagggttggcattcatagcgcatttgctggacaagatggaggcgtccctggccacgagatcgtcgtgtaaatgcgtttgttagacgcacagaaacggtggggattttgtggtggcgactcgttttgttcaattcccacaggcagaaggtagagatgttaagttgatgtaaataccgtttgatttaaacatgccttattcgtaggagaaagcgacacggcttgctgtaacttagggtttattactctttctcgtggcataggatccccaaagaagtctttgctggggtatttgcagccaaacgatgaccagtatgattgcgagaggttttcaatcttttgtaccaaatttggcctgcagttatgatgacactgagtgccgatacaggcatgaggcattccaaaattggcgggcaccacatgtgtctgtctgctgtctcagtggg

SEQ ID NO: 25789 - DNA, 2952 bp, Zea Mays
tttttgtgaggggctgcaaacagcctggtttgcagccgggctgcaacaaattttttttccttcagctctgtttcgtcgtgtcttgtcccgcccgggctctcgtcggtctcggaccggtacgcaacaaacggggggagcacccgactccacgtcctcttccaccaccaccaccaccgcctcatcccccaccaccgagcagcacagcacagggcactgcccgattccacccctgcagcctctcgctgcccactttccatgtcactgcaccactgccgcgctgccacgacgcccgccatgcccgccaccggcctctcgtccgcgggcgcttccccgttccgcctgcccgcctccagctcctccgcccagggccacctccgtctctccccccctgctgccactgccagtgccaccgcctgccgccgccgcttgcttctccgctgcgccgcctcttctggcggtggcggcggcagcggctccgacccggtcctagaggagcagcggcgccgccaggccgagctcgccgcgcgcattgcgtccggcgagttcaccgtgcaaggccccgggtggattgcgcctctcgtggggaggctctccaagctgggcccgccgggggagctcgccgccgcgctgctcaccagggtagcgggcgctggcggcccggagatcccgcaggcagtggggtcgatcaacgcggtcgtgggccaggccttcttcgtgcccctgtacgacctcttcctcacctacggcggcatctttcgcctcaactttggccctaagtcgtttcttattgtctccgatccggctatcgctaagcacatcctgagggagaactccaaagcttattccaagggaattcttgctgagatattggagtttgtgatgggcacaggtttgatcccagctgatggggagatttggcgtgttcggaggcgtgctatcgtccccgcactgcatcagaagtatgtgactgcgatgattggtctctttggggaagcttcacaacggctctgcgagaaattggacaaggcagcagtggatggggaggacatggagatggagtcgctgttctctcgactcacactggatgtcatcgggaaggcggtgttcaattatgattttgactcattatcttatgataacgggatagtcgaggcagtgtatgtaacactaagggaagcagagatgcgtagcacttctcctataccaacatgggaaatacccatttggaaggacatttccccacggcagaagaaggtcaacgaagctctcaagttgataaatagtactctcgatgaactaattgccatctgcaagagacttgtagagcaagaagatcttcagtttcatgaggaatacatgaacgagcaagacccaagtattcttcacttccttttggcatctggagatgatgtctccagcaagcaactccgtgatgatttgatgaccatgctcattgctggtcatgagacttcagcagctgtcttgacatggacattttatcttctatctaagtatccaaaggtaatggccaagctccaagatgaggctgatagtgttctaggtgatggtttgccaacaattgaggatgtgaagaaactaaagtacacgactcgggttattaatgaatcattgagactatatccacagccgccggttttaattcgtaggtcacttgaggacgatatcctgggagggtacccaattggccgaggagaagatatttttatttctgtctggaatcttcaccactgcccaaagcactgggatgatgcagaagttttcaatccagaaagatggcctttggatggaccaaatccaaacgagataaaccaaaatttcagttacttaccatttggtggcggaccaaggaaatgtgtgggtgacatgtttgctacttttgagactgtggtggcaacagcaatgcttgtcaagcgatttgactttcagatggctccaggagcacctccggttgacatgacaactggagcaacgattcacacgactgagggattaaaaatgactgttactcgaagaacaaggccaccagtaattccaaacctggagatgaaaattattaccgattcacaagaatccacactttctgccccatcgatggttgttagtgctgcttctgttgcttcaggagaagaccaagggggcatctcctgatttaagcagtttcaacatagagaacgagcatatccatttatattgctctggaagtatttggctagtttacagcatttgattacgcaagcagtacaaaacagagatagtctcctggcgtgctacaacgaaaaactccaaacccttccgcagacttgttaccgatggatggcacagcagactcctataggttacagggggtgtgtttgtttactttctagattatatatgttggattatggtggaagggtaatagggtaaaaatcactttaggactgcaaataagctaaaataatctaacattgggtagtttatttcagcttatttgtgatcttaaagttgtattttaccctattactctttcaccataatccaacttatataatctagaatggaaacaaatagggcctaggtctccttgctgatactcaaaagcatcaaaagcaccatggacatatctacatatttacaagaagtttctgacttccatgcatggatttgtgcgctcctaaatcttcagcatgccttccaacacacgaagaacatcagcacgggcaattatacctgttgatagtgtttagaaccccattaggcttgcaacatactctgtgttgtcaatgttaattaaggataatacaaatgaagtatgtacatgcagtttttttatctctagtttgtcagcattctgatactcacatattacttgttcatcctgattctcagctggtaatctcacttattactaatctgtggatctccatcttgagcatccgaaccacagcatct

SEQ ID NO: 25790 - DNA, 2642 bp, Zea Mays
ctatcccaacgagaacatcgttccccttccagcacctccattcccagccacgagacgacgaaaccctagcctcccctccccctctctcaccaggccaccacctcgccggaacccggcgcctcgacagagcacgggatcatcggccgccgtcggccgcggctgcggaggagcggtgtaagatgttgaacggcggcggcggcggccagaagaagcggaacacgaagatcgagccctaccggcaccgcgtcgagaccgaccccaagttcttcgacaagtcgtggcggaagctccatgacgccatccgcgagatctacaaccacaacgccagcggtctctccttcgaggagctctacagctctatgagaaactcacagaaaacatgaaagggcatcttgaagagatgcgcacatgtatagaggctgctcaaggtggtttgttcctggaagagttgcagcgaaaatggaatgaccataacaaggcattgacaatgattagagatatcctgatgtatatggacaggacatatattcccactaataaaaagacacctgtcttcgaacatggattagagctttggagggatactatagttcggtctcctatgattcaggggaggttgtttgacacgcttctcgagctcatacatagagaaaggactggcgacgtgataaatagaggcttgatgaggactacaactaaaatgttgatggatctagggttgtctgtttaccaggatgattttgaaaggccatttcttgaggtctctgctagtttctatagtggtgagtcacaacaatttattgaatgctgtacttgtggtgagtatctgaagcaggctgagaggcgcctccatgaagaatcagagcgtgtgtcacagtacttggatgctaaaaccaatgagaaaattactgctgttgtggtgaaagagatgctagcaaatcacatgcagaggttgattcttatggagaactcagggcttgtgaatatgcttgtcgaggacaggtatgaagacctgaccaggatgtacactttgtttaatcatgttcctgatggtctcgcaacaattagatctgtgatggtgtctcatattaaggatactggcaaaagtttggtaacagatccagagagactaaaggacccagttgattttgttcagcggcttcttaacatgaaggacaagtatgacaatatcatcaatgtgtcatttagcaatgacaagagtttcctgaatgctctcaattcctcatttgagaactttataaaacttaaacaaacagatcacctgagttcatatcactgttttgttgatgacaaactgcggaagggggtgaaagaggccaatgaggaggatcttgaaactgtcctggacaaagtgatgatgctgtttaggtatttgcaagaaaaaagatctatttgagaaatattacaagcaacacttggcaaagcgtcttctttctgggaaggctgcttctgatgattctgagagaagcatgcttgtgaagctgaagacagaatgtggctaccagtttacttcaaagttggagggcatgttcactgatttgaagacctctcaggatactacacaagggttttatgcatctacttcctcggagctgccggcagatgcccccacaatgtctgtccagatactcacaactgggtcatggccaacgcaaacctgcaatacctgcaatctcccccctgaaattgtttctgtctcagagaagtttcggtcttattaccttggcacacataatggcaggaggctaacatggcaaacaaacatggggacggctgacatcaaagtaacatttggaaatggaagcaagcatgaactgaacgtatcaacataccagatgtgtgttctcatgctgtttaactcagcagatgtcttgacttaccgtgaaattgagcagtctacagcaataccagccgctgacctgaagcgatgcctccagtcactagctcttgtgaagggtaagcaagtcctgcggaaagagccgatgagcagggacattgccgatgatgacagcttctgcgtgaacgacaagttcaccagcaagctcttcaaggtgaagatcggcaccgtggtggcgcagaaggagaccgaccccgagaagctagagacgcggcagcgggtggaggaggacaggaagccgcagatcgaggcggccattgtgcggatcatgaagtcgaggagggtcctcgaccacaacagcatcatgacggaggtgacaaagcagctgcagccgcgtttcatgccgaatcccgtggtgatcaagaagcggatcgagtcgctcatcgaacgcgacttcctggagcgggacaagacagacaggaagatgtatcgctatctggcctaagagaaccacctgtccttgaattcgatttcatcatatctacccatgttgtataaacagaccctgatccatgtaacttgtccagagaaggaaatgggtctttctgcatcccgtgacacttttaagttgagacttttttttctggatctgcccagttagttgctagcttagcttctataacatcttgcgctgggttgcatgctaacgctatagattggctgcgacgtaatgctctcttttcgttgctgcttcagaaacgcgatctgatcgctatcaaggttg

SEQ ID NO: 25791 - DNA, 2654 bp, Zea Mays
ttaatcgtttgaccttttcttgtgtccattttagatcttgctggtccttgtgggttttatctcttttatgtgtttccccgtttcgttgttttcggttctcctttgcctttgtttcccttttctgttctttgggggttgagctctgaggttttcatacggggtttcatctctagcctaccccaacgtgcttgggacaaaaaaggctttgttgttgttgttgttgttgttgttgttgtataaatagaatgtatattccgtctccaaagtccaaagcagttgttcctcgccgtctcggggtctcggcctctcctcggtctctcctcccagatcgggccatccaggtgctaccgctcttcgccccctccacttcaccgccgccgcgtagatccgtctccgcctcctggaagcgctaccagtggaccaacgccgagccggcggagttagcggcgttagggttgcggttgggaattgattgcgggggacgcagcggtggcgcctggcatggcgggggcgcccggggtcgggccgggtgcggggggtgggggcggcgccgctgcggggctcaagacttacttcaagacgcccgaggggaggtacaagctgcagtacgagaaggcgcactccgcggtgctgcactacagccacggcggcaagaccgtctcgcagttgacagtggcatacctcaaggagaagcctgctagccagggctctcagccatcaacaccaagcgccagcagtgggatgcggtctgcagcagcaaggctgctgggcactgggaatgggagcaaggcacttagctttggtggcggtaatggtgcaagccgagctgttgctggaagcagccgtgtaggaggcggccttggtacacctacaggccttggtggatcacaggggggcacaaattatgatggcaagggtacatatattgtattcaatgctgctgatacactattcatcagtgatctcaattcccaggagaaggatccactaaagtccatccatttcagcaactcaaacccactgtgccatgcattcgacccagaggccaaagagggacacgacctgatcattgggatgggatcaggggatgtctattcaatgtcgctgaggcaacagttacaagatcctggaagaaaacccgtggcagctctacattacaataagggtgataaagatgtctcacccaatggaagtcgttgcacttctgtcgcatggggtgccagagcgtgaaggcattttcgtttgttagccatttctgatggaaatttgtacgtgtatgataaaaacaaggatgggaacacagactgtacgtttccagctgtcaaggatcagtctcagtttatggttgcacatgcaaagtcgagtaagagcaacccagtcgctaggtggcatatatgtcaaggttcgatcaatgcaatttccttttcaccagatggcgcatacttggcgactgttgggagagatggttatttgagagtattcgatttttcaaaggaacaactaatatttggtggaagaagttattatggtgcactgttgtgttgcacttggagctcagatggaaaatatctattaacaggtggtgaagatgatcttgtgcaggtatggggcatggatgatagaaagatagttgcttggggtgaaggacataattcatgggtcagtggagttgcttttgattcatattggtccccaccaagttctgatggaaatggagaaaatgtatatcgctttggttctgttgggcaggacacccaactacttctgtgggacctggcactggatgagattgttgtcccactacggcatccttcaagtgcctcacctacgtttagcagcgggagcccttccacacactgggacaatgcatgccctccaacaggtgttcttcaaccttctcctagaatgcgagatgtcccaaaactatcgcccctagttgcccaccgagtacatgccgatcccctatctggtatggtgttcaccagtgaatctatcctcaccatctgccgcgagggcctcatcaaaatctgggttcgaccagagcagagcgaaaacaatcagcaatcgaattcttcagaatttgctttaggccctgcttcgaaggatagggcgatcacatcttccaataaagcaagtagctccagctttaagaagctgccgcctgttcttgtcacatgatgaatcaacgggatggttcttgtggatatttctgcttcacgtggcattagtggtggatatgaatcttactccatggttgatggggatgaaactctcatatggagtctgcagactgcaagtaatgagggtgagcatttgatggttgatgttcccaggaagcagggccagcgttgccagtttttttggcacgaaagagtaaatgggagctcttgtacagacacatacttaatgataaaattgtaaaaactcactgtccgtttcataatattcaatagccaccgaaagatgattggacgaccatgttatcgattttagctggtgggttgatagtatccttaaactttggtacttcggagacttgtaattatggaccataatatctgaggaatgcttcagtcttacctggtgtaagttgtgttactatttccttctgccttttgtcaattattagatctagtttggcaactccatttttc

SEQ ID NO: 25792 - DNA, 2215 bp, Zea Mays
cccctatcctctctcctcgcccaccggaaacgcaacgcaacgcaacgcaaccagagggggaggggggggggggggaaagccggagccgactgcccgcaccacccacaggaacgccgcggggcaggggggcaggaggaagacgccggcggcggcggcttaaaagggcagggcgccattacctgcttccctgtcttccccttcccctcatgtactatagtactgcgctgcgccctttcatttacccggagtagtaaacgagaagaggaataattgtgtcgcaaactaatccgtttcgccgctgcctgctgcttgagccaatcttccgcgggtcggggccgatgacctgccaactggtctgtttcacttgccattttggataggatcgctcgttttggaattaactttatgctaacagaatctaggtgtcattaagctagattaagcttgctgcttgacttagtagtgtaaatctgtaaagaaaattacctggtttgggtttagtctctataaaagaaatggaacagaggaatgttctggcattgggtgaacatgttctaaaagctactgtttggaagcggaagcataagactgctatggagcaccctgaaggcaatgatgtgatggtgttctctcagcatgatcaaagaaagcaccctgtgatatttgacgacagagctaaatgtaagaagtctaaattaatttcctgtgggagtggagttatattggagtcatattggaactttaagacaagtgggctgcctgtgcgcgtgcttttctaccaacatggtgactggagtgattttccagaggatgttgtaaatctagcacaacaggacttccagttgaagaagccaattacaactgctgtgttccagaacaagcacatcctgttggacttcattcacatgatttgcatagattatgagatgaccatagacaaaccactagcatgggttgatgataatggcaaacgcttctttccagatttatctgctgggctctacacatctaaaccatctcagcatgagaatggtgaagctgatgagtgtgatggaacgcctacaagtgtagctgaaagttctagttcggtatctgttggtgaagtagtttctcatggtaagaggatcaatgatattgcagaggacaacatgagagcacataacatattgtatgaagctgttggtgaaaatatttcaggtccttcattccatttgaatgaatattctagtggaaccatacaagctactggcaagccaaacgattgtcgacgtattgattcagctgtgcggaatttgttgctcaaaggattaggtcagccgtttagtgaggaagatattattggtatctatagaacaccactgctagatcagcgagggcaagttcgttgtggtctcttccagaaggagatcgaagagaccaggagtcgtcgggggaatgcaaatgtacgttatgcttggcttccttgctcaagatataccatggagcagatggcaatgcggggtgctctggaaatcgcgaagcctcataaggggtccatttgtggtgttgggacttgtcttgctcctgcaaactgtacaaattcatgtgccagatattctgattttcatgaagatggcatcatcagaatgatgttgtgccgtgtaataatgggtaatgttgaggttgttttgcctggatcaaagcaatttcagccatccaatggaagttttgataatggtgtggatgatcttcaaaatccacagaattacatcgtatgggatgctaatgtgcataaacacatatatgctgaatatgctgttattgtccaagcacctctcgtgaccaatgaatgttcgggcttgaaggatagcgtgcccaacatatctgagatcataagttctggttctcgagacaatctaaccaaggaggataggttcgcgccttgtggtgtcgaacaagaagcacctaggctggggcgtgctccaagggccccctcctcaccatggatgcccttttcgatgctttttgctgctatttccacgaaagtgcctcgttcggacatggagttggtcatcagatactatgaagaattcaagaggaagaggatgagccggagcgacctggtggtacggatgaggcaaatagtcggtgataagatattggtttctacaataatgaggcttcaccaccagaagaagttgttgcttgtagaaggaagctaacaggggtggtgatg

SEQ ID NO: 25793 - DNA, 803 bp, Zea Mays
tgacacgatcagaaagaaggttatgtaccaaccagcattccagcaatttatgaactattcatcaccacatggtggtgatcccaatgcaaacacgaactcaactacaacacgaatagctgctgatcctgatacacatcaagatttcgagccaaagagcagaatttcagacatgactttgcatgacgctattgctcaggatatcaaggagaacccagtcttgatctacatgaagggttttcctgagtctccaatgtgtggcttcagtgcactggctgttaaggtcttccagcaatatggcgtccctgtctgtggtagagacattcttggggatcttaagctcaaagagtgtgttaaagcccacactaactggcctacatttccacaaatatttatcaaaggagagtttgttggggggtctgacatcatattaagcttgcaccagaagggtgagcttaaggatcttcttggggatattgcacaaagagacgaacaaaaagtgcatgctcacgattcatgaagcaatcaacaataaggctgtaaaatggttatacgcgctgctgcctgctggtgttcaaacgggtggtgtccaacctccgccgccatcagatcaacccgctcccttttaacttttatccctgtttgattttgtttgtcttgacttgtttcgatcgttcgcatttctcctcactttggtgttgtttggttcatgggcagagacgacgtaaatgacaatgataatgattcacagcggtaataagtttgaatagactgatatttatttttagtgtgatatcggattatgg

SEQ ID NO: 25794 - DNA, 2556 bp, Zea Mays
gctttgcttccgtacaaaaaaaagttagaatcactctctcgagagacagagagagtataaactaacgcctaccataaatacaaaataaagaaagacaaaaaaagaaaatccctattcctcctcagcataccccttcttccttcgtccccattgatccccttcccccctccactcgtctcccaaatcgccagcgagcgccatgccgccgcctcccctgccctcgccgcccctgaccggctgacccgacctccccactgtctttcccttccacctgggcgccacagcgtttcccttcccgtcaccacgaaatcccggagggacgaggagggagttcgtcgcctgatcgatcggccgatccacgccgccggcctcccaatccttcgctgccgccatgttcaacaagataatcaagaggggaaaccgcaagggcgcgcgcggggacagtgcggaggtcgccgcgcgccccgcagcgccctcgtcatcctccgggagcggcggcggcggcgcggggggagccgcgcccgtcaccgtcaaccacgcctcccgggccacagcgccttctccgtcgtcgcccacttctccgcacgtcacgccgtccgcgtttgcgaccaacccggcggtgggggcggcgtcaccgccactcctcgagcctctcccgctcctccgcgacgtcgccgccgcagaccgtccgggcctcatcctccgcaagctccgcctcgtcgcggcgctcttcgacctctcggactcgctcaagcacccgcgagagaaggaggccaaacgccaggcgctcctcgagctcgtagattacgtgcaggctccagctcaggccgcgggcgccaacgcgcccacgcgcctcccggaccacgtccaggaggcgctagtccttgccatctctgccaacatcttccgcccgctgccacccgcgctgcacgagtccgccgccgcgatcgaccccggcgccgcgcccgacgacgacgaggagccatacctggacccctcctggccacacctccagctcgtctatgagctccttctccgatacgttgtttcgcctgacacggacaccaaggtcgccaagcggtatgtggaccatgctttcgtcctccgcatcctcgacctctttgactccgaggatccgcgtgagcgggaatacctcaagaccgtgctccaccgcatctatggcaagttcatggtacaccgaccattcatccgtaaggccatcaacaatgtgttctaccggttcatctttgagactcagcgctacaatggcataggggagctccttgagatccttggaagcatcattaatggatttgccttgccaatgaaggaggagcacaagctattccttgcccgtgctctcatccccctgcacaagcccaaatctgttgtgatctaccatcagcagctatcctattgtattgttgagttcgttgagaaggactacaaattagcagatactgtgattaggggtctgctcaagtactggccagtcacaaattgccagaaggaggtgttgtttctgggggagcttgaagaagtgctcgaggcaacacagcctgcagagttccaacggtgcatggtgccactgtttaagcagattgcccgatgccttaacagttctcacttccaggttgctgaacgcgctttgttcttgtggaacaatgatcacattgtaagcttgatagcgcaaaatcgtggtgttatatttccaattatatttgaagcgctcgagaggaatatacatagccactggaatcaagcagttcatggtctcactgcaaatgtgcgcaagatgtttctggacatggacagtgaactatttgaagagtgccagcagcagtatatggataaacaagcaaaagccaaagagatgcaggagcaacgagaatcagcatggagacaattggaagctgttgttgctgccaaggctgctggggatgacatggttttggtcaactagatgattgctgctcacttatttcttgagcgcggtgctagttgcggtcctcttatatcaactttgttgacttgggactatcagatccatgttccttgcatcagtgaaaaacatgtgggccgagtttgaacacattggtggccgcgacagccaatccacgcagaatttctgtgtctagtgaggtcctgctatggttctgagccgttcctttattcagcccctcctcttctgttgcgttaatttatgaacaattggactcttgtattaatccttcattgtttgccctagtttcgtacccacaattgggaaaattcaagtagtgaaaatgactcagctagattgtaaggtttcttttatttgtatttacttcttttctccttgggagttatttcagttcatgttgttgtatggaggtaacagtacaaatggcagataaaagcctttttaacctagtgtccggcatggtagcaatacaatgtcagatcttctgtaggaactgtttcgacgttgctgtgattgtttagcaatataacggctcactctgtggtacgctggattaagttctggttacatgttaattcgtgggtaaatggcag

SEQ ID NO: 25795 - DNA, 1451 bp, Zea Mays
tcctcatctggcttccgcttgggtccggtcagcgccaagctgtgcgctgggcgaaacttccggaagcttcagggtttatccggcattccgcttcccgcgacggcggcgcgaccggttcactggccaattcgttgcttcgtggggctttggagtttggagccaatcttgccccttaaagtgtcggtggcagcgttttgtgatcatcatgagctttgtgttccgagggagcaggaccgacatcgaggccggtggcttcccagggttcgctcccgagcgccgcgccatgcgaattcatgcagggagcaggccggtgaatagcaattccttggcttttcttctaactgttcttgttttgttcatggtactgaactcgcaccagatctctcccaatcttctgctttggcttgtcttgggagtcttcctaatggccacgagcctcagaatgtatgccacgtgccagcagcttgctcatgctgcagctgccaacagttttctcggccacactgagctgcgtgtgcatgtaccgccgtccattacccttgctacgagaggccggttacagagccttagacttcaactggctcttcttgatcgtgaatttgacgatttagattatgacactctgagagcattggatgctgacaatagcccacatgctccatctatgagtgaagaagaaataaattctcttcctgtcttcaaatataaagttcaggcacaacagaggcatccccctgcccgaaaaagtgatgggccatctcagctatcggtttcttcaactgggtccggcaatgaggaaaagcaggatggtttaaaagcagatggaaccagcaaaccttcagaggatgaactaacatgtagtgtttgcttagagcaagtcacggtgggtgatctgttgagaagcctaccatgcttgcatcagtttcacgtaaactgcatcgacccatggctgcgccaacagggtacatgcccaatctgcaagcaccaggtgagcgatgggtggcatgctacaggcaacggtgaagaggatgcttcttacatggtgtgagtagctgactaggagtaggccatagctaactaccagtagctgctaactgaatccgtggaacatagttttcgaggtgacgggttggactgatctagggatgtgatctaatccctttctatcctaacaaaaccgcgtgtggaaacagttgtccagtacggttcttttacaggtaacgctcatttcaatcattctctgtaacggggcgtttggatcccttcattttagaggaattggaattcactcaataaagtaacttatttagtttggaatttgacattccaccactttctaaagttcagatataagtctatctcaaattcatggggtggagggtgggaaataattttatgcattactagaattggtttctaatctataacttacatgacactcttcgtctcac

SEQ ID NO: 25796 - DNA, 2855 bp, Zea Mays
ctcaaaattccatccaaatccatccgcctcaccgcctgaggcctgagctcaatcgcacccaacccaatacatcccgtcgatccgcgtaggctttgctcctgatttgatagattctcagacctcgcgtcgtcggccgatctgccgcgccgtgttcctgccgccgtgtcctggccatgacggcggtggagctcaggatcgggccgctagagtgggcgatggatgacgagagcccaggtgtgggcgacgaggatggcaaggacgaggactgggctctcgatatggagaggaagggaaggggaaagcggaagaggtccgctcctcggagacgctcgggacccaagcggcgccgcgccgctgcggcgatggcgcccgcgcccgcgcgatcacagtcagagccgtgcccggggacagccgagccttcgccagaacatggcttcaatgctgctgctgcggcggcgggagttaaggaggaaaacggggtgaggaaggaggaaggggagaacgtggctccgagcaccagtggcagaggaggaggcggcgggaggaagccgggggctaggaggtcgtgccaccagtgcaagagggtcaagcgtctgaaggagatggtcaggtgccagtgctgtgacgagaggatctactgcgacctctgcatcaggaacaggtacgcgatgatgtcaccggatgctgttagagagcagtgccccttctgccgtggactctgcaattgtacgcgatgccttaacaaggatagggataagcagcttggacccgagaacttggttttgaggaaatgcaatagcaatgaatcatctaaaagggaaaagaggcccacttctgcaggtgtgatatcaccccaggctcatagtgcagcaccatgtactaaagaaattggactctcctttgtgactacaaataggatgaataatgtgtctgccatgtgggccaaagtggatacatcagatgtgagggctgaggaggttgaccctgaaacaaaacgcaaatacgcaagctacctattgcactacctgttgccttgtttgacacaactcaacaaggaccagatggaagaaagagaagcagaagccaaaattcgaggattgcaattgtcggaattgattgttgagaaagctgtctcctggaatgatgagagggtgttctgtaacaattgcaaaacgtcaatatttgatctgcatagaagctgctcaaactgctcgtacgagttgtgcatcagttgttgtaaggagctccgtggaaattttcttaagatcaattgtcaaaagggactggtacctgagcataagagtagaggaattgactatatgcatggtggtgattgtaagccacctaatctagaaaatgacagagaaacaggtttgtctagttaccaatctaagtctatcaagtgggaagctgatcctggtgggaccatttattgccctccatctgaactagatgggtgtggtaaccatgttcttgagttgaaacaaatttttgaaacagataggttaattaagcttgaaatggaagcattgcggctgagcaaccagatagaaccttctgatatttccagtatagatatatgtgaatgctcatgttcagctaataatgtaagttcaaggaaagctgccaccagagagaactccacagataacaacatatactgtccaatatcagataatggtgggccagatgatctcaagcacttccaaaagcactgggtgaaaggagagcctgtaatagtgcaaggggtgctcagtgaaatgtctgatttgagatgggagcctgaaaaaatgtgggctgaagtacatgacgccaatactagttctgagatgaaaagtgtgaaaaccactgattgtatgtcttgttgtgaggttgagataagtgccaaggactttttcaatgggtattatcatggtcggatgtatcataatctttggcctgaaatgcttaaattgaaggattggcctacttcagaccattttgagaatattttgccttcccatggaaagacgtacatcaattctttgccttttcaaccatacacaaatttgaaatctggtttactaaatgtctctgcattgcttcctggtgacgtcttaaagcttgacatgggcccaaaatcatatatagcttatggctatgcagaggaactcattagaggagattctgttacaaagcttcattgtgatttgtctgatgcagttaatgttttaatgcatactgccaaagttgtgccttctgaagaacaaaaagaggggataagagatttgaaaataaggcatgcagaacaagataaaaaggaatgcttggggaattcatcaatagatggaaataaaacaagcatggagcatgctcatatatcatcagtttcctgcgaggatggtggaggtgcactatgggatatttttaggagggaggatgttggaaagctgaaagagtacctcacaaaacattccaaagaatttcgccatatgtactgttgtccagttgaaaagatatttaaccctgtacatgatgaaacattttatctgaccaacaaacacaagagaaagctcaaggaggagtatggaatcgagccatggacctttgtgcaaagacttggagatgcggttttcatacctgctgggtgtcctcatcaagtacggaatctaaagtcttgcaccaagatagctctggattttgtatcaccagagaacattcagcaatgtctcagcttaaccgaggatttccggagacttccagtgggccacagggcaaaagaagataaactagagactcggtttggacttatcctaactgcttctatccgagtctccagtgccttgatcggcggtgcaacaaccacaatggttgcg

SEQ ID NO: 25797 - DNA, 3078 bp, Zea Mays
ctcgacctcctcccccatgaccacgaccatgcgccgtttcaacctcggcacttctgcagaaccgtccacgccccgcatgcccgcatcctccacctcttcccgtccaactccgttcccacctggcctagaactgcagacggccaagactggcgatgcttctcagatccatgctcatcaccgctcgctcacctacctcccagtacctcctccttccgtaataacctggcgtgcagcgtggtgctcctcggcaccgccgccacctaccccaacagcgggcgctctgacaacggcgaccgtggcggtgcaggtgtaggggctggggagtttgtgccctgccggatccagttgatcgcagaggtttccctcgctaagctcttcgcagacttcgccagcccagtcgacacgtctgcgctgatgcagcagaactcgcctcccaccttgtccaagtcgcccgtgccggagagggagaccatcccgccgcaagagacgctaggcggcggcgacgacaacatagatcccgtcgatccacgtgagagtgttacaggctccgaggaacccggcttgccagaagctgccgttatgaggaaggacatggcggcggtttccaacaaggatggcttgcccaccaggaaggatgacgacgaggatgcaacgtccgagcccaccaccaagccatcatgatgagtttctatgagcactagctgtgctgagttcatgtatgaggggcaccctcctcgagatcggcatgtcctactctagggcctccagtgtgcagctccttggaaaggaggaatccaatgggaagcggtgcagatcgaccaagcgcggtggcacgaaggacaacccgagaatggtggaaagaagcaggggaaggacaacgcaacgaagcccccctagctgcccaaggactacatccatgtctgggcaaggcgtggcgagcaaggcatggcgaggcgatggactgtcacaacctcgtggagaggaccttgcaatggcgaatcaagggatagttacacatcgaggcttttcgaaatgctactcttctggctccctcctggctaagcagttgaagaatgtgaatgaacacaaatgtcaaatctatggtgacactgtcgggttcttagcaacaggcgatatttttgttgcgtgcaacgaatgtgccttccctgtgtgtcggtcacgctatgagtatgagcgcaaagaggggaatcaatgttgtcctcaatgcaaaactagatacaagaggcacaaagcactggttgcactgtacctttaccctttcttgaacactgtctacaaaacaagagagtatgagttcttgaggcttaccagcctgggtgtgatcgatgctcttgtgaagccggttgttaggaagtgcaccgaaatgttgagtcgagcaatttgcatatctggcggcgatttttatgtacgcaggtttcataaggatggacctattgtttggaggttgttggctttatctccattccgacgtctgtcaaagatggatgaaaaagcaatcattttaccatatagggatacctcacttaactcagaggaacctatggctgagatctctagccaaaagattcagattgcagtcctggacatgatcgctgcaatatcttcgaacaagagaaatgttgttgcactagaaagcgtactaaagaaggtctgtggccttgtggtaggcattgcctacagtagtttgacaggtttgcaggaagctactataagggcattggcaggccttgcctgcatggatgctgatcttgtctggcttctccttgcagatgtgtactactcactaaaccaaagggaatctttacttcccgaccaagatctagccctggtatcagatcttttgccccctcaagtgtcttcgagagaatacctctttgtacagtatggaggtgagggtgtcaggtgtgatgtagacccctcatctgtttattatgtgttcagaaggatgcagggtgtgtgatcttgtgcgacctgaaaatcaggttcctaatactgtgtatttgtaatcttgctgagtttttttggtcatgctagcaccctgtgtcacacattgaatataatatcacctgctacaaagaatggtaaactttttcatacgtgttctcgcactgaaaatcatcaaggttggtcacatgtctgaagaatgattatgacaagtctttaccactttgaccataattatattaaggtagaagtagtgtgctttcttcattccgcatatccactattaaccttatagatatctgtacattgtcgttgtaccatatgttttggtgaatctcgtctaacctcgagtacccttgaaatttttccagcaaacatcaggactcatgatgacaatgaaggatgtgatgagtttgtgtctgttaaccatataaggttgcacgttaagcatgcccctgacttgccggacgagcagcaagactttgggacctagattggctaaggcactaagaatagaatagcttttcaagaaaagagagacaacaactaacactgtactatgtaggggtgaaatagctagattaagataataaaatttatatatagctaggatcataaatggattacgaaacatttttatcttaacaatataacacatgtttatatataagttattatagtattatatatttccgttgcaacgcacgggcactcacctagtaagcaaagaattcaggggtgtgatcatttttggccgtggggacactccgaagcagcatgtggacctgctgcaccagcagctgcttcctcactcaggtatttcattccgtccacaacagtacagcacagtgcatcgatcttgaaatcaaaatccaacagcgacacaaaccgaatataatcgacaccaccgctcgctcacgacgccagggtggtgctggggcagttgtcgacgccgcaggccagaacgtcgcggtagtcgcgggagatggtgaagtggtcgtgcacgctgccatcccggctcttcttgtactccaacagcagcctcgtgtggttgaacgccgtcagcttcacgaacccaaagtcgcggtcccgcacgtggctccatcgcgcccg

SEQ ID NO: 25798 - DNA, 175 bp, Zea Mays
cacaatgttttttagtttagccgatgaattaaagtactgaagcattagcgatatacactggtaaaaattcatttggatagagcattgaactgatatttattgaacttggtccttctgccctcaaacaaaatcatagcttatcatttggtctacaatgaaggcatgtcggttttct

SEQ ID NO: 25799 - DNA, 1894 bp, Zea Mays
cgacgtcttgtgcttccacgccggatgccacaatagacaagcatattaagactgtcatgtctctcaatctctgcccatacttgaagccaatctggctgatcacaaaagacagtcatcaccctttaccgcacgtagcagcccagtattcgagattaaatcctgaatttgattgttaaaagatatcatcatatcaacgaagctaggccacaagactagcctgatacactgtgatgcctgcaccacttaaggaagaaaggttcagattgtgagacaaaggatatatgtaccatatcactgctcctctatcaagcatcagttctcattatgtatatagttttaccattatgacatccattttccttatcaaatgaatatccattttatccctaggaagaatgggataactgttagtattaattaggtatgtgatattcgtgaaaggcactgtgactttactacatgaatatgctcaaatcactttaatataaaacccttcatataacacatggtaacagaactgttacttatatttcctctaaccattctagacgatttaccctacaatctttcagttccttcattaatacttttcttttcaattcatgcctgtgttcttatacaacacacaaatgactacttatgttttatagctccgtctagtttagaatcgtagaatttcctgcccgtgcaagcattagattgttttttggattggttaactaacagttatcgataattatttgttgtagtcactgttgttttcttttttcctttttttacttgattcaaggactgctagtggccgaagggcactgcctcctccttttgcttttacgtgctgcaagaccattgttatgtatttcatgtttattattacttcgaatacggctagaatacaatgttttaacaaggtatggtgatggattactctcggttgttgattaatcttgtagcacgtcctttactaaatattgtgtttaaatggcgaaggatgatggagatacaatgaacacgaaagtcattattatttttagccttggcgctatatgtttgttagcagaggttacatgattcttctttcggaataggcggaaaaatgagagccttcactgttgtttatttagtagaggttgagatcgtatttcaaattattaagaacactattgttttagattctttcacatattcatacgtttgaaaaaaaaccgcattctccatgatgttttggtcatagagaatgtaataaaagtccattaaatagcattgatactcccatactatagtattttcctttgtgttgaggattaatgcaaccacagtgttgtggtttgaacactaatcgagaaggcctctttactgttgtctaggtcagttataactttcatatatgtgcttccatacactttaatgttagtagtacaattgctgttagcagattaaaaacttagttaaacatatgcgtactcacatatttattatttctctttacatcaaggattcccatggacatgtggttgtccattacacagatgttgatacaaatgttcagctcctttttaggtaccgttgctcatgttgcagcccgaggttgtagctacacaggaacacaaattcagatataaacagtttcatctcagatgacacaacaacagccgcaatattttgctttgacaatattgctaaacatattcttggaaaaccttgtgaaccctgatgtcgtgaacacctttatgcagtacatagctaatgtatttttatgatattaatcatgcccctaggacatgttgctacaacagacccttttgcatgtatgtataggactataggtgatagatcgatatcttaggctactaataaatagacttgctagaaacgtacttatattgatgagtac

SEQ ID NO: 25800 - DNA, 2831 bp, Zea Mays
cgggatccgctctccgttcgggcgcgagatccgccatcccaccagcaatggcggcggggatcgccggcgcggtggtggcagcgctcctgcttctgtatccggccagggcagcggcagcggcggcggtgggggaggggcggcggttgcacactctgttctcggtggagtgcggcgactacttcgactggcaggcggtggggctcctccacagcctccgcaaggcccggcagcccggcggcgtcacccgcctcgtcagctgcgcggaggaccagctcccgtcctaccgcggcctccgcatcggccacaccctccaggtcccctccttcagccgccacccacgcaccggcgactggtacccagccatcaacaagccagcaggggtagtgcattggctaaagcatagtccagaggccgacaatgttgattgggttgtaatcttggacgcagatcagattattcgagggcccattattccttgggaactcggagcagagaaagggaagccttttgctgcttattatggatatttgaagggctgtgataacatcctagcacagcttcacactgcacatccagaattttgtgacaaagttggaggaattctagccatgcatattgatgacttaagggctttagcacctctgtggctctcaaaaactgaagaagtgaggcaagataagtcccattggtcaaccaatattactggcgatatatatggcatgggttggatcagtgagatgtacgggtattcatttggtgctgcagaagtctacggcacaagataaatgatgacataatgatctacccaggttatactcctagacctggcattgagccacttatcttgcactatggtttgccatttaaagttggaaactggtcattcagtaaattagaacaccatgaagatggaataatttatgattgcaaccgcttgttcgatccacctccttttcctagagaggttgagatgatggaatctgacccaaatataaaacgtggcttatttctaagcatagagtgcattaacaccttgaatgaaggactcttgttgcatcatgcatctgctggatgccctaaaccacagtggtcaaaatacctgagttttcttaaaagcaggaggttttcagagcttacaaaaccaaaatactggaagggtgaacaggttgacagcataatgaccatgcaacatgttgcattgtccaaggcaaacaatgaatatccaaaaatacacacccttttctctaccgaatgttcatcatattttgactggcaaactgttggacttatgcacagttttcgtttaagcggacagcctggtaacatcacgcgcttattgagctgtacggatgaggacttaaagaactataaaggacatgatcttgctcccacacattatgttccatctatgagccgacatccattgacaggggactggtaccctgcaataaacaaacctgcagcagttctccattggctcaatcatgtgcagactgatgctgagttccttgttatcctagatgctgatatgatcatgagaggccccatcaccccatgggaatatggtgcaaaacgtggccatcctgtttctactccttatgagtacctcattggttgtgataacatacttgcaaagatacacactcgcaatccctccgcgtgtgataaggttggtggtgtcattatcatgcatatagatgatcttcggcgttttgctctactgtggcttcacaaatcagaggaggttcgtgcagacaaagctcactatgcaaccaacattactggcgatatatataattctggctggattagcgagatgtatggctactcttttgcagcagctgagattaacctgcgacacatcattaggagggacataatgatatatccaggttatgttccactgcccagggcaaaatacagggttttccattatggtttgagatttggagttggtaattggagctttgacaaggcggattggagaaacgctgatgtagtaaatacatgctgggccaagttccctgaaccacctgatcctgctacgatcacgaaacaagatctagatgcacgggagagggattttctcagcattgaatgcgggagagctttgaacaaagccctatacctgcaccataagcgcagaaattgcccccggctagacaccattagcagcacatctaagaaaactgatcaagtttctgcttctaacaaaattgtgagtgttgcacaaaagtcaagaagtataagtagaggaaacatcgaatccatggacgagggaaggttgaagactgtcaagaggactgcagcttctgtacaacctctacatagatcaaggagactggccaggtcttctaggatgtggataattgctgtatgggcattatcaattgtggtgttcctattagtaatctccatgtttttcactgagcaaaggagaaacgcttcgagatctagggtttctagaagtttaaaggctcatgtctgagtattctctttttctaccgacacaatttctgactatagagcagacaatattcacaaactgttactttgtggacgtatataatacataaaaggattttgccaaaaggttatggtcctgggactgtataggctaacatctggtttgagttatcagaagccaaaggactagaacctttgcgaacgtctcctctcttttgtcaaaacttcccgtaaactgctagcatgtttcggtgccactgctgttgtacttgatttaataggttcttttattataacaatactgtgaagttccatatattatttctttcccttcgtgagtgagttggaaaatgtatgagttgaac

SEQ ID NO: 25801 - DNA, 1003 bp, Zea Mays
ctgaaacaaaaaacattcggggacgcgcctgcttgcttctttccccaaaccccaaaccgcaggtaggaagcaaaccgcacgccccgctccagaacggatcctcatctctcacgttgtcaccacagtctgaatccagaatccaactagtagctccataaaagcggcaatgatccagctgctgttcgtcgtgctggtggcggaggcgtccctgacggcggcgctgctcttcaagacgccgctgcggaagctcgccgtgctagtgatcgaccggctcaagcgcggccgccacgcgcccgtcgtcgtcaagacggtcgcgggcgtcatccttgccctgctcgcttcaacgctctacagcatgacacagatcgccggcagcacgagcgactccgactctggcggcgggcccacccccaccgaccaggtgctcttctcgcgtcacctcctggaggcgtgcctcatggggtactccttatttcttgctctagtgattgaccggctccaccaatacatcagagatttgcgccggtttaaaaaggacttagaggctgtacgtaagcataataaaatgttggaggaggcaaaacatggaaactcggaggaggcaaagaaataccaggaagagattgccactctgaacaaggagatgaagaaactgaagctacaagtccaagaaaagacagaagaggtccatgtttcagaggacaaggcacttgctatccaaaaacaatccgaaggcttgctgactgaatatgaccgcctgctggaggataatcagcatcttcggacacagctgctgtcaattgaccgcaggctttccaactcttcttgaacgaagagtctatttaggggatgctgaagaatttctgtggaagatcatgttaccacccaaagtgtatggcagctacctgcttcctcacttacgggcattcacatgttgaaatcatgaactctgctccatgaggttcccagactattttaaaagttgttattgagtaaaaaaaga

SEQ ID NO: 25802 - DNA, 1323 bp, Zea Mays
gggattatttattgctagatacgtgtcatattgttcagacatggcatcacctagaccatttatgccagtctactactttggtggttggaagctgaatctgccttctacatgaatgctattcagtcgaccatttcatcgaaaatgggcagccaatcgatgctataagactggcacgtactttcggtttgactggcaagtatactccacttgccatcatgaatgattatattgagaatgccaagaaggatgctgaagacatactaagcaaggagagctatacaccagagtctcggaagcaagcgatggcaaagaaggttgatgctctaatatttttatggagtgcaatcgatgggtacgatatggattctgttcagcgtagtagcatcaaggcagaaattacccagctgttacacaagtacgcaaacaagcagcaaagtctggcaggtgttcctgcctccatttcaagttcgcaccagcagcagaagtttcaggaggagtatcggcagcggccaccggtggaacaggagacgcagcagcgaaaggcacatgagctgcagcaagaaacagaagagaaacagcaccaccagcagcggaaggcacaagagacgcagcatcagcacatccaagatcaacaagagacgcagaagcgggaaatgtggcagaaccggaaaaggagaaggcaaaacaagaatcgcaagaggaaacagcgcaggcagaatctgcagcagcagagtaaacgtccaaggctacctccatatgtcaggccaggagttggcaaccagcacgggcagccattttcaggaggtcgattcgcagcctgtgccactaccatacctccatattattggtccatgggatgatcgctctcggcatcacatgccagtgttgccagagtaagtgctcggtgttctattagtaaattgatggtccagaatagaagagaaagctgttcggtgctgattggtttcgcttagctttccgtaaagaagtttttaagtccctgcagtcacttgtgtatatgatatgcacagtttagctaccctcggtggctctgttaacaatcgactttatatgctggatatgcctagtagttactcataagaatagaaaaaaagacagaatagattaaaatctgaacggagtgattactgcatataacaggacctctcagatccctgaacttatctaagaagattgtctcgcagaaaaatatatatatacatgccagtctgtcaggctagaagaaaaacaactccagtctctcagatcactgaagaaaacataccactctatttctccaaagtcctaactgaactcctgcgc

SEQ ID NO: 25803 - DNA, 3164 bp, Zea Mays
ctcctccccctcccctcgactctggggtctggaactctggactcttccaccgaactgccccgctctctcttgactagcgcagtcgcacgctcgacggctcgagtaaacaataaactactaaaaaaatgcgcacaaaataaaaccgctggcgaaccaaaaaataagaatccccaaagctacctctcctgccgctcctcccctctcatgcctcctcccctcgctgccgccgccgccgccgccgttgagagaactaggaccacgggcgggtggagcactggcatcctgcggactcgccgccgctccacgggcgcaggcgctagccgtcgcggggtcgctctgtgagccctggtcggtgctggggggttcggcggcggtctggtagacgggcggtggcgggcgatggcgccggcgaagaggaagcgcgcagcggctgcggcggccgcggcggcggctgccgcggccaagtggaaggtaggggacctcgtgctcgctaagatgaagggcttcccggcctggccggctatgattagtgaaccagaacagtggaagatgccttctactaaaaagaaaccgctggtctatttctatggtactaaacagattgctttctgcaattatgctgatctcgaggcattcaccgaagagaaaaaaagatctctacttgctaagcgacatggtaaaggggctgattttttaagagcagttgatgagataattgaagtttatgattctctaaaggagaaaggtagtaacaaggatgacttggctgctgaagtaaagccaggtgtagaaaagtttgctgataataatgtttgcatggatactgaaaatatggtcagtagctcctatatacaaaatcatcaagagatagatgatcattatgtcactaccaagggtcatgacatgatcaagtctgacaggctttcagtcactataatgagtgacgaacgctgtgttataaattctgctcctgatgagcctactgaaaatgtatctgtacttgatgaaatgagggagatttctttgcgtactaactcattttcaaataagcaaagggatgcacagccacaaaattgctacacacgtagtagggttccatctctgcgaaagtcaaggagttcaataagtgttgaatcaaggaaggctcaaggttctggtaatttttttgatcataccaatttgtcttctattgggtcagttcctaatgaaaataaggaacgctccagtcgtcataggcatgcggatgacaaagctaactcaggttctgtttctatattagataatgtctggttgcattctggcagaggcacttccaaccaacctgtaactttggggactacttgtaacggcagcaaaatgttgaatcctcctgttaaggcggatagtacttgtaacagtgaagcatctgaaaatggaacttcagagacagaattgaaatcaaatggcacatctaatctacccatgaatacagaagtaattttcaggagaataagaaaatcagatagaaaacctgttcctcattatgaagattgtacaacaccaaataaagatgaattacgtgctgagtacagtgaaatcctttcagattctccaaattcaaagaatgaagtatgcaagtcagatggagatgagcacttgccattggtcaaaagagcaagggtccgaatgggaaggtctcatttggaggattcaccagttgatgaagttgatgtttctaataagaagccagagcttacaacaacctcagaccaatgcgataggaatggtaaacctgcaagtcctgtcaatgattattcagctgatcaggtgtccacagttgtaagttctgcttctaatccgtcctgcaaatcagacatgcctatcctgtcaaaggaaggtcatcttccttggaagaataaagaataccacccaaaaattttagcattagatgtggaagctgctttgcctccttcaaaacgccttcatcgtgccttagaagcgatgtctgctaatgtcgctgagaatgtcaagaatatacctgaagtgacaggaccaaatgaaatggctctaaatggctctctgttgacagcaaacaaccattctaataaatctgctgatgcagtagtcacagtatccaataaacctgtaatagttcaatgctctgaaccttctctagacacacagtttaagcatacccaatcaggtaaatgtacgtcagaatcaactttacaaaataataccatccctgattctgcttcagttccatcaaaagaaaatgatatcatgttaaaagaaaatgataccaatggttcctgggtttgtagtgaactagataatggttcctgtgggaaaacttcagccctttgtatgatattgaatcgacccggacttgatgttacacaaaccacatctgtacctgaccggttatcttcgtcttttgagaaagaaagtgaaaatgtggcaacaagcagtgtcaaagagacaaaaccttttggctcagctgtttgtgaggttgacagaagtgcagaagcagaacaaattgaccattcaaacaacaatgtgattagcaacactatacggcatagtgagactattgtagtggattcagtgaacaatgtgggagatacggcaagcaactcttcaatggctactaaatcatccagtatacaatccgatgcagacacccggacttctgaagtgcatacattctcatctctggcgttgaaagaactgaaccatagaaaaattaaggacagaagcacttctccagattcaatgccgatgaaagaacttatagctgtggcacaagctagaaggttttctcgactgacttcctttccagatatcttcctaaatgccaagtatattcctgaaagagccacaaatacacctcccaaggaaggctcacacaggcagttgtcaccctcaaatcggatattcaggtccacctctggaaatgataatgttcattctaggagtccttttgatattatccaacagaagaaattagcagggcatgttgaagccaatgcagcacgaaggtctttcaaagatttcctcagtacattgacaagaaccaaagaaagtatatcacgcgcgacgcgtcttgctattgagtgtgctaagtttggcattgctggtgagcttttgaagagaaccacgtggcccttatttcgtcaacaaag

SEQ ID NO: 25804 - DNA, 1740 bp, Zea Mays
cccgactcgataaacccttctctcgtccgcctccgcgcctcactccctctcctcctctgcttcgtcttccccacccgcggcgcgcagcacacccaaaaccgtaaccctagattgcaagaggacatgaccagcaagtttgggctcgccggcggcatcccggagcggcgggtgagaccgatctgggacgcagtcgactcacgccagtacaagcccgcgctcaagctctgcaccgcgctcctcgccaagcaccctacatccccctacgcgctcgccctcaaggctcttattctggagaggatgggaaagcctgatgaagcattgagcggggccctgaatgctaaggagctattgtattcagacaacatttttcattttgatgatcttacacttagcactctacagatagtatttcaaaggcttgaccgattggatcttgctacttcatgctatgagtatgcctgtacaaagtatccaagtaacttggaattaatgatggggctttttaattgctatgttcgagagtactcatacgtgaaacaacagcagacagctctcaaaatgtacaaaactgtaggagaagaaaggtttttgctttgggctgtttgcagcattcagctgcagtgtagtgtgtttgatttggttgcgtcgctggatcatttgtcacaggtgcattttagcagtggtggtgtgaaattattggcactagccgaagcattgctgaagaagcacataaattctcatagtttacatgagccagaagcactttctctctatgtttcaattttggagcaagagaaaaagtatgacactgctttggaagttctttctggagacttgggatctcttcttggaagggaggaggacaagcttcgtttgcagggatgtcttcttgctcaagcgagtagctatctgtctgcttctgaaatataccagaaggttctggagtcttggatgtttgctggagcatgatgtgaatctccctaaaccatccactggcgaacacacttgtccttcttgctctgttgattcagcattatccaacaagacttctcttgacaaggagctggttgaatctcgccttacaagtgcgttgtcatttgtgcaaagtctacaagaaaataactcaagcgattgtgtcagaggacctcatctggcaaaaattgaaattgaacggcagcggtgcctcaatggaaacccagataatatcaagcttatggaagctttggtgcagtacctccacagatttggtcatttgtcttgctcagcatctgatgttgaaatttaccttcacatgctatccaacaatgagatatctgagctgctagatgaaattactagatcttttgatgcatcatcaatttcagttaacacactgggttcaacaattactcttttcaaggtccaggaacttttgggaacttcattcacaaaaccaacttcagaacttgagggcattgcaaaaagaatggttgataccttttacaaaaacctgcctctatcaaattacttggatcctcaggaaagcatgtacggtgaagagcttctgtcaatggccagcagtatccttgtgcagctatactggcgcaccagggatttaggatacctacttgaagcaattttgatactggagtttggattgactgttcgcaagtatgtctggcaatacaaggttactctggtccatctgtactcttacctgggggcacttcctttagcacataaatggtaatttctcctttg

SEQ ID NO: 25805 - DNA, 2571 bp, Zea Mays
ctttaatgcctccctccccatcactttccagatccagcccacctcttcccttcctcctcctcctcctcctcctcctcccccgcgtctttataaatctcccgctgccgcattcactggccaccggagttagtgcccccatgtcctgacgcggacgcgcggggagcacaccacatgccgacgtgctgtgctgttgcctcatatgatttcgatcaggagctggggattgccctgccactctgctgaaagttttggagaagttgtggtgtttccctgcctattagagtctgcgcttctgtgttcctgatcaactgctactacgcgattgttgtcttctcaatctgtctggccaagcatggctggccagacgtcaaaggcaaaggaagcaggaaaagatgacagagaagaacccggagctgaggcggcgaaagagaagttagtgccgtctcaccagcagcaagagtctccagcttctgtggtggacaaggattcttcaggtgtgtcttcagttcctggtgatgagtcaccggtcctagaaggggattctgttgagttgaaagtggaggaaaacttggatggtaatgggaataaggaaaataaaacgtcccagaagagcagtacaagtgatggctttgcttctgctaaagtgagtgatgggacaagtagtttgaggaagaccagtggtagtgtggccatgagtactcgggctgatttcactgagagtgggaagagcagcatgtgccgtgcgagcaccgccagtgacattagcgatgagagctcctgcagcagcatgagcagtgccaccacgaagccacacaaggggaatgattcaaggtgggaggctatccatgtggtgaagtccagggataaagttcttggactgaatcatttcaggctgcttaagaagttgggctctggtgatataggaagtgtgtacctatctgaattgagtggtacacggagttactttgccatgaaggttatggataagacttctttggcaagtcggaagaagctgcttcgagctcagaccgagcgggagatcctgcagtccctggaccatccatttctaccaaccctgtatactcactttgagacagataagttttcatgcttggttatggaattctgccctggaggggaccttcacactcttcgccaaaggcagcctggaaaatatttttcagagcaagcagcaaagttctacgtagctgaggtgctccttgcattggaatacctgcatatgcttgggattatataccgtgatctcaaaccagaaaatgtcctcgttcgggaagatggccacatcatgctgtcggacttcgatctatctcttcgctgttcagtgagcctaacggtgatcaagtccgcaaatcctggcctagatgcattgcagaggaacaatgcagcgtactgtgcccagcctgcttgcatcgaaccatcctgcattcagccctcctgtgtagctccaaccacttgctttggcccccggttcttctccaaatccaagtccaagtctaagtccaagcccaagaaggagaagtcgaagcctgatggtccaaaccaagagaacctcttcccggagctgattgctgagccaactgatgctcgctcgatgtcctttgttggcactcatgagtacttggccccagaaataataaaaggggagggccatggaagtgctgtggattggtggacctttggcatattcttgtacgagctgttgttcggcaagacccctttcaaaggttccggcaaccgggctacactcttcaacgtcgtgggccagcccttgaggttcccggagtccccgatagtgagcttctctgcgagggacatgataaggggattgctcgtcaaggacccgcagcaccggctcgggtacaagcgtggtgctaccgagataaagcagcaccctttcttcgagggcgtgaactgggctctcataaggtgcgcgagccctccggacataccaaagcccctcgagctcgagtgtcgcccaaagcaagtgccatcagcaaacggaaaggtcgcgccggtcgctaaccaaaagggcccagataattatctagagttcgaattcttctagttttttgttttgtttttgtttttgtgatttctgaactgcaagagtgcgtctgggctgatgctgtgaaagaaagtgaaagatgataacctactctaggcatgcgcttcgctggatttttttcttcttctgccattagactgtactacgctcgtttcaggatatccgagttatttttttttctctgttgaactgcttaactctaaggtgtactcaatccatcatgtatgttgcaattttcagaacctgcctatggtacttgaaatgtatttcagggctgtgttattgctattgtaactttgtaattgatgcctcctcttagaacatgtcttcctctacactacaaacgctgatatctgaacatggcattgctacttatctttattttattccattttagtctctaaatagctaaataccgaaacaaaaagtctaaaatagagttttaattttcatatttataaactaaaatagaataaaatagaggg

SEQ ID NO: 25806 - DNA, 578 bp, Zea Mays
gttagtgtttttatagggctaaaaaatattgcgcgctgcacggaggcattcatccgtcctgcgattttcgtttcctccgtgtctccgttcttcatcctgcgttagagaacaagacgaggtcgaggacccagacgcagacgcacacgcagcgcgccttctccaccgcgaagtcatcgttccgcgctgccgccgccgccctagcaaggtgttggattctgtgttgcggcttcggagtgtcattgctacccttctcctgacaacatggtttctttcgagatgaatgacctcaagaagattgggctaggcctaacaggctttggaatattcttctccttcctgggaatcattttcttctttgacaagggtcttattgcaatgggcaatatcctctttctatctggtttgggtttgacaattggtttgaaatccactatgcagttcttcaccaagcctaagaactacaagtaccaccttctctcagactattttctaaagaacccctgcgtcttcacagaataatgcgtgctgtcctcaggtgggattgcactcagccttagatggtggatctgatgaacaag

SEQ ID NO: 25807 - DNA, 1815 bp, Zea Mays
ccgcatcaccgcctcctccttagcagccctaagagcaacaaccaaactaggattacaaccatcaaacacacatattcctatgcttccagatggtctaggctcccaagatcaccaaagaatttaagccttttctcacttgatcatccacccgagagctgctattcttccatcaatactaaaggccaaatcctcatgtgtgggacacaagtcctgcagccctacacatctaaggaactcaaaccagaactgtttggcaaaaacacaagtgaccaacagatggttgatggattctgcctcctggtcacataaaggacattgctttggatggtctaatccacgcctctcaagcctgtcggttgtccaatacctgtcatgttctactaaccaaacaaaaaacttgcattttccgggaacccaagatttccacaccctttctgctggcccaaaagcaactgaacgtctgaaccattgaagagagctctatgtcgagctcgatgaatagtcaccgaagctgtaaacttccacagatgccagtcttgcacaccaggctgaatcaccatatcctcaggctcctcacagagatccaagaaatcagccaggaccctgatccagagcgcccctcttaggtcagctaaccattgaaagttagggaaagcatccttgactagtctcttgttagcaaagcgactgggcaccacatcaaacacggcaggatcaatttctttgaagcatttccccctcagccacctgtccttccagaagaaagtattggcaccatctcccagctcggtgataactgccacagacatcaaattctgaaccatggcacagtaacataaactaatgatagtatacagcaacatatatctactaagatcaacgatttatgttgcaacattgtactgaaaatagtttttttatgcatgatctgtagaaaaaaatatttgaagctctggttttctttccgcctttctgaatttggagctacttggtacaggtatgctatgactggccagctgacacaaaaaagtgatgtctacagctttggtgtggttcttttggaacttttgactggaaggaaaccagtagatcacacaatgcctcgaggtcaacaaagtttagtcacatgggctactccaaggttaagtgaagacaaggtgaagcaatgtgtagatcccaggttgaagggagaatatcctccaaagggagtcgctaagcttgctgcagtggcagctctatgtgcacagtacgaagcagagttcaggcccaacatgagcatcgttgttaaggcgctttcgcctctccttcaacaaagacctgcaccaaccaccgaagagccagctccacaacctgggagctgaaaccagtcacatgtgatgggacccctaggcataagccatctccgcaaccattcaatcagcacattctataaatcattgagagtattttgggtatttgttctgtagcgttctcagttgggtatagcatacatgaacttgcccctgctgtttgtggccacctagttcgtggcttgatgttggcgccgcacaatggtatatgaagttggttcgaagtttttttttaccttctctataccaataccaagtgaccaactgtttgtaggttttcataattcgcggcttgaagaatagatgcaggatggtctggatttttttttgtccgtggcgtggtgttgctgcctgacctacgtgatgtacttcctctcttccaaatcccaattcaccttttcttgttctaagctagaattatcaaactttgacttgtttatataaatatatttatggacgtctacaa

SEQ ID NO: 25808 - DNA, 912 bp, Zea Mays
acaaaatcttttgtacaggtgaacccacacacccaccagcttaaactatgtgactttggtagtgcaaaagttctggtcaagggggaaccaaacatatcatacatctgctcgcgatactatagggctccagagctcatatttggtgccactgagtataccacagcgattgacatttggtctgctggttgtgttcttgctgagcttatgctagggcaggtccttggtactccaacaagggaagaaattaaatgcatgaacccgaattgcacagagtttaagttcccacaaatcaaagcacacccatggcacaaggtattcaacaaaaggatgccgccagaagctgttgatctggtctctcggctactccagtactccccaaatctgagatgcactgctgtggaggcgcttgtccacccattctttgacgagcttcgagatcctaatactcgtcttccaaatggccgcttcctgccaccccttttcaacttcaagcctcacgaattgaaaggagtcccagcagacattgttgcgagattggttccagaacatgcgaagaagcaatgctcttatgttggatcgtgagatgaccgtgccttgggactggaacctgaggttgcaatcgtgcatttcccctggtatgttggatgatcttgaggcatgcgagcctgtcgttgaagatgcaaggttacctactttacgacgtacgccaatgcgacctgtgtagctgtgagtagtctaatgttgcagtgacatgtaatggcgcacccccgtcctactaacagatgcttactggagattgccatagctgatcttgtaatttgttatagggcagtatgaatatatttatggtagcttgaatctatttgtggattcacttcgtttttccatgtttccttgtctccagacctggac

SEQ ID NO: 25809 - DNA, 185 bp, Zea Mays
cgggttaggggttttcaatctccaacaacaacaaagtcttgaaactaagaaacattataaaaataacttttgaaacgttaaaattttaatggtggataatatgcaagacaaataacactacctgttgtgcggccttgaactgcgcctttatatcttctctatgagccacaacctatttccaaaaa

SEQ ID NO: 25810 - DNA, 3006 bp, Zea Mays
aatggaaccagtacctctattccattccaggctgcttcttcctgcgcgattcgacacggactcagaccctcacacgcctcctcaccggctcacgacgtcgccacctcagatccggcgaccgatcccctcctcctcggcgaggcgtagcccgcagagccgagccggacaacacagccacgaccacgaggcgtcgtcgcggagtagtcggagccgtttctgctgcccccctccttcccgccaagtttgtcaagttacgtccgatgctccagacatagtagaaaaccatgggagaagttagtgatgacaattccaacctgtcctttctaaaaagaatcgcaacaagtgacgtaccgctgttgaaagagtatggtgtaaatggagttgtcgtcgctctgcttcttgctgtagttactcccgtcttgctttccatgatgtttggcaagaaaacaaagcagagggcggtgcgagctaatgtgggtggagaggaaggatttgccatgcgaaacagtaggttttcctccttagttgaagtcccatgggaaggcgccaccacgatgtcagctctgttcgagatggccagcaaaaaatactctcgacggaggtgtcttggcacgaggaagctaatcaagagggaatttgtggaatcttctgatggtaggaagtttgagaaactgcaccttggtgaatacgaatgggatacgtacgccgaggcatttaaccgcgcatgtaattttgcttctggacttgtcaagatgggccacgacctagatagtcatgctgctatcttctctgatacaagagctgagtggatcattgctgctcagggatgcttccgacaaaatttgacggttgtaacaatatatgcatctcttggtgaggatgcattggtgcattcactaaacgagacacaggtttcaactctgatatgtgattcgaagcaacttaagaaaatacctgcaatcagctctaaattgcagagtcttaggcatattatctatattgaggatgaacctgtcgaggctgagacactgaaccaagtgaagcatctgacaacattgtctttcactgaagtagaggagttaggcaagacatctagtgttgatgcaaggttaccttcaagctctgatactgcagttatcatgtatacaagcggaagtactggtcttcccaagggtgtaatgatcacacatggcaacatggtggccacaactgcagcagtcatgacaatagtcccaaaacttggcatgaatgatgtttatctggcttaccttccattggctcatgtctttgaactagcaggagagactgtcatgctagcttctggtactgccattggatatggttcaacattgactatgactgatacatcgaacaagattaagaaggggacaaaaggagatgtttctgtactgaatcctactcttataatttcagttcctgcaattttggatcgtatcagagatgcagtgtttaagaaagttggtgagaagggtggcctgacaaaaaagctgtttgattttgcatataagcggaatcttgcatcaattgaggggagttggtttggatcctgggcaccggagaggatgatatgggataccattatttataaaccaatacgggcaatgcttggaggacgtgtaagatttgttctttgtggtggtgcacctttatcaggtgacacacaaagattcatgaatatatgtctaggtgtcccagtgggtcaaggctatggtttgactgaaacctgtgctggagcagctttcactgaatgggatgacacaagtgtgggtcgtgttggtccaccacttccttgctgctatgtgaagcttgtttcatgggaagaaggtggttacaagatttctgattatccgatgccgagaggagaggtcgtggttggcggacacagtataacaaaaggctatttcagcaatgaagcaaagacgaatgaagtatacaaggttgacgagaggggtatacgctggttctacactggtgatattggccagttccatcctgacgggtgccttgagattattgacaggaaaaaagatatagtaaagcttcagcacggagaatatgtgtctcttggcaaggttgaatcggctctagcaacaagtagttatgtggagagcatcatggtctacgccgatccgttccataactactgtgttgccctggttgttccagtacgccaggccctggagaagtgggctcaaaattctgggataaactgtgaaggctttgaagagctttgccaaaatggccaggcggttaaggaggttcagcaatcactatcgaaggccgcgaaagcagcgaggctggagagattcgaggtgccggcgaagatcgagctgctgcctgagccgtggacgccggagtccgggctggtgacggcggcgcttaagctgaagagggagcagataaaggccaaattcaaagacgatctggacaagctctaccactgaagaaaagcggggcttgcacccacgcgttcaggagcttgcgctgccaaaacgctgcctggatgcggaatggaacctactgacctgcacgagaccacgagtggtgtgtgtgtgtgtgtggatgtgtgtcggcgtcggtacagcaggagctgcttcttgtgtgatgaaaaataagccaaagtgttggttggaacgatcttgatttgtatagcttcacttaacttgcatgaaccctagctcgaaatcaaaaaagaaagaatctggaggtgggtggttacccggttgccgccagaaagccgatggaaatcatcatctcccagccgttgatgttgaggctgcacgtttcattcgccgatacatatatagttagcagctagctaggacctgtccaggatctgtaggacctgctgatggcaacacaacacaacacaatgcgtaatccctaccatattgagagggcgtccagcgcaacctctgcgttcttcatgtacccagtgagcagcaccagtatggtgttgtaccacagctccaaactgtaaagcag

SEQ ID NO: 25811 - DNA, 1662 bp, Zea Mays
cctcttcctgctgccgcaagtcccaatcattgcctcccccaccaagcccacgtcacttcaccccacccacaccacgccaagtcgccaaggcaaggccccccagcgaaagcaaagggggaagcaaccccccgcaccgcgaggccgcaaaagcaatcgcgaaagcgagcgcgaggcgagtcggccggcgaagggggcggatggcgcgcgggctgcgcggcgtccgcgacgacctatccgagctggggcgccacctgctcgacatcgcctgcttcctgcacccgctcctcaacccggcccacaccgactccccgtccccgcaccccgccgcgccgccgtcaccgtcgctcctcgcgggcatcctctccgacctcgccgagatcggcggctccttccgcggcggcttctcccgctcctcgccggcgcccgaccaccccgcccccgacgcgctcgagtcacagcaggccgcctcgtccccgtccccgcgtccgcctcctcctgctgctgccgaccagatcgcagatgatgtcgtgggagcagcgcgtgccctcgccgcgcggcccgaggcgtggatcgacttccccgtgctcgccctagatgagggttctgtaatttctggtatccaaagagatcatatggaatccattgaaaaacttgtcccagatttagcatctctacggggtaggctctgtccttcttacatggatgaagacatattctggaagatttactttaggttgcttgagtcaaacataaatgagcatagttctgaggaagatatccggagcgtgccaaattctgtacatcacaacaatgagatagagtctgattctccacctcacgtctgtgagatagaaagtgtgaaaagcaaccaagaagggtaccaatcttcggatggtcgtgctttccccaagacaagatctgagcgaagcattgaccaatgggtatttgcaaagtcaaaatctgaagaaagcatggatcagtggtctgaaataccttcagatgtggaatccttcagagaaggtaaaaggtacctcagtagcgaggagctgagtgacgttgatagtgccaacgttgttgtcatggacaaatacatggattcactcctctctgaccggaggaaccttccctacgctagctcctcggtgcgccgggattcagtcagacgaaaacctgcttcgtccgccgattacagccgccgacctccgcagccaactccacctgcatcgctgtcaaagaaggaatcgtgggatgtcattgaagattcggagttcgatatacttgacagttagtaattgagatctttgcgatctcaaggctgtttatccttctattttcttccatgtttccccacacttcacctcgtttgtaaatgtggacgtgcaggtggcgtcagtgatagtgggaaaggactaatgttctttttaccaatatattataacagtgtgtgcatataaatcttctgagctcgcaagctgtgagcctcccaggttaaaagtgtttatatgttggcatcattgtttgtttcagatattttattgcagaacagaaaattgccacctatcattgcgaaaaatctttgtatcattacccttctcacccttatttcattctagtaaagcattgttattgtccagtttggacatcagcattatcgaaagacga

SEQ ID NO: 25812 - DNA, 3005 bp, Zea Mays
cttccactcgcggtcgcaggagctcagctcgtcgtatcttatctatcgccattcgccagccaaaaccccacccgagaggcggagactgcgttgcgtggacggcggactaaaccctaccgcccttcgtctctggtccatgatggggccctcgaccatggcggcgcgggcagcgggctgctgctcctcggcggcgctcgccttcttccgtctccaccccctccgatgcgccgtccgcccggccgccgctctcgttggagggtgctcctctggcctccgcggcggctgccggagccgcctggcgcatagcatcgtggacttggttatggaggagctccgctcccgccggcgcgtccgggtctcggcgaagataggattgcagggcacgaaggaattgcctgacaataagatagtcaagagaacattacagaaaggattgctgcttgaatttcagaaagatcctgagagatctttgcttgctgtagttgaaaggcctgatggaaagaaaaactggatggtgactgatcagaatggtgtcatgtcttcgataaagccccagcaggttacatatgttgtacctggtatcatgaattttgactattcaaaaatagacgaatttcttgagaaaacgcaaaatcttttggacccaactattttagaatgtgcttggatggagctgtctgagaaggataaatcaataacagttgaggaatttgcagagatagtgtatggtaccaaggagtctttggaaagctactgtgcacatctcttgttgtcaagggatgtagtgtattttgtcaaggtagagagcagagattattccatgtaccaacctcgttcacctgctcaggtagaggaactcctacgacggaagcttgctaaagaggccgctgataaggaactggaagaatttgtccatttactcaagtctgccaaagcattgcctatggagtccaagcctcctaaagcgtcatggttggtggaagaaaaagtcaggcaaaaaatcgagtctcttcaagcatatgcagttgatgcatgtgatgatgaacaaagaagactagcaggaaatattctcaaagctatgggattcacgaggacatcatcagctgctctaaagcttcttataaatgttggatacttccctgtgcatgtcaatctcgaccttttcaggtacgatgtccgtataaggtacacagatgaagttttgtcagctgcagaggagcttctggtggacagccctgacacagacatgcatatcaggaaggatctttcaactttgaaagtgtacgccattgatgtagatgaggctgatgaacttgatgacgcattgagcgcaaccaggcttcctgatggtagaataaagggaggcaatgcacagaggaacatcaatctttctaccaaccactacttttccgatgttcccagagaggcttgccatgaattctatgagcttgcagcagggtaaagaatgcaaatctgtaactgtatctgttattttaaacctagacgggagtattgcagaatatactttagaaaattcagtcatcaaacctacttatatgttgacatatgagagtgcaactgaattgctttacatgaacctggaagaagaggaagaactaaggattcttcaagaagctgctaggattcgtgaacagtggcgtcgtagccagggttcaatagacactgcgatgatagagccacgtataaaggtgtcaaatcctgatgatcctgaaccaaatatcaatctatatgttgaagatcaagccaatccagcaatgcagcttgtatctgaaatgatgatactttgcggtgaggcagtggctgctttcggttttgacaacaacctccctttgccatatagaggtcacccccagtccaacacagcagtgtcagtgttctctcatctacctgaggggcctgcaaggagctttgccaatatcagcgtgctccgtgctgcagaaatggattttcaaaaacctgtaccacatggtgtacttggtattcctggttacgtgcagttcacctctcctatccgaagatatgttgacctgctagctcattatcaggttaaagcttttcttagaggtgactctccaccatattcagctggcgatctagaaggaatgacatttattgcgagcatgcatgttaaagtagctaggaggcttcatagcaatagcttacggtactggctgttggaatacttgaggcgacaaccaaaggggagaaagtacagagcactgattctgaagtttgtcaaggatcgtatgggagctctgcttttggtggaggttgggatgcaagttacaacgacaatttcacgtgggaaagtgggagatcaagtcagtgttactgtggaaacagctcatccacgtgatgatatattatcagtcagagaggttgtagaggacaccaaggattctgagtaaatgcatgtgacgatagcttatcagacaaagaggttatagaggacaccgaggattctgagtaaatgcttgcaaagctcactcgcactttgcagtcttgtgttcctctgccgtttactgctgttcatttttgtggcagtgatataggcgatttattaccttggaaaatatctgctgattcttcaagttagcgacttgcgtagcatggctacaatacaaatggtaaaaggactagggtattggtcttggtgccaaagctcattccaattcgaggacgaaatgatgaaatcataggtggttttcattggtatacagaatacagtccgacagttcgtttcttccgaggtaggttctctttgtgccgaacaaggttccaagtgctgataactgggaattttgtatagctgaacacgcatgcaacatttttgtacctgaatttggtacctctgacgttgtcggcacattctgctatatttgaacactgaggtggatgatcgatgtacagaataataataattccaatatcatttccttatatgccctcaattatttaattgtaatatactccttcggttcttt

SEQ ID NO: 25813 - DNA, 2832 bp, Zea Mays
agctctcctctaccagaaccagactcccacgcccccctcccctcgtgtctcaaaagcatagcgcaccaccacgggccacggcaatacggcatcatctccaaactcccgaggggggaccatcaccgctgctgagcacgcccgccgcctgcccttcctcctcccacccgtgccgcagctttcgattcctgcccgcctcattgctacctggtcgggccgcggaattaatgtcgcgcggaggaaatccggtaagctccggcccgattttcaactctcccctccctcatcctcgattggggttgagaaattgaatcaaaccccccacacccacccacccaaaaaagtcgcccttcctcggacgagatccccccaatcagttcttattgtggccgatagattgattgcctcacttgccttccgctcgcttttggggtgctaacctaatcggtgaccctccttgtgtgctcggattgggttctcgttctcatcagcattgacctcagcggctttcttttggacaatgctgctgttttactgcttgtttctaccatctacggccgtgtaggtgtgtccgacacgccacaaaaacttttcgttatgttcagcaggtaaacaagtctagctgaagtgacgattgccagcattgttcgaccgtgcggcttctgtttggctggaaccgtgatggatccagaaaaacaaaatgagatgagcctgatcgacaagagagaactagtatacgaagttgcaagatggcctcaaggtgccatggagattcttcggtgctggacccgcagggaacttcttgagcttatttgtgttgagttgggcaaagagaggaagtataccaatgtcccaaaagctaagatgattgcttacctattgaaattagtttcacggaatagtggaaagaatggacaactcaagaatgataatccgaatgttatgttattagggcaggataacaaagatgaaatacaaatgaaggaatctgatgaacaatcacgaccactcaaaactgcaaactctgactcatcaataagcagagaggcttgtgccggtagttcagtggtgtgcagcaatgttgcatgccaagccacaccaaatgcaggagataaatattgcaaacgttgctcttgctgcatttgcaataaatacgatgataacaaagaccctagtttgtggttggtttgcagctctgataatccatacagtggttgttcatgtggtgtctcttgtcacctaaactgtgctctaaagaataaaagggctggcattgtcaagaatgggtgcaacaagttagactgtagtttctactgtgttagttgtgggaaaatcaactggctaatgagctactgcaggtgtttgcagaaacaacttgcaattgctagggaggcaagaagagttgatgtgctttgtgagcggttgtcattgagccataaaataatacaagggtctgaacgttacaaggaaatagcgagcataatcagctcagctgtgaaaacacttgaaatagaagttggtagtgcattggatcaggtctctgtgatcacggggcgtggcatcgtgaaccggcttacttgtggtgctgaagttcagaagctttgttcaagtacattagaaattgtagactctaaagtggataacatcttggagttcgagtccaataatagtccaaaactcctaggtcctcagccccaaatcctttttcatgagatcactccattttctgtggttattgtgttgaactatcagcatgacatcggtaaggagcagattgatggttccaaaatttggcaccgaagtgccagggtttgcaactattcatcagagcccacatgccacatactgaggccaaacactaggagcctggtttctggtctgagcccttcaactgaatacttcttcaaggttttgccttttagcagcacacatgggtttactgagtgggagacaaaatgcagcacacgcagcctggaccatggcagcagccagtgctcaactcagaactctgagagcatgtgcctcaaagacgattcaatgcagcatcacaaaaaggatttgaatgtgcagaatcaccagagaaccattcaatatgattcacctaagggttctacaaattcaagtgagaacaatttatcatgtgatcggtattccaagcgggctaaggttgcaaggctagatggtgcaagcgacaacgatgaaagccagttgccgccaacttctgaagttttaccatttgcaagctccaactcttctccttccgaagctccaagtaaacctgacttgcttattggcaccccagattcggcctccaagaactatgtggagcagcagtacgagtactgcgtgagggtggtcaggtggctggagcatgaagggcacatggacaatgacttccgtgtaaagttcctcacttggttcagcctgaaggcaacaacacaggacaggcgaatcgtgggcgcctttgtagatgttctcatcggtgatcctgcaagcttggttggccaactggttgatgcattcaaggatgccatctgtatcaaggagaagccctctcaagcacaacagaaagatgcatgctgcaaggtttggcactagaaaccttcataactgttctccatcgctgtgtgacgtaagtttttctggtgactgaaggatgaaatattgaagttatcacctagcaggttgcatctgaattgtgtcgagacagacattgggcacttgagataaacttttaaggttataaaagacgataaaatgctgtagatgcttcattcggcattcagctggaagaccaggcaatctccatccaccagcttctgctggacggcaaac

SEQ ID NO: 25814 - DNA, 356 bp, Zea Mays
ggccgcggcaggagatggacttgatggacatgcgccggccgccggcgccggagaccgacgacatggctggctggcttcttagtggcgttggagcggcgcggtggggagggaaatcttgggccggctagacgatggatctggcgcgcgagtgctccgcagatggttttgaggactgatttgaccttgtgttcttcggttcattggatctcggtgcagttaattcgctgatgtctttgtctgtttgatcatggacagaacagaacagaaatggcctcgcgcattgtactcccaaagcttccatcttcaaatctgccttttagatatagataaaatgcatctcatgtgtgatttgtttg

SEQ ID NO: 25815 - DNA, 3236 bp, Zea Mays
ccaaccggcccttggtcgtggcgtcgctgtccgagcgccagacaagagacaggggagatgaaaaagaggcggtggtggttcgagtgtgaatatgccggtggggagggctctgcctccccaggatacttcgccccccgttccaccgcgagcccttccggcttccgcctctgttccgccgctccagcctccaggatccgtgagaggaaaagtagtagccccatccccaaccggtcctaacccacgggcgttgcttgccaaccacggtatcgttctagccgccggggccgaacgaagtcggggatgtaattgaatccagcgatctttggatgctcgtcatacgtgccaacagcagggtcaatttccctcgaaagagaaggccgaggaaatggaagccggtttcctgtggaaagagatcggtgaccaagccggtgcggcgagaatgtccggtgggaacaagaacaggagcctcgactgggatttgaacgactggaggtgggacgccaacctgttcctggccacaccagcggccgccgcgccatccgagtccatcagcagggagctgagccgaggtcagggggagatcgatttcggcgtcgtcgttgacaagaggcggcggctctcaccagaggaggacggcagcggtgggtgcagcaattctgcggtagcagatggagacaacagtcacgtggtgtgtgttcagagagggcggaacactgaggagacgagacccaggaaaggtgccaattcgagcaccactccttcttgccaggttgacggctgccaagctgatcttagtggtgccagggactaccataagaggcacaaggtgtgtgaagcgcataccaggacaacagtggtctgcatcaataatgtagagcatcggttctgtcagcagtgcagcaggtttcaccttcttcacgaatttgatgatggtaagaagagctgccgatcacgtctggcacaacataatggaaggagaaggaaagttcaaccgcaacctgctgtgaacgggaattccatgaatgaagatcagtctctaagtagcaccttattccttctgttaaaacaactttccgggctcgagtctggtagctcttctgagcaaatcaaccatcctaattctttggttaaccttttgaagaaccttgctgctattgctagcacacatgcatatcaagatgttctaaagaatgcaacttcaatatcatcaaatgatggtaataatgctgcaaatggctctataatgcatgagcaaaccatacggtcaattcctgtcaggagagaatcattagcagaagagcctgcggtgaaaagacgagtacaggactttgatttgaacgattcatgcattgaagaagccgagagccgaacagataaaattgtgttcaaactctttggaaaagagccaaaagattttcctgtagatctacgggaacagatcctaaactggttgtcgcattatccaactgatatggaaagttatattagacctggttgtgttattctaactatttaccttcacctccctaattggatgtgggatgagtttaatgatgacccagcttcatggatagaaaatcttattagcttatccaatgatggattctggagaacaggatggttgtatgctagggtacaggactgcctaacactgagttgcaatggtagtcttatgtttgcatctccctggcaaccggtaattggtgacaagcatcagagactgtgtgtaactccaattgcagttgattgttcttcgtcagtaaaattctctgtgaaaggtttcaatatagttcagccaaccacaaaattactttgtgtgtttgatgaaaaatatttaattcaagaagagacacaaatgctacttgaagattcaactatgcagcaaggccctcaatgcctgaccttctcttgttcctttccttgtacaagtggaagaggattcatagagattgaagactatgatcaaagcagcctttctgttccctttgttgtcacggacaaagatgtatgttctgagattcggatgttggagcatggattggatttagtttcatttgatcaaacctccaaaagaatagatgatctgatgatttatcgcagtcgagcattacattttttgcatgaaatcggatggcttcttcaaaggagccatgtgcgagctacgtctgagcagcgacaatattgtcctgaccgcttccctgttgcaagatttagatggctgctatcctttgcagttgatcaggaatggtgtgctgttctaaggaagcttctgaacaccatgttccagggtgatattgatgtattgtcaccaattgaatttgccttgggagaaaatctattgcatactgcggtcaaaaaacgctcaaagcctttagttgaatttctattaagatacaccacaacaaatattgctccagtgggcggtggagatggtgctccagttcagttcttgttcactcctgcgatgactgaactgtcaaatatcacacctcttcatattgcagccacaatcagtgatgctattggtgttttagatgctttaactgatgatcctcagcagttgggaatcaaagcgtggaagaatgctcgtgacgccactggcttcactcctgaggaatatgctgcaaagagaggcaacatatcctatattcaaatggtacaggacaaaattgacagaagggtgaccagagctcatgtctcggttaccatccccagcacaattgatactgtcggaaagcatggtagccgaatgaagcctgccgatcaaatcacatttggtgttgagaaaaaacaactaagcatcaaccaaacattgagctgcagacagtgtgtccagcaggcccagcagcttgcattccatccccggacaaataggtttctgtctaataggactgcgatgctttccttggtctccattgctgccgtctgcgtctgtgtgggattgatcatgaagagcctgccacaagttggttgtatgaagcctttcctctgggacaatatacgttggggccccaattgatagactgcagaagagccagcccgattgtatcagtgtatgatgaagatgtttgcgccgagcgaagctagtttcttgtaatgttatccataccatctcccattggcttcgcaggtgggctatgctacagaagtcagattctcgcctttttataatggaggctacacaacgtttgatacaagtggtcaaggtcttttttttcccatgaacatgggtggcg

SEQ ID NO: 25816 - DNA, 332 bp, Zea Mays
  misc_feature (331)..(332): n is a, c, g, or t
ttaactttttagtggaattttttgaagttgttatgtcaaaatattatggtgaaagcgagcgtctattgggatctattttttatcttgcaaatgatcttcctgaaagaggtaatatattcttagatgaggtatatatcgtaatacttatagcataagcactcaagccactacaagtaagctcctgccctttgcttgtttccagattgatatgtcaagatacgcttgtttcacttgagctcactgttatctgaaaatctatagactgccttcgtccccttcatcactaccgatgaccgtgacttggccaccacagcaaaagcacgcaggatcnn

SEQ ID NO: 25817 - DNA, 549 bp, Zea Mays
cgcgccgcggtagtttcgcaccgttggccgtcgcaactcgcagcctcacccctcacaggcttgcggtgctgcgcgcttgcgccgccgacccctccgactacgagctcgtcccccgccgtcgctcgcgtgtcgcggattcgctgtgtcgggtgaccgggtcgacctcctcctcctcacatcttccattgaccgcctccgaactccgtcatccgcaaccgcaagcggagacatatcaagttgtttggtgataatggatccaaagcattcggctgaagtgtccaagcatttagacaagcaaaatcaagcactaatggaaacatatggagcaatgtcccatgagttgcataaactgcaggtagaagaagagacaatcatgcgcaagttgtatgaactgatgtccgcggaagggcttcttccaaagcgcaagaaagaaaagcaacatggggaaaatatagtggcttcaactgagagcaaagaacaggaaccataaattcttatgcgacgtgtaatgtgatatgacagcaatgccattttatctggagagttggt

SEQ ID NO: 25818 - DNA, 2837 bp, Zea Mays
cttgtgtataaagtacttggggaatgaaatctccagatcatatgggtgattaccatattgggaaataaagtgtcttcattgacaataaaagatgtaacgaggaattgcagtttgccatcaactcatgtatactctggcagattgactgacaagataccactgggaaagattgaacgttctgttcaggctgtagaagcagctttaaaaaagctggaaaatggaggtagtgtcaatgatgctaaagcagtatgtgaacctgaagttttaaggcagcttgcaaggtggcatagtaaactcagagtgtatatatcaccttttattcatggcacaaggtacagttcctttggtagacattttacaaaggtggagaaacttgttgagattgttgatagacttcactggtatgtggaaactggtgacatgatagtagatttctgctgtggggcaaatgattttagccgtcttatgaaagaaaaactcgacaaagttcagaagaagtgccatttcaagaattatgatcttatccaaccacagaatcgcttctgctttgaaaagagggattggatgactgtgcagccaaacgagctgcctcatggatcccaactaattatgggtcttaatcctccttttggagtcaaagcaagtcttgcgaacaaatttattgacaaagcattgacattcaagcctaagctcattgtactaattgtccctaaagaaactaaaaggttagatcagaggagaacaccttatgatttgatttgggaggacagtgagtgtctttctggcaagtccttctatttgcctggttctgtggatcttaatgataaaatagttgaagggtggaatgcatctgcgccacccctctatttgtggagtcatcctggttggacaaagaagcacatgcaagtggctgaagagcatggtcatacttgtatggggaagatagcttgccatgttgaagagagtaatctatcagatgacctgtccgtgaggaaacaatctgatgctacaaacaaactgaactcgagatcagggaaagagactccattcaatgacagaatgtccaatctacttgatgatggttctgctaggaagcaagcaagatctgaagaagagaagagaactctagggaagatagaacaccatgtgaaaaaggctaatataccagataacctcccagtgaagaaagaacctgaagcttccagcaaagtcatgtcgcattctggaaaagatagaaagattggcagatacaacaggaggagacatgacaacaggagcagcaaggggacacctgatcacacagagagcctcccccctgaaaagcaagtggaagttgcatatgaggaaacaagagttattcctagcaaaaagattgctcataatgaaaaaaagagcgcgcagtacaactacgagcaaactgcagcagggatgccaaacatgaggtctagaggaggggattctgacatgagtatctcacccccagtcagttgcaatgctcgaagcaaacccatgagctattccctgacgagaccaattgaacacttggatacgaatgctcaccttttggcagaagaacctagtgactctgtgctcaatagggttccaaatcatgacagttatttggcaatcaaagaggaatactgtgatggatttaagaggaaaaatgatcctatcttcagtcacattgatgatagctcaaggatgaggggctccagcatcgaagaagtgaccaagccgtatattactgctccaaacagtgatccgtggtctaaaggagatggcagcttttacaggcatccgagctcagaagatttaaacgctaatgctgatgtgcttatgccaggatacagtgcaagatatggacaaattggtggtgacagtaacccacaagctagtatggtcccactagcaacagattcaagactgcatggtggaacggttgctgataattacctctcggcaagatactcccttggatcttcaggtgctcgcgttagccaaccagctccaactgttcccccttttgggctctcaggtgcaagttcacaacgaggctcagtaatggacaggtattcgtatgggctttcgggtccgactggaacacagcgctcagttattgacaggtatgcgccgtccctcgatggaacgaacacaacaagatcgaggagctccttgcctgagcagtacccgttcggacaacctggctcttccggtggcgggtggcctcatcactgatcgctggaacttggtcctcagatttgaccagcaaaagtgcaaccgatttcttgagtccggtggagcctacaacctatctacggcctaactttttggatcctactagtcgtttcttcctggcgccttcgacgaagacatcacctgtgtctaccaatacagaagtgtagacttcaattcctacaaatacagaagtgtaggcttcaatcctattgtttgctctggatttctgtttatgagcgtatttacaagagtatgtttggtctatgttagtatattaggaatacaattccaaaaccgttgtaccgtgccaaagtttaatactatacgtttgggtctgtcgatgagaaaaaaggacgagtgggtgagaagatgctgccctccgcagaactcgatcaggccggttcctctgcgcgtcctgctatgagaggctaacctgagcccgacagaaccggcttggtcgatttgggacctggtaggccggtatttttttattgaagtgtaactttctaaattaggtcttgttggtttgcgttggattgcgtccggaatcgtttcaagtttatataaattagagaagcaatccggttagaaatcgtttcgat

SEQ ID NO: 25819 - DNA, 291 bp, Zea Mays
gtgcaccgtacccctggccatatatatttgaagccgccctcctcaccgagatgctccgcgccgtgtcgcgcccaacaccgccacccattaatccattgcacgacatcgctaaagccttgggaagttctcaggaatcatcatcggtgcacgaggaattcaacgtggcctctccgggggcgattctccactagaaccaccagaattgctcaccgatgctcctgctccgccgcgggttctctgtacaccgagggcggggatcgtcgcggcataatcacaggtaatgttacctcc

SEQ ID NO: 25820 - DNA, 620 bp, Zea Mays
cgacaagtagtttgatcggcgttacgggggaccacagaagcattagctgggtgaacccactcaaagggggcagggaattgtgtgctagtttgaatggctgctacaaagcttcaggccctttggaaccacccggctggccccaaaaccaagaaactggaaccttttcagtgttaacgttgcaatggcgggtacaggcctgtatcagctttcacggaagatcaggcaagattacttatccgatgagaaagatgctgcttcacaactggaagcatagataatgacaacaggcaaagaataacggattggaaagcctgcatcctaggagtctactcttgattttttttttctgggcaagcaaagaataacggatgggtcatgtttgttttcctgttattctgaaatcgtgagcaggctaatgtgaaaatcttccgccaaaaaagaaaaccaatgaagtgatgttttgagcattttttttgtgggaacaagtcatgaaagtacatggtttatctgttgttcttttgttccttcaaccgctttatttgggaaaacgctaaattgttgccaagctgattgaccataatccagcctttgctcgattcattggtaaaaatctaaaaaaa

SEQ ID NO: 25821 - DNA, 443 bp, Zea Mays
tcggaactcgcgacggccgggagcccgggagcatgcagatgcaaatccttccgccgtcccgcgcgatcatcgatgctctctctcctccgcctccgtagcagcgtcgctccgactctctccagtgcccaatacgccgcctcggcacatctccccgccgttttatggcgttcgttgccaccagcgcttgcgtggcgagcacctccatcatatccacccgcccgtcgtgttttcagcagcatggccaccaccaccatcactaccagtggaatcaaaggcgacgacggcacgtcgtcgttggctaaagcatgcaatgacgaacaagatgggaggacggcggctgtgcatggcgacaaacataccaggaagaagataggccatgatatttttcttcgatgtggcgatgggccctcccggtgagcggagcgacgacgaagaactaggcc

SEQ ID NO: 25822 - DNA, 1058 bp, Zea Mays
tgcttcatgtatcattatatgttgaaggagaaaagctaatcatatagcataaatcgtccctgttggtgagctgttccaaagactcaaaggttaaagtttgggacacagtggctccttcgagtggttcatcaccatgtgtaggcagtgctcacctcaactcaaacaggccaccaattgctatgaaatgccatgaatccctttgctatattgctgctggagctcaagtgacagcgattgacttgaggacaatgaagaaggcttctgtccttgcactccagaaccacagaatactttcttacggatacgtcaatggctgtgcagtccaaaaaaatgaagagaagggaatttgacattgtcgttcaagcttcaacattgatcacttattggttttcaggaagtctttctgaatgtcagttgctataggattatttgaacaacatctcttccaatggtgatatattttatgatgctcagaatgatttcttgacacctgaatgggacagtgagaatttacaagtggtactgatgattctatccatgttcaaatcatcaagatagtcatcagggttattgcccacggaagcttaaatacttggtgctgaactgctgaagtatgatgtctcactgaaaaacaacgagatggcaatgagaagtgttcaggaagaggggtaatatttactcagagcagcaaaggaaggtcgccccaccaagctgccatgatattcctccacttaccagtgtttcaaattccaatgacatcaggttgaagaaaggaacttcacacatgaaaagagacgatccggacgaccatgaagattaaacgttgctgttaagaaaagccatattttctgtattgcttctaagctgttttatggcctttaaaccaatacttttgcttggcatatatgtagctataactattgtaatataatctctgagcttctcatgctgctattcaacatatcattactcctaccaatatatgtacagtttcagttgacttgcttgctttccgttcttgccttatcaagctaattagctaaactacaattcagttt

SEQ ID NO: 25823 - DNA, 360 bp, Zea Mays
ttattgattctttgtttggcggcttttggccaacgatgattctggtttcaaaaatatatctagccacgcttgattgcctttggagagggtcagagagggttagagcccgtgacaagaaatgaatcgtttggttctctgacctagtctattcacccgaaacagagtgagacagattagtgtcgcggcactgctgaacattctccggtctccgctgaggacgctgcactgcatgtgcggctggcatggcatcaggttctctgcttcggcactccactggttgtggttgcccgtcctcgtacgcctccgaccaggactcggttagcgcatgacacaagaggcatgcagaaaacccggctctga

SEQ ID NO: 25824 - DNA, 2041 bp, Zea Mays
ctttgccttttctgctgagtaaaacctggttattgacgcaagactatgctgcagctcggctacaaccagctcacagggagcattccaacccagctgggccacctaaacaagctcactgttctcgcccttcagtccaaccagctcagcggcgcgatcccggcatccctcggggacttgccggcgctggcacggctagacttgagctccaaccaactcttcggctcaatcccctccaagctcgctgagatccctcgtcttgcaacgctagacctccggaacaacacactttcaggaagtgttccatctggtctgaagaagctgaacgaggggtttctgtacgagaacaatccggagctctgtggagcgcagttcgattctctgaaagcttgtcctaacgatggcaacgatgacggcagaacgccccggaaacctgaatcgacctctgtcaagccccagcagattcaaaagacggccgacctcaaccggaactgcggcgacggaggctgctcgaagccttcgacgctctctacaggggctgttgttgccggaacagtcgtcatcgtggcaggagcagcggcctgtggcctgtccgcgttctcatggcaccgccgccagaagcagaaggtcggcagcagttcggtcgagcatctggaaggccggcctagcctggaccggtcgaaggaagcataccagagaagcgccgtgtcgtcactgatgaacgtcgagtactccagtggcggctgggacacttcatccgaggggtcacagtcacagcatggggtggcgaggctgtcgtcgtcgacagagggtggttccccgagcgtgaggtcgttcaacctcgaggaggtggagtgcgccacgcagtacttctcggacgcgaacctgatcggcaagagcggtttcgccgcgacgtacaagggggtcttgcgggacgggacggctgttgcggtgaagagcatcagcaagaacagctgcaagtcggaggaggccgacttcctgaggggcctccgcacgctgacgtcgctgcggcacgagaacctcgtcggcctgaggggattctgccggtcccgggcgagcggggggtgcttcctcgtctacgagttcatggccaacggaagcctttctcggtacctcgacgccaaggaaggcgatgcggcggacgccgccgccgtcctcgactggcctacacgggtctccatcatcaaaggcgtcgccaagggcatcgagtacctgcacagcagcaagctggcgcaccagagcatctcggcggacaaggtcctgctcgaccacctctacgcgccgcgcctctccggcgcgggcctgcacaggctgctggccgacgacgtggtgttcgcggcgctcaaggacagcgcggccatggggtacctggctcccgagtacgcgacgacggggcggtccacggacaagcagggcgacgtgtacgcgttcggcgtggtggtgctgcaggtgctggcggggcggcgcgccgtgtcgccgccccacctccagcagggcggcggcggcggcgggcggctggacgacctcgtggacccgcgcctgcgcgggcggttctcgcgcgccgaggccgccaagctcgccggcgtcgcgctgctctgcaccgccgaggcgcccgcgcagcggcccaccatgaccgccgtgctgcagcagctcggcaccagcagccagtgatcgtcgtcggcggccggtacggtggtgggccggagtcggagctcgctggctacctggccggcgtggtgactgatttgtgttgagttagttaaccgctactgatctcggctactcgcatggtagctgcatttgctccttgtttgagctgagccccggctccttcctcgggagctcggttgatgtagttgtagtaaagtaagccggtgtgattgcattgtgacggagagtttttattagttaactaccgtctcatggcactgatgttgtatcgaattgtactgtctgtacccttaagatctatctatatgtcgaggatttgttggaaacgcggaaatgtcacgacgagttgcgc

SEQ ID NO: 25825 - DNA, 4323 bp, Zea Mays
tgcaacttccagatcgttctcatcccatcgtttcctcctctgctcaagcacggcagccagtccagccaccatttgggtgctcatctccctctgctcggcacccagccccagctcgcccgagctccctgcgccgacctcatcctccccatggtgcgtcaccttctactcctctccttcccacggcacagcagcgcccctgcagctccccttctccagatccatggcgcccaacaccttgagcgcccctgccgctgctcctccaccgggatctcctcctccactaggcgtccaggcttgtcccaccatggctgcccctcctccatctcctccctccccaccaggttacccagattccatggccgccgccgccccagccatctccctggtggccgacctcgcccctgccccagccacagctcccccttcggccctgctgctgcaagcactcagcccctcccatggcacacggagaaatcccatgatttgggggaagacgaagtccaagcacaacccccgccaatcgctcgatgaaaaatctaaaccaaaaccctcagcgttttcatgggttccggagggattttatgttggtgttgtgcggtgtgatctccaattccctattgctgatgtcttactccatcatgaccttagggaaggatgttttcctctaaattactcgtaataattatgcttggtgtatgtgttgttttagctacttgatgaaatgttttagttgtgtgcgataatatggttgccgttcgagtggaaagtagatgtgttgtatgacctgagttggagttgaagcaagtatgtgtgtctcgtattacgaaactaattagagatatgcatgatgtttgtagatggattatgtgtagagtgttttagtacaagtatttttttaggtatagttgaaccaattattgtatatgaattgtgcgatatcaaggttgttctaatgttcttttaacatcttgctaataaggtgttagagtattctaaatgccaaacataggataattttacaagccaaatagaagttaaattgaaggtattgatgtttagggctgtaggtatagttttagttatgcagctagtccaataaagtagatcatgttttctgtagaagcgttatatataaaacttgtagataatctctttatcttacttgtgtaaaaatttcatgaccataggtgtagtagtttaggagttatgatttttccaagtccagtctcagaatctgtccgaattctatacaggtttcgaaaattggattgtttggctaagctaaactgagaatcagcccttagtaattatagaagaattgtagtacttttcttaagctttccaacaaattttggagcaccctttttggtggtctagagatcaagttacagctgtttgaactatagagtctgaatctgtccaaatctggacagcgaagtctgtttgtagtaactgactttgatatgtattgaattaacctgagatgtttataaatgaattgtagacaattctattaactttctaaaaagtctaggatcaccggatttggatttcggaaactccagttctggacttttgaagtagttagtcgaattctgtccaaatctggacaaaatttatgtttagcgctgtttgacctttctaaaggtcgaatcttgttgtgatggtaatacaaaagttatagaggactttataagctttccaaaaagtcctagtttactatttttggatacatattttatgaattgtgagctaaacagatagttgttgacttgctgttctgctgtccaaacacatgtctactgtctgaaaatagctcattttgtagttacatttgcatcaggctttgatgattgctgtacaaggatgatatggcctcccgcccaaagctgtctggtattcagaagcaggttttggcgctgtacaggggattccttcggacagcacgccttaaggcccctgaagaacgccgcaggatcgagtctgttatcttggcagagttccgtgacaacgcaaggagtgttgaccgtaggaactttgtacacatagagtacttgttgaggagagggaagaagcagcttgagcagctcaagaatcctgatattactggactcgctacccttgtagtaaagaaatgagcaagagaagaaggaagacaagtcagacaaaacagaagacgagaagaggttcctaccataacacttaagcaaggaatcctgtacacttctctcctggggttgtgacttgtatattgtcaaggatcacttggatgtggtaaatgctatactggacactgatgatagctgcataaggattgtgcgaaaaaacgggaagacatccctacatactgctgcaaggattggataccatcgtattgtcaaggcactcatagagagggatccaggaattgttccgatcaaggataggaagggacaaactgcacttcacatggctgtgaaaggcaagaacacagatgtagtggaagagttactgatggctgatgtttccattctcaatgtgcgggacaagaagggaaatactgctttgcacatagctacatggaaatgggagaattttgggattatgaaacaccgcagacgtggcttcgacgaaacggaggcgtaggcgagggattcgacattatgaaaaaccagagaagatactacactctaaaatggacatgaatcctctattaccagggaaggatgatgtttattacactgaaacagacgctgtctcacatccgttacccgcactagacgcacccagtctttctacagagagaatcgcgccgttcttgaatctgccattcgctgaatctgccattcgctgctgttgtttctggacagtgaagcagtattccggacagtgaacaaaaatctgggaacacatttcattttcactgtcattggctaccagagtccgggaacaaaatctgggaacaaaatctgggaacacaaaaatctgggaacaaaatctgcctttggctaccagagtttattgctcccatatcattcgctgtccatttcactgtccattcgctgaacacaaaaagctgggaacaaactcattttcccagtgaacaggtagcacaatttagttcacaaaatctgggagcacaatttagttcacaaaatctgggagcaataaacaggttgaacaggtagaacaaaatctgggagcaataaactgccatcccagaacaaaattcgcagctcacatttcagttcacaagctagttcacaatttagttcccaggtaccacaatttagttcacaagctagttcacaagctcacatttcaatggagcaatacacaggtagcagtttgacaagctattacacaagctcacatttctgggagcaatacacaggtagcagtttcacaagctatcacacaagctcacatttctgggagcaaaaaacaggtggcgtagtagcagtcgtgtgttcatcttcatttgcagcaacgacaagttcacggcttggtgcttcatcttcatttccagctacaacaacgacaagccacctgctttggcgcggactagggttgtggtcgcagcgccgccgccacctgctttggcgcggggccgcgagcagcaagggagaagacgcggagtttggagagaaggaggtgcagcgccgccgccacctgctttggcgcgggaccacgggcagcagatctccgggcagcaggggaggagactagcaggggagggaaatggagattgaagaaaatgagatggaaggaagaggcttgacgggagagagaagaaccttgaagagagaagaacggctctggacggcagaagaaaacggcgcgtgggctgatagcgacggaagatcattattcgttctcctgaacgactaataacgatgggatctggaataacaggagcctgatggttgcatcagtagagttgaccacttctcagtattgcgagatgcatcttacatggtcaagaagataattcctattctgaactacttgctcgtgttcgtgtacaagtctccttatcatgtcctcctttcaagccagtctattctttgcttgattcatcacgggtgcacattattgtaattagaatcttcagagtactcgaaggatagttaaagctgtttggctagtccttcagattactaaaaatatagttgatcagttttgcctagtcccagtaccatacaaagatgttcaggtgaacctgaaaattcttctcaatttgacttgcaagctttctgatgcgagcactaaatagtgatttttttgcaattttgtatgagccttgtttgagtgaatctttcctttgggcagcatggatataaa

SEQ ID NO: 25826 - DNA, 2619 bp, Zea Mays
ccatccatcgccttccccatctcccccagttcccctcgtcgtcgcttcttccaaaccctagcggcctagcctgcctcctacctcgcccgccgacctatctctgccagtcctattccccgcggcagcgcgggatctcctcgctcccgtcgctccctgcacctacggtacaaccgctccatccaaacgagatccagcggatggaacccccggcggcgaaggaggcgccgccacttcagcctgcggcggaggaggacgcgatgctctctgcgacggcggccatggcgaaggaagccgctgtagcgttccagggctgccgctacgccgactgtgccgcagtgctcacgaggctgctggacaagaaagagggcgatctcaaggtacaccataacatggccatcactgaattcttcttggatgattgtcctgattcaaacaggctgcttaaaattcttggtgattttaaggatatagtacagtacttggaaaggtcgtttggagtagctaacacaatgaacccgaatgaaaatgcaagcatagctcagcagcaattagctcaagcgaagcctcctgtgaaaattagcatgcctccagattccgattcaaatgcttatgctggtggatatgagaacctttcgtcaggaattttcccagatgagcaaatagaatttgaatctctatgctctagttttgatggacatcagaatgtgggcaggcgtatcttgaatgatttctcaagggcgtctgctgatcttgctgctactgctgctgatttgaaagttagacttcagatttacaaggtccgtcttctactgctcactaggaaccttaaggttgcgaagcgagaactcaaagtactaatgaacatggcacgtggtagggattcatctacagagcttctcttgaaatctcagctggagtatgcccgggggaattataggaaggctgtgaagctattgagcacaccaaataatcggactgaaccagcaatgctagccattttccacaacaacatgggatgtatactccaccaacagagatcgtatcacgcctctatatggtgctttagcaaagcgctgaaatacagcttatcatttcgttcagagaaaccaatgaagttgtctacattatcacaagacaagtcttgccttatttcatacaactgtggtatccaacatttgatgtgtgggaagcctttgttagcagcttcttgttttcgtgaagccatgccgctcttctacaagcgaccccttttctggctccgtttttctgagtgcagcctgctagctctagaaaagggtctcctgtgtgcaaatggtgcttcctcattcaacgatgagattgaaatcaatgttgtggggtcaggacaatggaggcagttgattgtcaacccagtgaactcgagaagtaatttagattctgcaggtgtgactttaggcgaacataaaaatttggtttcacttggatttgctagacagtgtctacaaaatgcgctgctattattggatgctactgagaaggaaaattgggtaatcgcatctgatacagaggattgggaccaaggaaccgtacatggatataaaagctcaggccagaagaatactacaagtacagattctaaaacaccttcaggcccaactctagctaatgtaaatggagaacaaaagggcacaagcttgaatgctaccttgcagagttctcttgctttctatgacgagatccgtagaaaagagtacatcaaaatcagacaggctgtcctggcgaacttggcatttgttgaattgtgccttgataatcccttgaaaactttgacgtatgcaaagtcagtactgcaggtgacagactgttccaggatgtatgcgttcctcagccatgtatacgcagccgaagctctatgtactttgaacagaacagaggatgccgccgagaatctatcagtttatataagagatggtaatcatgtcgagttgccttatagtgtggagaattctgaaaaggccttggttgagaaagacagtgatggtgaagacttggttgctcctgcagtgacaaaactcgccacagaagaacctgagcagctcaggccggaggaggcccgtggtgtcctgtatatcaaccttggcatgattgctgcaaggcagggagaagttgaaaaagccaactacatggtgagccgtggcctggcgatgttgcccaacaacccccgggcagtgctagcatcggtttacgtagaccttttgcaagggaagtcccaggaagctgtcgtgaagttgagacggtgtaggaatgtgagatttagacccgctagcatagcagccagcagtcagcagtcgagcttagaaaagcctcccctttcatgatttctgtagtttacaattaccgttataatcttttttggaccctgaccccaatgtggatgatcaaagatggtaatgcttctcctgtgtaacatatataagaaatgaactctaactccccttctagctccctcccagattcaggggtggaatgtgttggaactgtaccgttttaatttgccctctttggactgaagagagccaagtgatcaaaatagtttcctatgtttattcaagaatttggaaaataatgtgcagtcagcag

SEQ ID NO: 25827 - DNA, 1700 bp, Zea Mays
ttctagtttttgcgaacactatcggctggtccgcctgagaccaattcggtgtccacttatgttgatcttctggctggaaaatcacgttgacggtggcaagtaggggttctatcatccgcagcctcatctcaagaagcaaaattctttcatgatccctttgaaccggagggcaagcctgcccagggctgggatggagtactttgatgcaaggcggaagcctcgtaatgttggaaaaatcattgcagccctggtcctcacaacactctgtatatttgctctgaagcaatctcctggttttggtggcaatagtgtgttttctcgccatgaacctggtgttacccacgtcttagtaacaggaggagctggttatattggttcacatgccgctttaaggctcttacaggatagctatcgagttaccattgtggataatctatctagaggaaatatgggagcagtaaaggttctgcagggcttatttccgcagcctggtagactacaattcatctttgctgatctgggggaccagaaatctgtcaacaagatatttgctgaaaatgcatttgatgctgtgatgcactttgcagctgttgcttatgtgggagagagcacattggaaccccttaggtactatcacaatattacatcgaacactttactgattttggaggctatggcatctcatggagtcaaaacccttatctactccagtacatgtgctacctacggagaaccagagaagatgcctattacagaagccacacctcagttccctatcaatccatatggaaaagctaagaaaatggcagaggatatcatattagatttctcaaagtcgaagggagctgacatggctgtcatgattttaagatatttcaatgttattggctctgaccctgagggaagattaggtgaggctcctaggccagaactccgagagcatggtcggatatctggggcatgcttcgatgcagcattaggagtcattacaggattaaaggttaaaggaacagattatcccacaactgatggaacctgcataagagattatattgatgtcacagatttagttgatgctcatgtgaaagcactcaacaaggcagagcctagaaaagtcagcatttacaatgttggaacaggaagaggtcgctcggttaatgagttcgtcgatgcctgcaagaaggcaactggggttaacatcaaaattgagtacctcagcagaaggccaggagattatgcagaagtatatagcgacccaacaaaaatcaacaaggagctcaactggacagctcgatatactgatcttaaagagagtctgtcagtcgcatggaggtggcaaaagtcgcatcccagtggctacgggccaaatcgaatatagcctgctgatttataattcactgaatcaatacatattaattctttagttagcgataaaaaaatcttgctatgacactcctctcaaaatcactccgtattcttctcgttctttttatttcaaaggtttgctgtttttttactagtagaaacatgaacggtgatttggatacaaaaaacttgtgatgacaatttcattgtttttgacacaaattgttgatagaaaaaatgtacatttttcagccagtgagctgcaaggtttggttgcatcgagttaagaaaaaccttatgttgtgaccaatggaaatgctgtggattttgtgctg

SEQ ID NO: 25828 - DNA, 609 bp, Zea Mays
gtgagatctagcgagaggaagaggaggaagggttgtggggaccaggggtgcgagatggcggattcacctgcaactacaagaaaagaaagagcgagagatttacagaaacctccagagccgcggaggaggaggagatttgaaggatctctacgacactggcggattagttaaggaacgaaagatcacattgtgtccggtaaccagattcagatgtgggcgtcgtgcgtgggtgcaaggccaagccgaggtgaaagagatgaagagcgtgaccaagaacttcctgatttttcatcatttattccattcttacctcctctgagtgcagctaatctaaaggtctactatgccacatgtttcaccatcatagttgggataatggtgttcggtggttttcttgcaccaatcttaaacttggtctagggggcacatcttatgaagactccatccgaagcgttcatctgtcgacgtagttaagaagtgcactcaggttatacatccagtaaagagcaagacatttgaaagctcatgggtcagctgtgttgctattgatgcaagcgaaagttggctggtataactttcagttcaaactctttactaaaatgttgtaaa

SEQ ID NO: 25829 - DNA, 2972 bp, Zea Mays
ccgttggattatcttcacctttcactccccctctttctgagatctgctttttaaacactgattgtatgatggtggttgcatgcagcctttggccgggttcgtgcgcctgacacagacacagatctggagacagatgggttggctacttcctcctccagtgcttctgcagcctttgccgagcggcaggacgacgaagcggaggagttgctgtgcggggtgaaggaagaggagtcggctcaggtacaagaaccggccaagaatccggcaggacgtcccaccccactaccccaggggtcgaaacagcggccggccccggccttacttgacctcggcagcactgggttaattccacggagccacgttttctacaagtttcgtgattggtggtgtggggttgatgaacaaaggacttgaagcattactcatccggtcagacgtgtttcgtagaccttgacgctgagctatcggagttgggtttccaaaaaaaggtggagctctgagagagttccgcattcttctaaaggaagtaggagatacccaggaagcagcatggcattttcttacagcaatgggaggacattgccctcgaaatgggaggatgcagagaggtggatcttcagtcccaattccagcgacatgcgtggaagaactacggttgctcatggtcggaggccaaagtctaaaagtggccccctggggcctccaggaagacttggtggacagtattcatctgtttcttcggtgtcattgcttgatagtgagagagttggacctattacatcaaattctcatttttcagcaggagtactaatgccaggacatgtttgtggaggaaaaaatacaaatggggcctattcaggtagaccaattggtgacgaaatcaacattggagaaggagtcagaatttgtccactgaatggtgggtctcatcctattcgaactcccagagttcgcaagcgattagattctgcagtcgaatcatctgcttcattgcctagcacacaagaatctatccaagacgagcaggttgaaatcacagaagattcagcttcaactattgcctgtataatttccaggaaagatgttgcaacacagaccagcccagagctaagtaggtcctcttcacccaacaatagaccaacatttaatcgttccctgtcgacggaacaaatgaaagagagggggagctgtttctcagatcttgatatcagggatgttcagatggatgatcgagtgactctgactaggtggtcaaagcaaaatgtaacacggttgcctaacaagaattcaacaaacataatagagtggaaggaaaaagctgtggaatcaaaatctttgtcctggggctttgccgaagcgaagtgcatatccaagattggtagagaggacacaaaaattactgcatgggaaagtattcaaaaagcaaaagctgaggcagcaattcagaagttaatgattaagatggagaagaaaggatcatcttcgctggataagattttgaacaccctcaagtctgctcagagaaaagcccaggtgatgcttgagcatgagcttgatgcagtaacagcaaaccaagatggaaaaggctctaggaaggcaaaaaagggagcacagcgtagcaagaatggccaaatcagttccctgagtggctgcttcacttgccatgctttttgatacatgtaattccaaaactgagtaagttgcaatcagactgttaatgtgcattgaatgtatttttgtattgcattttcaggcaatttgatgttctgttccttgaagcagcatctataccacacactttctgttacataaggcaatacagtggcatgccaactacaacgaaattgtcaatcatccttttgcctataacacgacgacagactcatatttgcatactgtgctagaagttccctgactagtgttcaaatttgttgtagccgatgtgaacttaccatggttatttttacattttgcagattgtgctagaagtgctctattgatgtatacataatttttataattattcccacataaagcacccaatttttcgtatgtggaactttctgtacgacaatatatccaggtctttaggttgtaaaattacgttcgataatatactttcatctatcgatgacttgaccgtaaatacaagacgcatttctaaggcttttagtgttacttgtggtcaaatgcggtgtttttcagcaccagtttcattttcctagaactcatcaagacattttaattgcaggaatcaggatctgagaaattccttcgtactgcctacatcaccgtcatgttctccacatcgaaatctaggtgaacttcagatatctatcagatgtcagtacataatacgataatcccacagctggaaatcagactcggatctttccaagatgctagctgcaggctcttcatctgccatgatagggataatgcaatatctgcagtgccgctctgtgttagtttcgattctgccaatgagacagagaaaatggagcacgaaggaaaaggaggaacggttctgcgtacacctcatgtgcccggttgatgtctcctttatcattgtgtcattacctggcctgccttgtagctaggcactgctgatgtcgatcttgttgccaaaaaggctgtatggatcatacattcacacaaagtgcaattccattccaagatacagcgaaatcttcaggtacgaggagaaagcatggcctgcttgtgcgtgtgactagttgggcaccctgctgggtactggaatggaaccacgctcccttgttgcttttgtttggtacagtgctggttgttgctacctatatttgctttacagcagcgtcggtgtgtagctcttttaggaaactgagatgttggtttggcctggaaacttaacaatatcgtcacacacatatatgtacatatggggatgaagatatgatcgtcagtatgccatcctttaaaaaaaaagattctca

SEQ ID NO: 25830 - DNA, 1286 bp, Zea Mays
actgctggcggccgttgcaattgcagccacattcaactcaggctccaggccgctgcaacccaagccgccagcagcctgcccctcctctccgactccaaaccaatccaatggccctccgccccccgctgtctcacctcacgcgctctctgccctggcctgcccccagcatgacgcgatgctccgcactgcgtcggatacatggacgatattgctggggagcgggggaggaaaggagacgactcttcccgtgccgtgctgacgccaccacgcggccccggtctcctctcgccctcctctccgtctagatctgatcctatcccctccccaccctccgccgccgtcctcgccctcccggccgcagccacgagcccgagcgccgggctcctggcctcgtctcgcctcaccggcgagatggacggcggcggggagacgctgctggtgcggaggagcaagggcaagaagaggcggcagccggcggcgcccgcggagaggggctccggcagcggggacaggttccgcgcgctctggcgggactaccacgacctgctgcaggagaccgaggcaaagaagaggaggctggcgagcaagaagcgaagaagcctcgccctgcttgctgaagtcaagttcttgcgaaggaagtatcagtcctttccgaagggtggctcgcagcagacacattacaggttgaagaagcaggctcggtacatgccatccccattgggccatggtgcagggaccgaagtgccttctaccagcagaaacccaaaccttgacttaaatcaagattctgtcctgaacgatgtggggaatgattgccaggggcaacatggccatccagaagttgaaaagttagatcaggtcgaggtgaatgaagatacgatgacacctgatgtcaaattatcagtttgtagggatacaggagagtactctcctgtaagtgaaggtaagagggcggttccatggcaagaccggttcgcgttgaagacctaggccctcagttgatgtggctaagaaataagctgcttctctgacagctagttttgctactgtatccctcaaatgctcagtagtgctctgtacagaaacaatgggacatgatacttatatgcatgttacattgcctgattgacaaactcagatgtttgtagcatgcttctaagcaagttagacaagtgagttgtgattctatgaatggttctgtccagaatttggattggcccatttgattttgcctttgtgcatcgaatgtttcttcaatcagcaagatcatgaattctgtgaacaaa

SEQ ID NO: 25831 - DNA, 883 bp, Zea Mays
agctgctcttgcctcttggcccgatcatttcatttccccacctctctaaaaccctcgctcttgcccgctgttttacacctaaaagaaaggtcctcgccgtcgagccgccggctcccatctcccgcgccgtcgccgacgaggacacaccagacgcctcgctgatggccttggctcgcctcggacggtctcttgccggccgcctccaccgttctatctaccgtccaccggcgcccacagactaccatgcctccgtttcccgacccttcgctccgacccacacaggcgtatgcgtacgaggttttgcaagcttgacgtacaatgccagcagcatgattggccacaatctcgaggggccgttgccagtccacattgtgaaggttctggatctcgtagtacatatgaatcatgctagaccgatgtcaacagcagcagcatcaaaggtgcctgttggagcccggaaggttggtctgaaggttgccatgatgagtcctggtttcgtatatgagccgtacagcccacgggaacgcattcccttctggaaaagatggtttacactaagtggctggagaaggacaaaggaggacatcattttggagatgaagaacgcatatgctgtttcaaggctgaggaagaaaactgggtataccaaaaatcaattctacgatcaagcattaaaaatatacaaggaggttaacactttgatggcacatggagacacatcatcgcttcggaaaattctgacagagaggatgcattctactataaaaaatgaactaaagagaagacagtccatgtggaattctgtacactgggaactggtggagcctgctgttagtatcagaactttgagggctcgcatgttggaatgttgtttgctttgcag

SEQ ID NO: 25832 - DNA, 769 bp, Zea Mays
gcaagcagcacgcaaatgacggcaagcccaaaaacagaaaacggtccacccataaagtccaaaaaaaaaaaaaagcccaaccagcccccgctccatcgctctccttccgcacttcacttggaagccatggcgtaggcccagggagatctagctagagtttcccgcatcggcctccgccacccaccgccgccgccccgccccgccccgccaaaggaacggaggatggaagccccgggctcgccctacgcctcctcgccggaatccgcccccaagcgtgcccctcgctccccaccgcagcagcagcctccctccgaggaaggaggtaactgccacgcgcctccctctcccttctccgtcccgtcgcgcgagcggggtgctggcaggttcgctctccccggcgtctgtatgtacgtggcccatgagctcgtgtgcctggatccgtgagatctgggcatccgcttcccgccccgatgcctcgagatctgtcagtagccggcgccagtgtcgcgtcgccatcggcgcgctgcgatttgagctgcgtttcccataggatcgccttcacggggttgccctttgtctccacttccaatcttaatgataaacgtcactgcggacgacgttcggttcagtgctggtttatctgtaataatatttgtcctcggttggattgctgacgccggtgcacatcatgtgttgcacataatgtactggaagctgataatgatgcgggttattatctgggcatgacaggcttaagttaggacattta

SEQ ID NO: 25833 - DNA, 3494 bp, Zea Mays
cttcgggcttcgtcccctcctcttgagtcttgacgaaagagagacagggaaagagggagaggcaagagtcgcagcctcgcagctctagacccagaccgcctccgcctccgccggtgatcgagtcgcgtcggcgctacattcaagctagaagacaataagcttcggcattcggaagccatgttcggctccaccaatccatttgggcagtcatccacaagcccatttggtaacaacaactcgtttggaactccccagggatttggccagtcttccactgctgccaacaatccctttgccccaaaaccatttggcagcccgaccacgccttttggggcacagactggaagctcgctctttgcaactacatctactggtgccttcggtcagcagcaatccgctcccgcatttggcacaacatccactggtgcctttggtcagcagcaatccactcccacgtttggcaccccatcctcctctcagttcgggagctctacaccagccttcggtgcatcccccactcctgcctttggtgccacatcctctgggtctttgttcggacagaagccaagttttgggggttttggatcatctcctagccagtcaagtccttttggtagcacgttccagcaaacacaaccaacatttggaacgacgccggcatttggtaccatgactactcctgcatttggtacaagtacaccagcctttggcaccacaactgcaccagccttcggtgccacgactaccccagcatttggttcaacatcaacatctttattcggtgcttctagcaccccagtgtttggttctacagcctttggcacatctgctactggttttggaacttcagggactacagcattcggtgtgagtagtactactacaggttttggatcttcaagcacaccttcatttggcacatcagctagcgtgttcggttttggttcttcaccatcttttggacaaacaacagtttcttctggcagcactccctttggaacaactccttcaccctttggtgcaccagttcctgcatttggctcgcagacagcagcaccagcttttggacaacctcagtttgctaatcaagctggaggaaccagaataaaaccttattctcaaacaccagatgttgacagtgctactagtggtactcagcctgctgcaaaacttgattccatatcggcaatgcctgaatacaaagacaagagtcatgaagaattgaggtgggaagactaccagcgtggagataagggtggaccaaacacttctggaactcaagcagtggcacctagctttccgtcactaatacaacagaatgctccaaacccattttcgacaagcaatccattttcaacaaacaatccatttgctcctaagcctgctccaactattacttcaccattcaacacctcatttaacaatgcatcagttacaagttcgagcccattcacatcatcccctagtaccacaatgtttgggcaaacaggtgtttctacactttcagcaagtaattcgccatcattgtttggaaataccaatccagctcctgttacatcatcattatttgccacatcagtgacaaataatccaagtccattcggcactggctcattattcgctaacactcaatcagccccattatttccctcagcatttgctcaaccgacatcaagtacaccggctttctcctctggcagcctatttggctcaactaatccgggcagtctgtttagcagcagcggtccttcacttttttcaacaccaacatttcaaccatcggcccctgctcaaacttcgaacttattctccttccaacctccaattcaaccagcttctacaggtggattccctggtttttccaatactacaaaccaagccttgatgggacagccgtatgatcttctgctacttttcaaatgcacaccattattcctttcctatttagtaatttcttttgatgttttaaaacgctgatgagttataacaaggtgaaggaaaaacaatattatgatcagtctaatgtggagaatggtgtaggcaaagaagggaaaaaaccttgatggttcatggagactagcttatatttgatgccatgagactgctggattgttattttatatctgtagtctaagagcatggttttggcatagatcataattcagaaatgagtttttggcaatgattcctgtttttttttcttttaacatggtctatcctgctgcatttttacccagaactcctaccctgtccagtatggtcatgcagcctgctcctgtttcaaatccatttgggatgcttccagcaatgcctcacatgtccattggaaatggtggatcttcaccttcagttcaatatggaatatcaagtttgccggttgtggagaagcttcttccaagtagatcattgtccatggcgtttcctaggcatttggcacagagaaggataaaactgctgccgagaaaatataatccaatatctgatggcaaggttccattctttgctgatgatgaagaatctccagcaacaccaaaggcagacgctttttttgtccctagagagaacccaaggaatctggtaattcgtccaattgagcagtggccttcgcggagagaaactgaccgacaattgactgtgaagaatgctactgatttgaacaaatatgaagatgcttccattgaaagtgagcgtggtaagtctgcctctgccatgtcaccaagcagcaggcctcctgcagtggaaaatgacaatcagcatgaggctagggccatggctcaacatgggaatgggaatgctacttcagtcgagaggttattgcctaagcttccacgtgcagattacttcacagagcctagtatagaggagcttgcggccaaagaacgtgcggaggcaggctactgcggtcgagtgagggactttgttgtggggcgacatggctacggcagcatcatttttcttggggagacggacgtgaggtgcctggatctggagtcaatagtggagtttaacaaccgggaggtggttgtttacaaggacgacagcaagaagccccctgtgggtgaggggctgaacaaggctgcggaggtgactctactgaacatcaagtgcgtaaataagaagactggggaggagtactgtgaggggacaagggtggagaggtacagggagatgctgatgaagaaggcggaggagcagggcgcggagtttgtgtcctttgatgctgccaagggagagtggaagttcagggtgaagcatttcagcgcctatgggctcccttgttgttaagtattctgtttgttttgatggagcagtgataactaagttgcacgctttacgctcttgtcaaatagtatcatgcttgattctgttgtgctgctttgtacaatgttgctgctgttaaaatgcttgcaaattgcactgctctgctgctgagaacgtattctaattataagacgttttagtttttctaaacacatgattttttccctaaacac

SEQ ID NO: 25834 - DNA, 701 bp, Zea Mays
tgagaacatccataacgatgatgaaaagaagaggggacaacgagtccccctgccgcaggcccctcttgtgttgaatgtattccccaggcattccattaagcataatttgggtagatgaggtcataagcagcccactaatcacatctctccatatggggccgaatccaactttttccaacacttcaagaaggaaggaccaagataccgaatcgaaggccttggaaatgttcttcagttactccctggaggacaggatagaacctcggcaccgaactttggtggcgaacaggatcaacatgaagctgcgttacatgctgactggttctgatgaagagtttgcgcagagggtgcgagaggctgttgagaggagagcgagatttgaagctggaaaggctgctggtctggagacattctcatgttcttcagagacatctagtgatgcagaagctacagaagcagcagcatgccaaaacagcacggatgtggtcggggttctgcaaaaacaagcatagcattgcttccttaccgtgtgcatgttctaaatgggaaggaaaagattacatatatttcactgtgggtaagaatgcaaaaatgctaatgttgtgacaaaataataaagtagagaatggaatagcaacgtccacgagtaaagtgaaaccctagcgattcgtgcatcccctttttatagtcacaataaaaaa

SEQ ID NO: 25835 - DNA, 2683 bp, Zea Mays
catgcgaatactgctggagttggcctaacccaacgaccagacgcaacacgacggcgacggccatggcttcgccggacctcgccgccggcgacggcagctacgactttcaccttcgctctctctccgcggcctcacgggactccgctgcggcctccgaccccgcctctgaccccaacctcctccaatctgagggtgtgcgagatgtgccgaacggcgaaggaagcgaaggacgagatggtggcgcgggcgttccccgtgatgggcaagctatttcagcgatgcgccgccgctcccacgcaggccgttgcctccaccggcgtgctgctcctcaccattttgcaattcttcttggattttggggaggctgttttgcatgatgctgatggtagcttgaaaaccttcttccgctcttgcttaagtagggagtttgcagatcctattgttgcagagcgcacagttgaattccttgtaacaaacaagacaaagatccttagctcctttcccaatttgattccacaggaggctgtaggccaaaaaggtagagaaaaaacagaaaaaaccatatttgtatgataagctactcaaccaatcttttgtaagattctttatagaatatctctcttctcttcctattttccatattcgacttaatcttgttaacacatgccaatgcttgtgtatccttgtttatacacagttctatccattgttgttaaagcttattgcatcaaacggtgagaggtatgtgctcgtattgtcatgaacttcacatagctctatcatccatgttccctttaaatgactcagtacaggtaccataaatatccaatagcaatcccgttgaactacctaatttgttttctaacattctagactggagaataagttttcggaagtacttccattaatgatgtcagcaggatcttttcttcccctcttcctatcccttatggatttgccaatgttggtggtggcactggaaaaggtggaaagaagttctggaactcttattggtagtagtatagctacaatccagaagagcgctgctcctgagatgcttcttgcactgatggacgaggcatatactggttctgccgtagaagaacctagtggtaattcaggttctgatgatagtggtcccctagaccttactgacccaatgttcttagaccttctaaaagatgagaatgatggcattgccgcaaaacattggatatcccctacgatatcttcaacgttacaagcagcatttaacagcccacagtcggacagattgaaacagtcactggaaatggcacctcgctttcttactttatattttgcaacagcattgcgagacgttaatgactcactgctgtgtgctcttattccagtagttatgtcaagatatgctgcaatgttcccagacaaagttttctctttcaaggtgagggaaaggctttcagacttcattttggctgcattccagcggtctcccaacatcattgcagtactgaagaaacctattactgacagacttggtgaggctcatgataatcttgccaagacagagttagcattgcacttgtgctgggccattggtgagcatggagctggaggggtgggtcacaaggatgtagctcgtgaactatttgaaaatttggagttattattgtatgaaaacctggcaactagccgtttgggattaagccaagagccaggatctgattccatgggtgcatcatctagaaagtcatcccaagccaggcttctctgctttgtggtgactgctattgcaaaattagcaacatgccacagtgagttgcttccgagggcacgcgtgtcattgggtaaggtcgctcgttcccgaacctcagacaggagggtctggcaacgggcctgtgactatttagggctcatgaatgaaccagccatctgtttatctgtactgggaccgtccaccgcccaaggaaatggtcctggtattgtgaattggagtgaaggaggaacaaagatggtagctcatgttcctttttaccttttagcccagcaaaaaggtccaccgtctcataatttttcatttgccgacctcctcccaacagaatgaagaaaatatctgcatgagtgcattggtgcaggcatgatttctctagcagaaggccatataacgattttgttttgaagatccaagttcctttttaaaaaaggggctggtctgaacattcaggcttatttctctagcataatactcataaagagtcctgtacttttaggtcttgttcggttattcctataatacatggattgatggaattaaaaaaaatttagaagaactttgacttgcttaggaattcaacacatctaatcccactcaatccatatggattgagagctaatcgaacaagtcttacatggttgactatgcactcgagttatggaatgtatggtattacatttctaagtggtggatcgtagtgtaaaaaatgtacacgtctgaatttgttcgaaatgacaagtatctgttttgtttgaaatgacacgtctgaacttggcatagaagtgcatgaaaaatagaaggtcgaaaggttacattctttcgaaaacagcaggaatattaggccatggctctataagtaaactaactgagaatttaaaagctgcaaaatagcagtgaagacactcagcaataacgcaagtatgcaag

SEQ ID NO: 25836 - DNA, 1783 bp, Zea Mays
atggggctgggggctgcgatggcactgggcgacccaccggcggactacgcatccatcgcggcggtggggctgtttgtggcactcatgtgtgtcggcatcatcgtcgggcacctgctcgaggagaaccgctggatgaacgagtccatcaccacgctcttcatcgtgttaagccaagatgagacaccattcttgtacagcctcgtgtttggtgaaggtgttgtcaatgacacaacttctgttgtgttgttcaatgcaatccagaactttgatcctggaaatatcagcggtgccaaattactgaacttcattagcagtttcctttatttgttcggctccagcaccattcttggagtagcttctggacttcttagtgcttataccattaagaagttgtactttggcagcccggtaaagtctatcgctttgagcaacaccattttagccttggtgctggtttcaagagctgcttttgttttcccactatcctttctatcaaatttgaccaaaaaaactccaaatggaaagatatcttttaggcagcaggttattgtttggtgggcgggtctcatgagaggtgttgtgtctattgcgttggcttacaataaggttctgtggaagtgcgaggcattttgggaggtgtgcgaggcattttgggagggacatcatcatgcccaacttgaagtcgtccgtgaccacaacagcgagcgcggtggagtacatggatgaagtattgaaggcgttgccgctaggtgaggccaggaatgaggattcacgaacactgcaattcaattatggttcattcaaacataaggcattggataaatccttaactaaaaaggttcctaaaaatcgtttgacttcaaatactaaactaacacaatgttgctctattgtagggatttttgaagcactaactgcattccccttctccccttctcccttcctgctgtgcgaagccgtgccccaaaccctctaccatcttatttcagttcccactctctaccatcttccaggaaaaaacactagcaatcttacatgagttccaagttttgcaggtcgttgctgtttgtgaatgtggtttggattatgacagacttcagttctgtccgacagatatgcaaaaaaagtactttgagaaacaatttgagttggctgaagcagtaaagctgcccattttcttcacatgtgtgctgctggtgaagacttctatgaaatcatgacacaaaatttgcacagattccctggtggggttacacattccttcactgactcaacagaagatcaggataggctactttcttttgagaagatgtttatcggcaagttcttgaggtagtggcgggaagcaaagaaatttctgacatagaaggcctgagtagaactctgtaccacaacacatgcaggctcttctttcctcaggatcttgacgcgtctactaatgcgcagcttgagagtggtactgccgtccaggattgctgatgtcagagtgattttttttaaaaaatgtttccttttggttggcgtttggtttcgtacaacttccaatatgcctatgaaatgtttttggtcttataattttccctcgctgccaattttgccatgtttcatgagcctgatgacatgtcaggcaagtcctgactatgtacaagtaccctactgagactatgccctaaaatcatttagggctgagcatgtacaagtacagtttgatggctatgttgttcactacaatcaaacaacaactaagctctatatctatattttatacaaatttttaaattcc

SEQ ID NO: 25837 - DNA, 454 bp, Zea Mays
cggcaaccaggaaattgcctgatgaccaagcaattctgcaaccgctggcaggcatgtcacacacaggcttgtaaaatgtccaggcctcgtctcgtttcctcttcgctcccccgtgacgtcagtacgccacccatcctcaccggctgtcggcaccagcccgccgccgacccccgccgccgtgtcacgactcacgacccattgtggtttcagatcagacccgaatcgcgagcagcgatctgtacgtcgtccccgttcgcacgcctagcgcgatggcgcacccgatgtacggctccgggccactcagatccaggaacgcggcgaactcggacgaaatccagctgcggatcgacccggtgcacggggacctcgacgaggagatcgacgggctgcaatccagggtccgcatgctcaaaggggatttatatcaaatgtttcaacaatgaacaaaatgcgc

SEQ ID NO: 25838 - DNA, 1591 bp, Zea Mays
caggagctagctcgatgatcgagtggcgaatgaaggcacaagtcctcggtggtggcgggccccagagaccatttgctttcgcgcccttgtcacctagcagctagcagcagagggaggaaggacaagcccacacacaagctctcttcttttctctctgccgtctctcctccttcgctgccgtttggtgctcgtgtcgcgtgtggctgcgctcgtatatagcgtagctttctaggatcccaccagcagagtagcagtagcaggcgcctggtttccggtttccctgcagtgaaggaagaggaagcccaaccccaaggacagcagcgtacaatcaggctgatgcttgttggaactcagctgttgatgcttgtaagcctcgctgcctggctgcgtcctgtgctgtagatacgagatcccgcagcgttcgtttgttgcacttgcaccggcttgctgctagcttgcgacaggactaggaggagctagccgaggaggaggtgtgtgactccatggacgcgggccagcaggatgcgtgggactgggactgggaggtcctgctgccagaccacaggagctcatcctccgtgcgccaccaccacggcagcaacaataatacccttgacgatcaagaagaagcagaggagctcgacctgctgctgcctgcgccaggaggggacgacgtcgttgacgcgcacgacgacgagtgcaaggacatcggcgtcgtgccggacgacgaggccaagaagtcctcctccgtcgcgcctagcgctgccgccggcgatccgacgatggcctcctccgagggcgccgtggaagcgaaggagccgttccagagccctgatgacgccaaggccaccgccgacgacggcggcaagtttgctgcccagcagcaggaggaggaggagggggaggacgaggaggaagatgccggcaaggaaaacgacgacgacgacaaggcggcgcgtgcgccgcagtgcgtggtgttcagcgtggggaagctgaaggtgaacgggatcggcgcgctgtgctcgttcggcgtcgcggccgccaccctctgcgtgttcctcgtcggcggcaggcagcaccacaggcggcaggagcagcgggaggagacgatccagctgcagttctacggcgacgataaggtggtgcagcagacgtcgaggctgaaccaggccatgtcgtccgtgatgggggcgggaggaggcgcgtccgcgagggccaacatatccttcggtggattctacgatggattctgacggaacactggggaacagatgggtgtagctagtatacactgccgcgtactactggtggacgatgtaaataattattgggggctcttattattattattagaccttggtttaatgctacacagatacggacggacggatggatgggttataggtttattcaagttgatagtaactaaggggcatagggaagtcttaattagttgacaagttattagtaactaaaaacgtcgaaccatgcgtgcatgctcctcttgggtttacatatatttgtattcattatatattaatgaatgatctgtgtgcatgcaataaaaaaaaagaaaaaaaagagaaccttt

SEQ ID NO: 25839 - DNA, 1632 bp, Zea Mays
ggaagtccttgtgctccagttgatgctagtctctttccagccattaggtttgatctgcacaagtgttggcacaccatcggcctgccagtagtgaccacgccggtcagtttggccatctcgtcgtggccaagacaacccagcaagcacggttgggcaagctcgctccaggaatcaaatcaatctggtgctcaatcccacgaatgggaggaagttctggaggtaactcagagggaaaaacatctcggaactgctacaaaagattagtcacaaatgtagacaaaatgctagcaatatcatcaatagaaaagaaaagcatctttgcaaaccaaggcatagcaacaagcatcagtagcatgagtttcaagaagataagatttagtagcaagcatgataggagatttcaatttaatttgttgctgaatttctgtctcattagttggttccttatgggtacttgcagctctatctttatcagcttgtacaatttcagtaagagtcaaaggtagcaaagtaatgtttttatctttatgcctaaaagtgtatgtattactcctaccatggtgacatgcatcagtatcatattcccaaggtctacccaacaaaagagaacaagcttccataggtactacatcacaatccgcataatcagaatacataccaatggagaaatgcactcgtaccatgtgtgttaccttaaccttgcctgaatcattgatccactgaatgtggtatggatgtggccgtggacgtgtggtcaagccaagcttcttgaccaaatctgaactcaccaaattattgcagcttccaccatcaataataacacgtgcacgccgattctcgatggagaagaaagtctagaacaaattattgcgttgctgcttctcttatgattcaggctgagaactaagaacacgctgcaccatgatgcttcgaaggttcaccgtagcatcagcaccaagcatgacatcatcattagcagcaacatcactggagtcatcatcatcaccctcaccgtcggaagcactaatgtagccatcatccgtagcaatgtatgttcgctgactcgggcaatccttcttcacgtgaccaattccatgacagcggtggcaaacaatacccgaagaacgaccactggaaggtgttgcaggtgctggtgaattctgtttcttggtgggtacctacaaaggaaggttaccaacgtgtgcagcaggtgtcgagggagtatgacttgaggcaggtgtgtgcatccgtggtgcagaggaggcgccaaaagtagccctaggtcgatgttggcgtccctgcaattccttctctgcaagcatagcaaactggaacaacttgttgacaatgttaaattctttgtaatccacaatgtcctgaatgtcacgccgcaaacctgaataaaaacgacaaagagcgtcctcatgtccctctactatcccacaacgctgcaatcccttctgaagctcagcataataatcttgaacagatttatccccttgctctaaacgcatcaatttcttacgcaattctctatgataagatgggggaacaaatctaccgcgcatagctaccttaagatcttcccaagtcgtaggtgctctaccatccccaactagaccagtccaccag

SEQ ID NO: 25840 - DNA, 1292 bp, Zea Mays
tttttcaagaagagaactatctgaccttttccctttcaggtacctcaacgactttataaattggatgagcttaaactgaatgggattgatacttctgctttcctatcacccgtagatctgacactaggatcaattgagagaaatctccaaatcgctgcagttctgggagggttttctgtatcagctgcattggaactttctcaactccaaatcctgtttctcatactaggtctactatctttgtggtccgtggactttgtatattttggtggtggggtgagaaacttggttcttgatacaattggtcactatctcagccagaagtatcacaacagagttatccagcatgaagctggtcacttcttgatagcttacttgcttggagtgcttccaaaaggatacacaatcacaagcttagatacacttatgaatcaaggatcgcttaatgtgcaagctggagcagcttttgtggactatgagttccttgaagagatcaatacaggcaagctatctgccacgatggttaacaagttctcgtgtatagcactagccggagttgcagcagagtatcttctgtatggacgtgcagaaggaggattagccgacatcaataaggtctgagcatcaattgcttctgctgggttcatatttcaccgtgttttatgttttgtgtatcccatataccttatgcgcagcttgatggattgctcaagggtttgggtttcacccaaaagaaagctgattcacaggtgagatgggctgtgctgaatactgttctcatactgcgtcgccatgaaaaagctagatcgcagcttgcagaggcaatgtctacagggaagtcggtgggctcttgcatccaagtcatagaagagtgtataagcactgacgatatttaacgtggatatgttgctgaccctacgttgtctcaatggcatgttatcaacaacaaatcaaggcttgtcaatccaaaagaggatttgagtattaaatccactcttaaggctagtttgagaaccttatttttttaagagattttcttttttttttaagataaattagtttattttctcttgagaaaatagaaatctcttggaaaattggagttgctaaactagcccttagtcaaaaatgactagtagagaatttaatcttcaattgccttctggatttacgtaaccgaacaagctctattctatgttagggctggtttgatggacagtgaattggattcccttgttattcaaaatcctgtctaccgaaccaaaccagtccttagtagttgttgccccctg

SEQ ID NO: 25841 - DNA, 1804 bp, Zea Mays
cctcacgagagttagaacgcatgctccctcccggcagctgcctacttatcaacagcacaactagaaaaattggcagcgatcgcaggccgcccaacacagcgctccaaattcttttcccatcactgacgaagcgagcagatgagaggagctagcataaattatttttttaagaaagaatcccccactgctagattggctattaattggacaagagagagaggaggggtgcgcggagaggagacggagcggaggaggaggcattctctctctctctctcttcctcctcggtgctcaagaaatccatctagcggaggcgcatcttctccaccatcatcccttctctccaactcccccccccctcgggaattgtgggggtagcaaaggaactggagttcttgcatggatgcagcagcccactggcagcagggctggtgaagcccctggaggagatgctgatggcggccagcgcgggggctgcaaatccgagccaaggctcgaatccgaacccgccgccgctggcggcgcccctgacggacgcgggtagcaccgagcggcgcgcgcggccgcagaaggagaaggcgctcaactgcccgcggtgcaactccaccaacaccaaattctgctactacaacaactacagcctccagcagccacgctacttctgcaagacgtgccgccgctactggacggagggcggatccctccgcagcgtccccgtgggcggtggctcccgcaagaacaagcgctcctcgtcctcgtcctcgtcctcgtcctcgtcggcggcggcggcgtccgcctccacctcctcctcggccacgagctcgtccatggccagcacaccgggggcggcgtccaagagtccggagctggcgcacgagggcgcgcacgacgacctcaacctagcgttcccgcaccacggtggcctgcacgccgccgagttcgcggcgttcccgagcctggagagcagcaacgacatgtgcgaccagggtggcgggatgacgagcaatggccggggcggcggcgcggggcccgcggtcggcgcgctctcggcaacggagctgttgcggagctccggctgctacatgccgctgcagatgccaggaggagattacacggcggcagggttcgcgctcggggagttccgcacgccgctgctgccgccaccatcgtcacagagcccgctcgggttctctctggacgcgcacgggccggggtcgtccggtgctgccgcagcggcggggtacggttccagcgcggggctgccgcagggcgtgccgggcaacgcgggcaggttgttgttccctttcgaggacttgaagccgccggttagccctggaggtggtggtgtgggcggaggtggtgcaagtgcaaccggtggcgccggcgacggaaatagcagccacgatcagtttgaccacaacaaggagcgaggcggaggcggcggccgcggtgccggtgccgggcacgacacgccggggttctggagcagcatgatcggcggcagtggcgcttcttggtaatggagaatgacgcacacgggggcggcgccatgcatggtttcatgcatgcaaagtgttggtgacttgttctcaaatgctatgagttaagaacaaggcaacatagaaaagtgttaatcgttaaggtccttcgtcctccaaagcattatttcccttaggatataatggtttacggacgaaggttatgaaggacgtaccttcataaatttattaaacaatgacgaaggatggaatataaaggatataaaagacaacattaacaattatatattattattaagtataaa

SEQ ID NO: 25842 - DNA, 1684 bp, Zea Mays
gcttggtcaaatttggcgctttgaccagctagtggcaactgtactattgtgatgggcctacttcaatgataggatcttctttgagacgatctcacaatccgcaaacttggaggccatcaagatgaagctgtgggagcagatcagcggcaacatggtgctcggtgcatacaaccagatcccagaatggcagctcaagttaggaccaagagaccgagggcctgtccttgtgatccttgacgacgtttggtctctcccacagctcgaggagctcaccttcaggttccctgggtgcaagactctagttgtatcgaggttcaagttccccacactggtaaaacagacatacgaaatgcagttgctagacgaggcggcggccttgtccgtcttctgccgtgccgctttcgatcaggagtgtgttccgcggactgctgacaagagattggtcaggcaggtctctgcagagtgcaggggccttccactggctctgaaggttattggtgcgtcattgcgcgaccagcctcctaagatctggctcagcgccaagaaccggctgtctcgaggagaggctatttccgactcccatgagaccaagcttctagagaggatggcggcaagtgtcgagtgcttgtcggagaaggtcagagactgcttccttgatctgggatgcttcccggaggacaagaagatcccccttgatgtcttgatcaacatctggatggaggttcatgatcttgatgaaccagatgctttcgccatcttggttgagctttcgaacaagaaccttcttaccctcgttaacgatgcacagaacaaggctggagatttgtacagcagctaccatgactactcggtgacacagcatgatgtgctgagagatcttgctcttcacatgagtgggcgtgaccctctgaacaagcgtaggcggttggtgatgccgagaagagaagagacacttccaaaggactggcagaggaataaggataccccgtttgaagctcagatagtttccattcatacaggtgaaatgaagggatctgactggttccagatgaacttccccaaggcagaagtgctcatcctcaacttcgcctcaagcctgtactacctcccgccgttcatcgcgtcgatgcagaacctgaaagccctggtgctgatcaactacggcaccagcagcgcggcccttgacaacctatccgccttcaccacgctgaacggcctgaggagtctctggctggagaagatcaggctcccgccgctgccgaagaccaccatcccgctgaagaacctgcacaagatctcgctcgtcctctgcgagctgaacagcagcctgaggagcctcccgaggtcgtcgtcctccctcaagtccctcggccacgtcgtgtgcgacgaggagacggcgctgctgtggcgggaggccgagcaggtcatccctgacctccgggtgcaggtggccgaagagtgctacaacctggactggctagcggactgatgtcagattctggatgctaccgcttccaaactgaccatgtacatatatgatgataacgatgatgtttagatgttgcttcccctgtgtagtgcagggaagagaatcatcaatccactggccgattttgacatgttcagtcagtgttcatcacgcatccactccaaggttattaaaacggtaaaacgttgaaacgct

SEQ ID NO: 25843 - DNA, 1359 bp, Zea Mays
atttggcttgtgcgcattgcatgattgttgtattgtctgataggttgtttggaatggatgataaaaaatgatcgagtgcattcttcaggtgatatccatggacaatttgttgatctcttgaggctctttgatttgggtggttatcctccaacttcaacttatattttccttggagactatgtggatagaggcaaacaaagcttagaaaccatatgtctgcttctggcatacaagttgaagtaccctgataatatataccttttaaggggaaaccatgaagatgcaaaaattaacagagtttatggtttctatgatgaatgtaaaaggagattcaatgttcgactatggaagatattctgtgattgcttcaactgcttgcctatggcagcacttattgatgacaaaatattatgcatgcatggtggcctctcacctgaattgactagcttggatcaaataaaagatattgagaggcctaccgaaattccagactatggtcttctgtgcgatctcctttggtctgatcccagtcatgatacagaaggttggggggagagtgatagaggtgtttcttgcacttttggcgcagataagcttgttgaatttttggagaagaatgatcttgaccttgtgtgcagagctcatcaggtggtagaagatggctacgagttctttgcagagagaagactagtgaccatcttttcagctccaaactactgtggcgaatttgataatgcaggtgctctattgagcatagatgaaagcttgatgtgttcttttcagatcttgaaaccaaatgaaacaggtgcaccacattcaaggaaacctcttccaagcaaggcaccaaaaggagagaacgtctaatttgtatccagtgacctaatcacaatcgatgtcagctcgaagggggcgatctcgttgtctcggatccaccagggcatggcattagcgttctacacttgctgaatttgtgtggactcaatcggcagcgcttacattcttctgtacagcagcagtgtttctaacttggcatatcgtccgttctgatagtgacattgccacagctgcaatattttagtcgggtggacaaggcattttgttgggtacagtagctgttgttttgttagcctttttttggtaatgtttgtttggttgattgaacgctgtgagttttgtttgccgcgtatcttcgtcaggctcgggtatttacatcctgcaactgtgtaaatgattttgtctaacgaatgtctgttgacataaagattgctgcttacagtaacaaccacactaggtggcacaactgggcctgtatgtgtccgtcctccatggtcacgtgaatcctactcctttaaatcggca

SEQ ID NO: 25844 - DNA, 191 bp, Zea Mays
gatggtgttaagtgccggtgggctcggccttcttataagtctaagtaacccttttatacttcttattgaggatgatcccttgaactagcatatatttcaaacttatacttttgcaatcactccgataaaataatgtaaaatttttgtaacttgtaaaatttggtaataagatttccgctgcaaaaaaatat

SEQ ID NO: 25845 - DNA, 2217 bp, Zea Mays
aaaaaagcacacgcgttgcgcaaaaggggaaacaggggatctccacctctgccgccgacccgtgggaagagaggagcgtgcgacggcacgcagacgcatctagtctcccgccgcctctactgtcctcgccatcgccagcaccccaaggctcggtacgattcggctgcgtgcccgcgcgtcggcactgcaccgcggcgcgcaggcggaccgtgctggggttttggtggggtgtagggaggggcgtcctgcgctctgcggcggcttgatcctgtgaaggcggcggcagcagcagcaggcttctccgatgcagcggctagtgggggtgggcgagaggctattggcaatcggaacaaataggcgggcggccacttattcccattcgagccacagaagtgggtactacacagcagtgagggacaatggcttgtcaacaaggcgtaagattccagccatcttatctagaatgttctcacattacaaagtcattagcagaaagaacagagctgaggatcacaagtgtagaaccaggatgtcaagaggctaccacacactctctgtgtcagtgacgaattcatctgcaacccagcaagcacatttggcatggaagcagcttggtcatatgtacacatatagaggtccacggttcccactgctgggccgagcagcttgtgctgtaagcctgtccttcacgaggttccatataatccctggggtcatggctctagctgttggcaagatggcgcttgcacctcctgtccttgcagactcgcgacccttcattccaagaatggatggcatcatcacaaaggcacaagatactcgccaatttctgtcatctcttgtttgctcaatctgggagggcatcactttgcttgttagagctgtgcatttggcattcctattcttccctgcaactgcattagctccatttgctgacaagtttagtattgcattcaggagaaggtggcttagtcttatgcgccggacccttgaaaaggctgggccagcattcattaagtggggccagtgggctgcaacacgccctgatctttttccaagtgatctctgtgtagagcttgcaaagctccatagtgctgctccagcgcatggctttgcttacagcaaggctgccattgagaaggcattcggtcgtcagctttctgaaatatttgagtcctttgaggagaaccctgtagcttctggaagcattgcacaaatacatcgagccacactaaaacatcaacatcctggaaagcatgttgcagttaaggtgaggcatcctaatgttggagaatcaatcaagagagactttctactcattaatcttgtggcaaaggcttctgatatggtccctggattaagctggctgaggctggatgagagtgttcgccagttcgcagtattcatgatgtctcaagttgatctttctagggaagctgctcatttgagtcgttttatctacaacttccgcagatggagacatgtgtctttccctaagcccttatatccatttgtgcatccatctgtcctagttgagacttttgagaatggagaaagtgtttctcgttttatggaagaaatcgaagggaatgctcggatgaagaaagaccttgcacacattgggacatatgctttcctgaagatgcttctggaggacaattttattcatgcggatatgcaccctggcaacattcttgttcgtttaaatgagaacaagcttgcaaggagacgttttttcagagctaagccccatattgtgttccttgacgtgggcatgactgctgagctcacacgatctgaccgggataacttacaacagttcttcaaggcggtggctactagagatggccgtactgctgccaagtgtacccttcagttatcaaagaatcagagctgtccaaatccagtggccttcaccgaggagctagacaagacgtttacattttggggaacacctgaaggggatgtttttcatcctgttgaatgcatgcatgagttgcttgatacagttcggcgccacaaagtcaacattgatggcaacatatgtactgtaatggttaccattttggtccttgaggggtggcaacgcaagctggacccaggctttgatatcatgcaaacgttgaagactttactgctagagaaggacataaagcaaccaattgattttttctcataaacaaacctgtcagggaatgatatcgcagctgattacgc

SEQ ID NO: 25846 - DNA, 2578 bp, Zea Mays
aaagcgaaaaatgcccgcccgcacctgcgtgcgtgtgctgtgtgggcatgggcagcgtcaccaaagcgaggctcctctcgtcccaagcgccggttaactccgtctcagcgcacgcggcacgcccctaatcttcattcccccgaaaccctagccggtccttggccttgtcccggtcgcgccgctcccgtcgcctcttccgcggaagccgtcctctgcgcgtcggcggcggtggagatggcctcctcgtcggcatcttcgaggcaccaggtcaccatcaccctcggccgcagcggtcaggttgttaaaaggaggactatatctgatgatattaacggcgatgaaatgccattgtcggggaaaaaacgatctgtgagggataggttaggaagtaatgtgtctgattctgatttttatggaagccagcagaggaacaaaaggcaacagacagaaattaatagctcacatggagatgatggttcagatcgcttggttggcaaggatgatctgagactgaaactcatgaggaaaggctcgtttcagaggagcaatggtggtgcagaacagaatacaatggatctccgtgaaaagctttcccgaaatcataagaagttgccaagatatgattctagaggccatgctgcagaatcaagggctagttatgatatgagagatgagccaccagagttaaggtccagatatttttcaagggaggatgtcctagggtcaaggaactcttctgttgtaagtcgagttccttattcaagaactgcggatgacttgttaaaatcgaacccttcaagaaaatcttacccctcatggacagacgatggtttgaggcacagatcacctgaaaggattttaagtgttcgtagtgatgtgtctccaccagtaggttatgatcagattaggtccatgccaccacttagatctgccggttcctcaagacctcaaagttttattacaagaggtgctcctgatacgccaaggagtcaaccatatgctggcaaagccaccatttctgttgatacagtacagagaactaatgggatcactccatctagtgcacctttgcctaaggtccctgttatggtttgtatctgtacctcctctcatataccctaattcatcgatgcttctgagaaaacatagggcattttggagcaaaattccttttcttttgtgcacaacattttcaaattctttctaaaatcacgtctgactgtttttaatgctgttggggctatgaaattggcatacagtcaacaacaataacaaagccttttagtaccaatcaagttgggttagtctagagttgaaacccccacaagtcaaggatcagacacgtggatagctgttttccatgtcaatttcagccttcccctgcttctttccacatgtccaaaccatctcaatcggtgttgaacaagcttttcttcaattggtgctacccctagcctatcatgtatatcattgttttgaattcgttctcttcttgtatggcttcaaatccaatgtaactacgcatttccacaatactttatttgttgaacatttttttgtggacaaacattttgcaccatgcaacatagtaggtctagtcgccatcttataaaacttgcattttagcttctacaagaccctcttgtcacctagaacgctagatgctcaccactttattcactccgctttgattctatggctaacatcttcatcaatatctacgcctctctgtatcattgattttaaacactgaaaagtattcattcttgggcactacttgacctaactagcatctccttcctcatgtgtagtagtgtcgaagtcacatcttatatatttagttttagttctattgagtctaagaggttgtttggcatcgctctagagcaaaactccgaaggggagctggccagagctagccaaacaatgtaactccaaacttgcaaacttcatagagttttgagagctacaatacaaacttttagagtacctcttttgctgctctaaaatccttaaaaaacaacttagatatggagtttgaaggtatttacccgccactaccactagttatgagaaagcaatctagactttggagcagaactgctccatccagagttttggagcagagatgctctagagtggagcggagtcatgccaaacaccccctaactctagggtcttttgctgcaactccaatttcctatttgctcttgcttactttcatcaactagcattacatgattacatcgtccgcaaaaagcatacaccaagagacatcctcttgtatgtcacttgtgacctcatccatcaccaaggcaaaaaggtaaggctcaatgatgacccttgatgtagtcctattctaatcggaaagtcattcatgtctacatgacttgtcccatcattgttgtacatgttcttaatgagtctaattcgtgagaactttatgtttgtccaaagtcgatcacataacattccttggtattttgtcataagctttctccaagttaatgaaaaccatgtgtagattctttttttggccaaagtggctcatcagcatgatgttaactcccatggtgga

SEQ ID NO: 25847 - DNA, 4046 bp, Zea Mays
ccggttctttctccaccccgatgcccctccccctcccccgtgtgatcccctctccagatcgatgtctgccccggccgtaacccccgcggctcaccgcacgaaaccgccgcgagatcttggagctcagcctctgacgatggctacgactacctcgccaacctccgcgagctctgtccccctccctctcctccaccggcggcgggggatccttggccatgttcctcccgaggcgccggtccacgcgcttcggcctccgcgtggtcatcaagcctttctgatggctcggaacagaggtcagctatgcgatgtggcgtggcgaggttaccgcgggcgccgcggaggtggagggggaaggggaggacgagggcacgggcaagagagcgcatcgctgtggacggtctcgtgagtgagtgctgctgcctgcccctctctctctgcctgcgttctcctggtgctgctctccctctcctcccctgcttcgacctcccgcctttccccaccgtttcttggatttctaggatccagacaaccgcccttgtgagcctgccttcctgcctactacctgcgtacgtacaggagggaccttgggtgatccgggtgcttggtttcttggttctacggctttcgctgctgttggatttgccgagccggagccgacggagatgaccgtcgacgagctgaagctgcaggcaagggccagcggcggccacgacctaaggaccagttccccgtcggcatgcgcgtgctcgccgtcgacgacgacccgacctgcctcaaggtcctcgagaacctcttgttccgctgccagtaccatgtgacaacaatgggccaggcagccactgccctgagctgctgagggagaagaaggaccagtttgaccctgtgatcagcaacgtccacatgccggacatggacggcttcaagctcctcgagcttgtgggcctcgagatggaccttccggggattaacagctgaaaacctcgcccgatttgtaaagaagttttcttgttcaatgcggcattgaatttgggaggaatgacaagtctcatgaaaacttctgtatgccctacacgtgaccactaaaagaaagagttagacaggacaaaaggctgcagcggcagaagaagagcttttacatacccttacaatgctgattttgatggagatgaaatgaatttgcatgtccctcggacggaggaagctcgcactgaagcgcttaattctcataggggttcaaaataatttatgtactcctaagaatgtctaacctgatgggcgggtttgtatctctattcttcatccacccagtgaagatccaaacggttatgagctcgcaacttgtaggtactgatcacagcacattcaactccacacagattgtccatgtttctttcagtcaccatgatttatcactaggtcattgtgtttgtggccaacgagtattgttctaacagttatgttcccatagctagctagattcattgttgtgttttgttcagggtactttcaccacttctggtatggttctgtctgtaatgtgccagggattattatattgtttttggtttggatttggaatggtttggggtccacaacgatgatgcgtcagagctgttccaaggattggatgatttccattcccctgctgccaattcgactaggctcgccgtctccgctctgcccaactggcaccaagcagccaatggaacttgagcagccaatggatgatttccattcccctgctgccaattctccgaactgctttgacccttcaactcaatccgcatgtacccaggattctttgcttgctcttctacttctgaaaattcgcaaaatggatagataattccagttaattttaatccattacagcgactgggtgcggaagccggaagggagaggcgcttggttgacccagaacggacgacaagacaccgccgggggttcgctgcaaccgcacgcgtggtggccggtgtgggaaggagcccactgctcaagcagcgacgacttccgtaacttctcaggccaagggagggagggcagcaaagaaagcaagcaagaaagaagccgattccactggtggttaaggttttggattaaaggagagaggtgcagagaaaaaaaggttgcaactccctgggccaagcagtagcccagcaagttcagcaccaatggcagccatatgaaatataaggcaaagcagataaaaagcttaatttttttcaataaggtaaaggcaatgacagaaaagtgaggagggtcagaggtgtacagataaggatgagggctgaaaagaggagcaggaagggcatgatgaaatcagtgtttgctatttagcctccttcacaactaagatcatcctacataatagatttagacaacaaaaacttatggagtttgctgaaatgccctttcaggcatgctccatctgtgctacaagggtcagaatggacttgataggacatttgactatacaacatggaagttatttcaagatatccttttttaactatgctgtcgttgctgatcatttgcatttttacatttttcacattatactatagttgaagatacattcctgaggacgaatgggtgcagttatgggcttcctgcttgctgccagcagtcttttggtgcttttatattgctattaatttgtttgaaatttattatggtgatgactgggaaggtctttttgaggctattactggttatggccttggtggctctttggccgtgttggtggtggtatttataccaaggctgctgatgttggtgccgaccttgtggggaaggtagaaagaaacattcctgaggacgatccaagaaacccagctgtcattgctgacaatgttggtgataatgttggagatattgttggaatgggatcatatctctttggctcatatgctgaatcgtcatgtgctgctcttgttgtggcctcgatctcgtcttttggaatcaaccatcaatttactccaatggtgtatccccttcttgtcagctctgttggtattatagcatgtctcataacaacgctgtttgcaactgatttcttcgagataaaggctgtgagtgaaatagagcctgctctcaagaaacaacttataatatccactgttgtgatgaccattggcattgcgctcatgttggcttggtcttccatacaccttcaccatttataactttggagcccagaagacagtgcaaagctggcaattgttcttgtgtgtggcggttggtctctgggctggcttagtcattggttttattactgagtactacacaagcaatgcctacagccctgtataagatgttgctgattcctgcagaactggagctgccactaatgtcatttttgggcttgctctgggttacaaatcagtcattatcccaatttttgctattgcgtttagtatcttccttagcttcagccttgctgccatgtatggtgttgttgtggctgctcttggaatgctgagtaccattgccacagaccttgctattgatgcctatggccctatcagtgataatgctggaagcttaagtctgtatgggtgcatcttatcatttatatgtatatctgaaagcttaagtatttttttaaatagaagatgtctggaaactttagtaacgacatgagtttcaggctttcagctatagcagtcttattcgcttttaagacagagaagatttttatttagagtttagaaagagtaggtgctatgggtgcatgttatcatttatgtggggaacatctctggtggaaattaatcagtaacgacatgagttaagacagagaagcttaagtattttttcagctatagcagtcttattcgcttttaagacagagaagcttaagtattttttgaatagaagatgtctggaaactttagtaacgacatgagttaatcagaagagatggaagggtagtttatcaacatgtatttggcacttcgccgaaaatgtcacttggactatcttgcaaactgaattttcagattggcttcttctgtctgaacattcagttcagtcttgcaggattt

SEQ ID NO: 25848 - DNA, 454 bp, Zea Mays
atttctaatggtttggttcatttccttttgatattttttttttaattttttttcgtgtattgctttagagacagaaaaaataaagaaatttctctatgaaactcccttacagcgaaatccctatctgttgtttgcaatccaactttgttgtgcattagtgttcttgtactcacccctctgtccaaggaccaaaatgggaagctggtgtcgtaatggtttattgaaggaaaaaaacagattgatacctggttcttggttcatgttgctgggatgccttcacaccaatctgcaattttcatcatatttggctggtttttcctgctcctgatcagattttgaaagagctaaccattgcccacaatcaacttactgtcggttgggtcagggtgctgctagctcctcccaaaggtaaagtttttttttatcacgcctagtgtttcatatgaaatcattt

SEQ ID NO: 25849 - DNA, 3563 bp, Zea Mays
ccccaaccaaactgacctacccggaaaacgagccccccgactcccgcctgccgccgccgctctgccagccaaacccaaactaaaaccctcgccgacggcgcgcctgttgttaaaccctagaaaaaccagcggcgacaggagtggccgcaaccccgccgccggagggggctccacgaccagatagaagagggagagaggatggggatcttcgagccgttccgtgcgatcggctacatcacggcgagcggcgtgcccttctccgtgcagcgcctcagcaccgagaccttcgtcaccgtcagcgtcggcaaggctttccaagtctataactgtgctaagctgaatttggttcttgctggaccccaattgcccaagaagatccgtgctattgcatcctacaaggattatacatttgctgcttatggaagtgatattgcagttttcaaaaggactgaccaggtggctacttggagtagacatgaagaaaaggtcaacatgctatacctatttggagaatatgttctaagcgcagatgctaaaggtaatgtattcatgtgggccttcagaggagcagaaccaaacactgaaccagttggaagcatatcattgggagacaagttcaccccaacatgtatcatgcatcctgatacttatctgaataaggtaattgttggtagcgaagaaggctccttgcagctgtggaatatcagcacaaaaaagaaactgtatgatttcaatggttggaactcacctgttcggtgttgtgtctcttctcctgccctggatgtagttgctgtcggatgttctgatgggtcagttcatgttcataatgtaagatatgatgaagaattgatgtctttcaaccaccagattcgtggtgctgtgactgcactgtcatttcgaacagatgggcaaccccttctggcttctggaggttcttcaggcgttatcagcatatggaatcttgagaagagacggctgcattctgtgattagggaggcccatgatggttcaatagtttcacttcacttttttgcgaatgaacctattctgatgagttcagctgctgacaattcagtcaaaggacaggggcaacaagaaccttctttctggcaactagcatctggcttgatagcctgctaataagtgcagctaacaaaacatccgggaacaaacttacaattcctttaacactgttacctgttatttgtctcgtttcactttgtgggtcctaatctaatatgctctaccagatgtggatatttgatagtaatgatggaggtgctcgtctgttacgatttcgaagtggtcacagtgcaccacctaggtgcataagattctatggcaatggaaaatgcatattatctgctggccaagatcgtgcatttcgccttttctcagttatccaggatcaacaaagtagagagctttctcagaggcatgttgcaaaaagagcaaaaaagctaagagtaaaggaggaagagatcaagctaaaaccagttgttacatttgactgtgctgagatacgtgcacgtgactggtgtaatgttgtcacatgccacatggatactccacaggcatatgtatggcgtcttcagaactttgttattggtgaacatgttttgacaccatcatcaagcactgtgacaccaattaaggcttgtgtgataagtgcatgtggtaattttactatcttgggcactgaaggtggttggattgaaaaatttaaccttcaatcagggtttagtcgtggtagttacattgacacctcgttggcaatgcaatgtgcacatgatggtgaagttgttggattagcttgcgatgccagaaatggctttttgattagtgctggataccaaggtgatattaaggcatgggattttaaaacttgcaagctgaaatctagattggatgttggtaaatctgttactaaaatcgcatttcaccggccaaatggtcttcttgctacggtagcaggtgatatggtactcatattgtttgatacggtgtccatgaaaatggttcgtagatttgaaggacatacagaccgtatcactgatttgtgcttcagtgaggatggaaaatggctcatctcgtctagcatggatgggactcttaggatttgggacatcagtttagcaaggcagatagatgcaatgcatgttgatgtatctataacatctatctctatgtctcctaatatggatgtgttggcaaccactcatgttgatcaaaatggtgtctacctctgggttaatcaatctttattctcggtctcaacaaatactgaaaattatgccagtggtaaacatgtacggaatgtgtgtttgccagctgtttcatcaacagagagatctgaggaagaacaagttcagaatttaggagagtcatataagtccagtattaaaccttttgtcataacggatcatcaaataccgaatctagttaccctctccttacttccaaagagtcaatggcaaagtttgactaatcttgacattataaaggttcgcaataaaccaattgagccacctaagaaacctgagaaggcaccattcttcttgccttcagttccatccctttctggggagatattgtttgagcctcctgccagctcaaaagatacagacatcagtaccacgaagaatacaaatcataagatgtctgaactctcctctcatttcagtcagcagttgcaattttgtggtgaaacaaagaactattcggcttttactgactacctaaaaggcctgtcaccgtcgtctttagatatggaactgcgaatgctacaaatattagatgatgaagagtctgaagatctggagcaaagacctgagcttcagtccatttcttcgctgttggattatttcattcatgaactttccttcaggaataactttgagtttgtccaggctgttctgaaattgtttttgaagatacatggtgaaacaatacgacggcactcaatgcttcagagtaaggtgaagaagcttcttgaggtccagagcttagtttggcagaagattgataagatctttcagggtgcacgatgcatggttacattcctcagtaactcacaattttagtagcaggccggagttccacataccagggcatacatggtgcctaatgcctgcacgagtgtggccattggattgagcaagtggatatagttgattttttttggagacggcattaaaatggatctggttctcaaacatggcatgactaggcattggagcattgttgagcagcagccatggctatattactctaggcttacaattttgctgtagctgttagtctgttacacagcaaggagtccacttggtaaacatttgtagctaccaaaacagccccatctcatggtgtaacaattttgtagttttacatttgtgtcatctttttgtaacaaactgatgtatcaaacaccgtattgcaagaaatactaaggcttgccattgctatttgaacaaaaaaccatatctgtatattcaacaagcttagcttctgtgttggtcttatattgtggaggataccaggtgaaaatatccaaatgtacctaa

SEQ ID NO: 25850 - DNA, 2384 bp, Zea Mays
cctgggaatggattagacttcactattattagccaagctgtaacttcaagcaagcgactgtgatgtcatcccaagattctattggcacggtgctcaagtgtatgcagaagggtgcggtggacttccttgtgaaaccagtaagaaagaatgagctgggtaacctgtggcaacatgtgtggaggaggcatgcaatgaattgccagacaaatggatcagaaaataatgcagccagcaatcatgtaagtaccaatgttgctaatgggtcaaagacaggagaaaacaatgatgaggaaagtgatgcccaaactgttttgtcttgactagagctttggtaacaaaagggagactgaaattaagagtgctgagacgttaccagatattcgtagagatgaaatggctggctcatccaaaaaaattgaactacaaaataagtctaatgatggagtaaacacaaaagtggatgcgtcaaaagatagcgatggtgctccaagtgaaagtgagaagaatgtgcgttccaaatgccttaatggtattacttctgcaaaggtggctgagcaaataatggataatgccttgaggatcacggatgcaagttcacgtcgtccaaccaatcttggcaaagatttggctatgactgaaccagcagctgatagaaaatgccaatctttagtgatggaaaataatgctgtcaaagaaaagaaccctggtgaaaagtcgaagagtgctgtaataggtcatgctgattcttacccctcccaatttctcgagaccaacttgggaaaacaacagtatcgtaatggttacaagaatcaagaattcagggaaaaagatatctttaatcactcgaattcttctgccttctcgagatatggcaatagaaggatagaatcatcaggtgagatacagtttcttccttctcgttgcattgttgggcaagagcagcatgttcatggcaaggacccagttttccaacccaatggggtcttgctgcctcccaatgaccataatacaggtgagagtacaaggcaagctcgaattactctggacagtagcatggagggtgctgacatcatttgctccagtagtgctagggaagatgctggtgcaagtagttcttcccatagaaaggacagtatgagccatccctcatatgggtttgtacctgttccaattcctgtcggtgccatgatgccctatcattgtggtgcaattctgcagccagtatactacccacagggtccacttatgcactgtaattcatctgcaatcaacaaggcaacaattcatcaaacctctggccaatctaactaccgtgaagattgtggtagtggtagaccatctcaggttgatgaacacaaacagtcagaggaaaagcaccagttgcatcattcaagacaaattcatcgggaatcaggacaaccagttgacatggttagagctcacatggatcatgctaaccagagtgcaagctgcagccgggatatctgtaaaggaagcggatgcacgggtagcggtgaagccgataccaatgcgaacacgacggttgccctagagagtggcaacgagagtggcatccaaaatagtgacaggtctcaccgagaagctgctttgatgaagttccgcatgaaaaggaaagacagatgcttcgataaaaaggtcaggtatcatagcaggaagaagcttgcggagcagaggccaagagttaaggggcagtttgtaagccagaagctgaaagcagctatggcaacggaagccgaaactgactcgtgacgggcgctagtccagaactgtaattttggttcttcccttcgcgccaggtgtgggcgattggactggtaagtctgaaggctggcaaaagtttttttttcttccttccatggttagcctttctgtacaaaggtgaactccacgtcgggtgtttgttggcatccaagccttattttttgcgaggtacatcaagttgacaaaatgttcggagggatagggtgaaaacggtgcaagcgccatatttcgtccatacgcttaggtgtttgtggagtgtgaaagcagagcctgtacagcatattcaccacccattctgttgccattacaattgtagtaacttgtaattactactatgacaaaagtagacactgttgtagaacttacagccagcaggtcttttccatatgggacagtagcattttatttattaattggttgatcatatgaggacagtcccgaatgcaggacagttaagatttgtttgatccaatccaatcatccagcattttgcttgccttaaactggacaaggaatcagcagggtgcacaccttgtccttgtcagctattggtacacagcagcatatatcctttgcctgtgtttgctgtactactactctgg

SEQ ID NO: 25851 - DNA, 1200 bp, Zea Mays
cgagtgcagataggccaaagctccaaagcgaagcagtgtcactgaagcggaaaacgcgtcgccttcaggggtcagctgagagagtgttgatctcacctttgctggtggtctggtcggcggcgatggagcctctggaggtggccataacgatcatattcgacgcgctgctgctggtgttcatggtgaagctcttcttcgccatgttccagatgaagctcgtcgtcatcctcttctacctcgtcatcctcctcttcgccatggccttctccggccgggcgcccagcagcttctagctcgtagcagctggcagagaactttcttctcccccctccccccccccccctcttccgtttcttctcctttggggcttgttcggttctaccccaatccatatggattgagggggattgaaggggttttaatccctagcaagtcaaaatctctctcaatccatatcaatcccctccaatccatatggattgaaaataaccgaacaagcccttggagggtagatcggaggagtcgtgcagcagtagcactacgtcctgtgaaaagagtatcatctcggtttttgttttgttgttgttgaagagtatttttttttctctagaaaaaaaaggtgcgcatgatccgaggcgcaaattgcgtaagcgtgaagagagatcgtacgctcaaaacacgtgaactagtcaatcttgagcttcgatctccagcctttcatacttctatttccatgtaatttcgtgacgtcccttgcttttttgttacacgggtctagttgttcggactactgtagctacaattcactctagataaaaagtagtagaagttgatacgaattaaagtcaaacgaactgcatggtgatttcgtggatcacacagtagtggtgcatattaaaggagatgaagacatttgttttcttggaaaaaaattggttcttgtttggggttagttgtaaaatagtgtctgttgttttttgactggtataaaaggggttccaacttttcctagaaccctagctcttgccttgtggcctccatgatcaaagaaggtcccgaaagtgtgtctttatcgactgcacgctcactgatttgtgcaatacaaaggagggaaaaaaagaaaagaaaaggagcgtggactgtggtactggtgcaaacgctgatgcaaaattggcgccacactcacgctgaagcgaagca

SEQ ID NO: 25852 - DNA, 1429 bp, Zea Mays
catgtccaacgtggttctgggtggtttgtgcaacctgaagctgactgggggacctcctttgctccttgtgctagacatgagacgccggcatggtttggacttgaatggtctctcctactgttacgcgatgaaagtatgctatcaggatgaagaatgcatgactggaacaaggaaggaacgcagcttcatggagtggttagggtgggttccgtcaaatggtccagagtcttatattgcgctgccttcagatgtacatggaccagaaagaagtggtcgatgccctctcccaccactcgaagatagagccctgcattactgaacttgtttggcgacaacttgagcatcaaaatcctctgtttttcaaggcgtactatatgagactaatgcttaagaatcaaataatggtcttcaacaagcttcttcaggatcagtttgaggttatcaataaagaattttcttcagggatcccttctatgtcgcttcctaatggctctaactccaacctattgaagcaaaatccatgctttttgccagagactgctcctggatctgcaatgccagatggtataatgcacaatggaagttcgcgtggtataataaatggcacaccatctggcgatcaattgctcaatgctagtaaagacttgcatggccttcataatggaatagatgcttcgactagtctgcagtcagaccagaacgcagctgctgtgctgtatggtgtagacaacgagacaagtgcaacgataaagaccgagtcttgctattcgagcaatgctgattttgctttctgtgggaatactttcctggaatcgtgccagtcaataggcgatgcatctggtggtggatccttcagtagctcagagctgaacgggcaaccactaaacgattcaattctggatatggaatcatcgtcatttagcttcttgaaccaaatgccccaaagcttcatctttccggacttgggagacgatttcaaccaaagtgcagagataacacaatttctcaccccggaaacaaatttctccgattcgacagggggagaccatacagcaggttgagcggggtcatgcacagcgcaccaaccatttgtacatacgctcatgggcagtcaaacctgcactgatgaagagcttgaggaccttttgatctagctgtttcttttttctactcttctcgtcttatattgtggtagtttatgggttggtcttctggtatgccctgcgatggcgtcgttatcgtgccttgtacattgccgtgcttgtgtaagaaacattaggagcggcgttgttcgcgtcagcattgatttggctaattcctccgcttggcttggcttgtacaacgaattttatcaaaatattaactggattctgaaatcgagattttcgaccatcggtttgtgctattgtgtatgctgcttccaactatc

SEQ ID NO: 25853 - DNA, 1453 bp, Zea Mays
cctggtctcgtcgccctaaccgcacccttccaatgacggggcgctagcgaagccgcgcatcctccctgcatctcaccggtcgtcaccctaaccgcgcccttccaacgacgaggtcgctaccgaagcgccgcgcatcctcctcgcatcttcgtcgctcctgcgccgcgccgaaatcctcccccaccgcgcccttccatcgacgaccatggcggactacccacgcgtcatgcacgccccgccctccgtgcctgtcctccggggccagcgcgctcccctcctcctcaccagactctgccgccgcgggtctggttgcccacctcaactccgaggaacgaggactccaccatgctcgctctagagacaccgccttcctgtcctccgctcaccgtgcttgtcctcggatccacgactgccgccccgctccccccaaataccactgatgcagggatccaagcccctgccatctattcagccgccccgacgtccacaggggataccaactgatgggccaccaaccatgttgttccacgctctgggctgctgctggaagctaatcaatcgcttggttagaccatcgcagattagcggtgggattcccaggttcaataatctcgtttcgggccatgccctcgatgtcattatctggcttgaggtttgtcgtggagaagcaaagggatgtttacatgtgctctattctaagtcttagggtctgggattaattgggcaagcatggagtattcgcttggttctactcaagaagggaatcaaggaattcaggactttatgcactgattgtaatagtccaacgaaagagcggatccacatgttaaaaatctcagcaagtgttcctttctgacagagtttcaacttatgtgttactaatgtagaagggatcccaattacttgctgcattgggtgatcgaacagtcatagtatggagtttaggaaacaggaaatgcattggtctcttgtttgggcatactgggagcgtgaggtcgttgccttgccattcctccaatccggagagaacaagaacttgactggaacatcaagataagcaagtatcatgtattaagggtgtggacggttatgttgcctttttcacaaacttcaatttatgatcaattgcaagcaagatgtggtctagctgttggaatgcggatcacgaaggtggtgtcttcactcttcagcatgttccagtgtcgtgtgttccagatcgggttgctatcgggagtctgttggtttgcatggaatcaatcaggtttagcttggattcatgaataattggtttgtgtcgtccggctgttcgagctacgtcatcatgattagaatctacatttttccctacgcttgtatttaaaatggagtttacaaagataatcgttagaatggaatcgaaggctcattttttgttctatctgataatagccgaacgaatgaaatgcaatttaaa

SEQ ID NO: 25854 - DNA, 1520 bp, Zea Mays
cttgggtttttgggttttgtgcccgccacctgatcgcgggagccgtcgccttccttcctcctccccgccgcctcagccctcatggtcatggagaccggagaccccgggaagctgttgcgcgggcattccctctctcgtgttcctcccgcttcccctttccctcggctcaggcctcagggagatttggttagggcaggggacgaacgagcgcgggcgtcaggtatgccgggagaggaggacgtccgcaaggtctcgcgcgaggacatacagcttgtccagaacctcatcgagcgttgccttcagctatatatgaaccagaaagaagtggtggacaccctatctttccaggcaaaaatagaacctagtttcactgagatcgtctggcagagactcgaggaagagaaccgtgatttttttaaggcatactatgcgaggctgatgcttatgaatcaaatagtgtccttcaataagcttcttgagcagcagcatcagattatgaataaagatcatcattatgggatgcctgctatgccttctactgctcctaatggctcaaacactaacatgttgaaccaagccatgccatttctgccagacactatccccagtactgcaatgcaagataacttgttgagtaatggaggttctagtagtatagtaaatggtgctccatccaatgaccagtgtagctattctggtaaagttgctcatggccttcctggtgtcatggatgcttcatcaagccttctagcagcacacaaatcgacagttgggcagtttaatggacacaatggaacaacgacaaagacagagtctgactactcaagcaactcagattttggattaggcaatgagaccgtgttcctggagcagtcatttggagatatatcaggtggatcgtttagcagctctgagttgaatggacaaccagtaggttcatcttcgtatggtttcttgagccagattccttgtaatttcagcctttcggattggacagattgtttcagccaaagctcagaaatttttgagaattacggtgggtcccctttcatcccttacgatgcaaataacatcccagagtctagcgctcgagaaaatacaggttgagcagtgttccatttgtacatactattttgggcagaaacaaaaatatctacagtcgtgatcgtggaactagctgacttggtggcaaccgtttctttttctgttataggttttgatgcttcttagagtagaagcatggatggcttcttttgaagggtaggaccaaataatctgtcattgaatggtgtcaacaaaatcatcttctgagggtaatgtggtggtaaactgtattcgttgtactccttccgtttctttttagttgtcgctggatagttcaattttgcactgtccagcgacaactaaaacgaaacggagggagggagtagctttctagtgtggaagctcttcgataacgtgaaagttctgcttttgaccttgttggctgttgcacaaggttatgtctgcagtgtttcttg

SEQ ID NO: 25855 - DNA, 2593 bp, Zea Mays
cgcctggcgcctttcttctagactaaaactcggtaatggaaggagcaacatcgtttcttttcaccgagtaccaatatgttggtatcttcatggctatcttcgctgttgtgatcttcctcttccttggttcggttgagggattcagcacgaagagccagccctgcacatatagcaaggacaagtactgcaagcctgcgctgttcactgcactctttagcactgtgtccttcttgcttggagccatcacctctctggtctctggtttccttggcatgaagattgccacatatgcgaatgccagaactaccctggaagctaggaagggtgttggcaaggcttttatcactgctttccgctctggcgctgttatgggtttcctgcttgcatcaagtgggcttgtggttctgtacatcacaattaatgtatttaagttgtattacggtgatgactgggagggtctttttgagtccatcactggctatggtcttggtgggtcgtccatggctctcttcggaagagttggtggaggtatctacacaaaggctgctgatgttggtgccgatcttgttggaaaggtcgagaggaacattcctgaggatgatcctaggaacccagctgtgattgctgataatgtcggtgacaatgttggtgacattgctggaatgggatctgatctctttgggtcatacgcagagtcttcttgtgctgcccttgttgttgcgtctatttcatctttcggaatcgaccatgatttcactgggatgtgctacccactccttgttagctctgttggtatcattgtctgcttgatcaccaccctttttgctactgatttctttgaagtcaaggctgtgaaagaaattgagcctgcacttaagaagcagctcatcatctccaccgtcctgatgacttttggtattgctctaatcagctggttggcccttccagctaagttcaccatctacaacttcggtactcagaaggaggtttccaactggggtttgttcttctgtgtttcaattggtctgtgggctggtttgattattggttttgtcacagaatactacactagcaatgcatacagtcctgtgcaagatgttgcggattcgtgcagaactggtgctgccactaatgtcatttttggtcttgctcttggatacaagtctgttatcatcccgattttcgctattgctgttagcatctatgtcagtttctccattgctgcgatgtacggcattgcagttgccgctcttggtatgctgagcacaatcgcaactggtcttgctattgatgcttatggtcccatcagtgacaatgctggtggtattgctgagatggctggaatgagccacagaatccgtgagagaactgatgctcttgatgctgctggcaacacaactgctgctattggaaaggggtttgccattggttcagctgctcttgtgtccctggcgctttttggtgcctttgtcagcagagctggagtgaaggtcgtcgacgtcctctcccccaaggttttcattggtttgattgttggagccatgcttccgtactggttctctgccatgaccatgaagagtgttggaagcgctgccctgaagatggtggaggaggtccgcaggcagttcaacaccattcctgggttgatggagggaacagccaagcccgactacgcaacctgtgtgaagatctccactgatgcttccatcaaggagatgattcctccgggcgctctggtcatgctgactcccctcatcgttggaaccctctttggcgtcgagactctctccggcgttcttgctggtgccctggtttctggagtgcagatcgccatctctgcttccaacaccggcggtgcatgggacaatgccaagaagtacatcgaggctggtgccagcgagcacgcgaggaccctcggtcccaagggatccgactgccacaaggccgctgtgatcggtgacaccattggtgaccccctgaaggacacctccggcccgtccctcaacatcctcatcaagctcatggccgtggagtccctcgtgtttgcccccttctttgccacccagggtggcctgctcttcaagtacctgtaaaagggacaacaccaagcacacagcagaagtatacgatctcccgaccgaccgtggacaatatcgaataactcctgccaaatcgccagttccttttgtgtactgtgcgctagccgccgcctagctgcactgctgtatttttgtttcaggattgctgctgctgttcgcattcaatctttgggcctcccggagccgccggaggcgcgttttactgttagccttactactcttactccctgtagctccacgtagaagaaaccgatgtcctgcgtctggcaatttttcttagtcccttgatgatggcgatgatgctgaaacctttttttgaacaatgatacatgatgattgttgcgttgtactggtggtaaatcacggtccgtattggcctgttctgttggtgcccatttccaatcatccaatgtcgtgctctgcgttatacgattgctgtttgtactgtcatagctgctgccgacaaggtcataaagaaccttaaacttgaagcc

SEQ ID NO: 25856 - DNA, 3686 bp, Zea Mays
ttgagctttaaccttgaagtcctaggataatggtggcaaacctttcttcaagtgtattagaaatgaatgaaaaacatagtaccggctgacagcggctgcggcgaagctatctgagcggtagcggagtactaaggggtggagagagggagcactgtctcatgcatgaaataaagtctccaaaacaaaagatttggtccagagcgcggccacacgggcccaacaatagcaacgtcacatggtggttgccattgtcacgtcgagctctccctctccaccaactaacagttcctgacggtggagcagaaattcattaagagcatatagggattcacaagtgattttgagcccaacaatcttgctgccatcgatactcctggttcgtatatttggttactcaaaacatgagatgatcctctgaagtagaaagggaaacaccgaatatgctcttgctgaaatattctatagaaagacacaattccattttggcagatgcaagtgtatggttattctactcatggaagatctacagggaagaaattgaggtagcatataactgccgcaagggaaaatatggtgtagcagatgaggatataatcttatatggtcaatgtgtttgaattggtccaaccattgatatttcttcgcggttgctagacttgagagtcgcagttttgcatagtcctatattctatctgcactaagagtaatatatacagccaagcggacgtttggtttaacatttacaaggtatgtttggtccttttgttttttggaattaatggttgtccgatgcttgtcattcatatgagttctaatatcatgcccccttaaagtactcatcatcaaaagtttccatgtgaatgttttaaatgtagatttaaagggttgaaagacatcaaacagttattcaaacatgatcttaagtgtcgtgaaagactacaagtgaggttcaacttggcaaattgtttttctagtaactaaggagcaacaatgctatgtattttagcttgacttatatatctaagtacttacatttttggaatcgggcaaacagtgatagtttgaatcacatgttttgccaaaaggaattattagaactgttcaaaagttaggaaaaaatacatatttatgctttcttatgcacgggtaaattgctctgttcatatataaaaaaaataattgtagtattattgcttatattgattttaaatgatgaccttattagatgtgccatcgagaccacatatattagcattttgtaactaaatacaatgcatgaatatatatagatagcctttacatcgtgctacatgcttcctagaaataaggaaccattacaacatatatatttttgatgatgtacaacttcgtcatcggatataccgttccttcttttttacatacattttgataagaatgtcaaaatgttaaaaaaatagcgcgcgcatggcgcgcgttagacactagtagatttcagaactatcatgaagcgcgtgctcgctggttgttagttgttacagagcaacagcccagggaggccaagatgctacttagctactaaaaccaactgacaacaagtgcacagcccagtgggccgctaagctgcaagaaaaccctcgcccctcgttctggattgagattctctgcagaggctgcgatgttgggccgtcctgccctgcccggtgggtatatgtaagctcagaccgccaccggaaccttctcgagcccgcggccgcacacctccgcccgaagccgccagtcggactacgaacggcggcggcgcctcggctcccctgatctccctcaccggaatggacggccaggctccgccgcttctcgacgccgtcgtgctcgagccccttgcagttggcgacgagctccatccgcggcgtcctgtcgaggtggaggacgctccggccgccgctccgccctccggtatggacggccaggttccacctctctacaacgtcacgcgggatcctctgaccgtatccgacgagctgcagcccacgggcgaggtggtggatgacgccctactcgtcgcgcccgatatcgtcaagggcgaggtgatggaggacgacatcctacccgtcgcaaccgacatcatcaacgacgccgcctcggagtgccccgaggctggcagtgatggcgtcgtgctcaccgacgagctccgcaatcgcatcgtcaagcaggtggagtactatttcagcgatgagaaccttcctacggacgagttcctgctgaattatgtgaagaagaacaataagggctttggatgtgaattttatgattattatagtggtgtcagggacaatgtatttggtgttcctgttcttagtttttttagccgagactcaaattttacacaagcttatgcttttattgtgtgtgtttctgcattagatattggtgcatttcctattgagatcatcgcatcatttaggagaatgaagaaactcgttcaagacctctcagtaattgaagctgcactcaggacatcatcaaagctggttgtaagttcaaatgggaaacgggtcaggaggttacatccattgccacacaaagaattgaaagattcaaagaaaagcactgttttggtcgaaaatctacctccagatttctcaatggagagtattcaggaaaaattcgcaacagtgggcaaagttgtgaacataacaattaatgatccagaatcagtgaaagaattttcaactgctaagaagcctgacttcaatttaagttttaaggttactgccctaagtgatgagagcaactggagaactgggatgaaagtcaggcttctgtctaaacaaagtgtaatgggaccaggaaagtataaaaaaccttctaaagaaaatcaagatgcagtttccaaaatgattgatcagaatcaacattcaaaagaagaccagcttaaaaccttggaaaagatctccggtgctgatgcagtggggattaccaaggacagagataatttgaaacctgtttttatcactgagactgagcaccaagatcagaagccaaatgctagaggacgaaaaggatggtacaaaggtcaaggtcagatgcagcaaaatgcaaacaaacaaggcagttgtggttccgagtcattaaacaagcctatttctggaccgaggatgccagatggaacaaggggcttcacactgggacgtggtagatctcttccactacagaagtctgagaaggctgaagagtagagctaccaaaaaaggcctgttaagaaccttatccaaagaagctgggtaaaatctaacagaaaacctttgcttttttttttttgaaacttaagatcatcgaagccgttctttgcatggaatgggacacagaagaaagggaatcttggaatggctttctctctgcaagaaatggaacacaaaagggaatctgggaatgacttgtacagaaacacaattgtctgggggtagttccgagttcactcgtatggaacacagtagaacctttgcatgtttcctgacttgcattgtgtcatatactcgtatcatgctgcatgcagcattgcagccctgtttgcaatttcagcagccgggggctggggccgtgagcccgtgaccctgcaccatccgggtctaccacgagcccccctgttctgcgaggcgtttggcccctcatccctatggatctgtactctgtaggctctccttata

SEQ ID NO: 25857 - DNA, 1448 bp, Zea Mays
cagtagttcccaacgggttcgcgcattcggcggcagcaagctggccgcgccaagaagaaacacatcacaccctaagttcctaatccaaatactatactctctctctctctctctctctctctctctctctctctctctctctctcctgtctgctcgctttcttctcgcgcggtgcgggagaaccggagaaccgccgcctcagctccgtctcgccgtggacgcagctgtgacttaaggcaattattggaatatcgaggatttgctgatggctggcactatcataatggatgattctgctgcaagcaccagtggtttgggggatcacaatgtctctgctgattccctttctgagtggcgctcctgcgaacatgttgataatgggatcccttcaacatcccctcccttttgggacaccgatagtgaagacgatgatcctgggcctagaccttcagatttatttgggcggtatacttggaaaatcgaaaacttttcaaaggagaagaagagagaaatgaaaagtgaaccgtttgaagctggtggctacaagtggtatattctagtttaccctcaaggatgcgatgtctccaatcacttgtcattgtttctttgcgttgctaatcatgaggaacttctcccaggatggggccattttgcccagtttactatagctgtgggcaatcttgatccaaagaaagttaaatattcagacacgctgcacaaattttggaagaaggaacatgattggggatggaaaaagtttatggagctatcaaagattcaagatggttttcttgttgatgatgttcttgaaatcatagctcaagttcaagttatcagagagaaagcagacagaccatttcgctgccttgatcgcccttatcgtcgagaacttctccgtgtctacatgacaaacatagagcaaatttaccgacgttttgttgaagaacgcagaaggaaacttatcaggcttattgaagacaaaatgaggtggtccagtttccgtgctttctggcttgcgattgacccaacaaccaaacatcgcatgtccagagagaagagtgacatcatattgaaaatggtggtgaagaatttttttgtcgagaaagacgtgacctcaacattagttatggatgctctatatacaggtttgaaggctcttgaggcctgtagcaatggcaagaaaggaatggtaacttcaattgacttggaggagctatcagcttctatggtccatgtcgatatggacatgtttgttttggctggtgacttcataactttgattgagagggcagctttagagcccttgtcttgtcaatctctgtcaccaaaaggtgacaaatgttcccaaacccgtgctaaggatggtggtactggagaaattaacaaagttcctattgagcttcaagaaaggcgtcttacggagcttggtcagaagatactgaaatatt

SEQ ID NO: 25858 - DNA, 1642 bp, Zea Mays
atgacggggacgaacggtggcatggccaaggagggcggggacaacgacagcgctaggctctgcggctggactggaggtgtcattgttgccatcctgaaccgtgttgccatcctttcgatccctgctgattcgttccgttcttgtatcgattcctgtcgccaatccataagctgcgtttctgttgacgtcaggcagagtcagggtttcatgggggaatcagacgtgaaggaacagcagccgaacaggctgcaggaggagctgaggaaggagaaagagaaggcacgcgccctagacgagatacaagacctgcaaggcgaactggaggcagcaagagattcagagaagaagatgctgctgtcattgcaggctcaaacaaagcagcttgagcagaccaaagtatccctggaagaggccaagattgagatagcttcgctacgagacagtaggcagccgttcaagaatttcaggagaaggggtttgatgtcattctcctttgccgaccctggcgaggcggagacatggtcgctacagcgtgagctcaggttagctgtggaatccgaggagaagtgcaacaaggccatggatgacttggccattgccttgactgaacaaaccacagaggccagagaagcaaatgtgaagctttcattggcgcaagccgagttgaataatgcaaggacccaagtggagaccttgaaggcctcgctagaaagcacagagggcaagctccagttggcactggaagaggcagaccggctaaaagtcgagtcagatgaattggcagctgcctcaaaagaaaaagagagagggctcgttgattgcatcaagatgtttgaggaggacctaagtaaaggaaaggaagagaacgataagctgattgaatcacagagggtgaccagagatgagaattctcggctgagagagatgctgaagcatgcggtgggcgaagctaatgtagcaagagaatcgctggagattgccagagtggagaattctcgccttaacgaagagatgtttaagaaagagagtaccttgcagagtatcaaccaagaatatgaatccctcaagatcagcgaggcagccgcacagagtagcattaaagaattgaaggatatgattgatgctatgttcagttctgagtcgaccaaaacgtcagcagaagcatcacctcgtgaggccaagggaagcaagatgaaggaaacttctgtggcagcagattatgtgtattctgatgtcgaaagatctactcgtctggacgacataaaaaaccctttaagaactgctcattataatttgtagctccaaccatcaagttttccaaaaacttgagtcccttcctttctttttttttcttgcaaagaattgtgtcatcataacaatagccactaaacttggctgtttaaaggacatgctggattgttggaatcctatgtggccgaggtgagagcaagtttggttctatggctagctttgccaggcaagcataaccttgcccacgatggtgagcagctttgcctcactcttgttagaaaagaaaatctggaaagcacaggcaccaaggcgatgctaaccagagaaccaaactctgattccacaccaaccccttgcccagctaggtgacacagtaacctgtaaagaatcc

SEQ ID NO: 25859 - DNA, 2841 bp, Zea Mays
gaatattagctataacctatgtttgattgtgtatatttgtatacttttattgtgtttcaggaaggacaaaatcatgttgtacaggatcctcccacatatggtgcaccaaagtttgatagaacccccagttagtcatgtcgtgacatgttcttatctctactactaattatgtgcctatcgtaggcgttcacaattccttggttctgtcgtcgcgctcgcctgccatctccctccgcgctccatccgccaccatccgcgctcgcctcccttcgcgcatcctacaaccgcgtgctccttccttcgatggtgcggatcccccgtgactaccatctccctccgccctcccgcgctccatccgccaccatccgcgcttcctacagccgcgcgctccttcgacggcgcggatcccgcaccctcgaatcacgccagcagatcccacaatcaagcagcggcgacaggaataggggcgggctacgcgggcgctactacgacgagggtgagggcgagcgctccggcgccgcggcgccattcatcataatcggtcgagctcctggagggaacggctgcagagcggacgagatcgaggagcgggcgggcgggtgccgcccgtgacggcgcctaggctcaggctccgcgacggccgccacctcgccgcgcaaaggtctcaccggctcccgagaggacagcgcccgcgcctcccaggtttcaaaaaaccttctgagaaggcatgtataaaactttgggcaaaaggagatcttcctacctagcatatcttgcctcggaggagggttgttatattcaatactatgggtttgatggagtagtcgatggatggagaatggtggatcgaggagaccgatgacatactgctgcatcccgtgctgctcaatgggaagcagtaccggccagtctggtcaaacgacggcaccgtgatccacgcagatttctagttaagtttcttctgatggtgatggtactaaagaggactatgttcatatccgggcaaagcgaggccaagccactaacagccaaagccttgcagaaagactagggagaaagaagataagtgagaggatgaagcttcttcaagatcttgttcctgaatgcagtaagatcattggcaaggcaatcatgctcgatgagattatcaactatgtgcagtcattgcaacgacaagtcgagatcatatccaaacaaatgctgctttcacaagactgacatcttgctttctatggagtcaaaccaggatcaagcggccttactggcccatttaaccaaggaatcatgcagccataattgatgtgcaccattgccaatcccgttgatgttttgcatggagctattcacgaggcgtcaacaatgaaccattattgatttgtccactgttatgttcgttgctggtgcaatcatgggatacattatgttcactgaatctacactcccagttcacactgaacttacccctaaatcttgtggcttccaagattgcagtctagactacggtgatgaatccaataaccaaatatccttggacttttattgtagctttttgtgtgcatttgttccgatacttaacaattaacattatatgacaccatagtttctctaatcacatgtaactccatctagccatctaggtttgtcctaagtcaaacatatcttttaattttgattagaaatatctataaaaaataattgtcttaaataagcagagttatttggttttagtaatgaatttagcaatgccaatgctatttttatcgttctatataaattttagatattcatggtcaaacttaaaaatgtttgacttggacaaatatagatagacctacacatgcattgtgattttaggaagtcctacaattctcctccccaaagtctgctatcaacttctaacagttagtccagttttcatgaacaaatttagttttaatcattctatgttgtgccaaccgccagcaactaataatcagagctgggtcatatcatcatatcatagtagattgtatagctttcttccctgtgcatgcttactggttactagatgaaaaaggtcgtgttacgttatggcgcactcctctcctttgaataggacatgctttcacactctcaattcggcatatccttctagagactagctcacactccaatggtcttctaaatgaatagcacactatagtcaagagtatgacttaccaaattcattattggttccaagcatcttgaaagagaagtccatcgtctctcttactgtcatctcagcatggctaacagaagcacgcagtaggagtttctccaccttcctttcatcatgctacttcttgctgagggtggcgtgaaaaagtcagcaacaagttcctctatggtggcgacagagaagacaagggaggctctggcgacattgtggcgacgacgagaagcgagcaaggatataaatcgatctgtttctttggaaattagctgtagtagaatatttacgtgatacaaatctctattctctatatctctatatctattacgtttctcatgtctctatttttattataatggtttggaaaaatgtcgctcatcttctgctctaatctttcgaaattaggtgtagtggaatattattgccagatattgctacactacaatagtgaaattattgtccaaaattgaagattgccgtatgccttaggtcactataaaatcgagttattttataataatagttttttgttttacataagccccactcttttatctaaaagcccataaattattgtccaaaatggaagattaagagtttgtttattacttctaaattatcctttctatatctaccatatgtaccat

SEQ ID NO: 25860 - DNA, 376 bp, Zea Mays
cgcataggtgctctatccctcaatccaaaatgttctacaccattctcagaccatagcgattcacagggaagaggtctcaccagcgttttcgttgtgcagattcccgcccacggtgagacacgcacccacgatggtcatcaattccgacgagaaattgagtctggctcgggagaggatccttcactgggtggccacggtaaccattcccgagcaatggcgaagaactccctccggcaatccagtggacccggctgttggcatcggcgacgacgtcaggcctctccccctgacccgcacctataggaatcctgatgtttaggcggctagcgattgtttgatgaccgcgacaacttgcttatatatacacaagcagagc

SEQ ID NO: 25861 - DNA, 1832 bp, Zea Mays
gtctctccccccgtcgagcacacaacacaccctcctcgtcctccaatccaatcaacctggtagactcgcttcgcttctcccccagccgtcggacggagctcctcgcagtcgcagcagccgccgatcagcctgcgctcgggctcagcgctggaaggtgttggaagagaatagcctgaaggttcacagtaaccttcatctgtcggaagatgtatcgggctaagagggctgcattgtcaccgaaggtgaagcgccgcgtcggcaagtacgagctcgggcgcaccattggggaagggaccttcgccaaggtccggtttgctaagaacactgaaaacggggaacctgttgctatcaaaatccttgacaaggagaaggttaagaggcacagattggttgagcaggctactaatggaaggttgaaggaagacgaagcacgtaaatacttccagcaactgattaatgctgttgattactgccacagtaggggagtgtatcacagagacttgaagctcgagaatttgctgcttgatgctgcaggaaatctcaaagtttctgactttggtttaagtgctttaaccgagcaagtgaaggctgatggtctgcttcatacaacatgtggaacccccaattatgttgcccctgaggtgatcgaggatggaggctatgatggtgcaactgcagatatttggtcttgcggagtaatcctctttgttcttcttgctggatatttacctttcgaggatgacaacatcatcgccctatacaagaagatttcagaagctcagtttagctgcccctcttggttttcagctggggccaagaacatgattaccagaattcttgatcccaatcctacaactagaatcacgatttctcagatactggagcatccttggttcaaaaaggggtacaagcctcctgtttttgacgagaaatatcaaactagcttggatgacgtggatgctgcttttggagattcagaagaccggcatgtgaaagaggaaactgaagatcagccaacctcaatgaatgcattcgaactgatttctctaaaccaggcactgaatctggagaatttgtttgaagcaaaggaggagtataaaagagagacaagattcacctcacagtgccccccgaaagagataatcacaaagatcgaagaagctgcaaagccgcttggctttgatgttcagaagaaaaaatacaagatgcggatggagaacccgaaagcaggtagaaagggcaatctgaatgttgcaactgaggttttccaaatagccccatccctgcatgtagtcgagctcaagaaggcgaagggggacactctggagttccaaaagttctacagaagcctgtcgacccagctgaaggatgttgtgtggaagtgcgacggcgaggtggacggcaacagcgcggcagcatgaaagtgccctttgaactttccactggacggcgccggttttcctttgtacatagcttctctttcggatgatcccgtgtccattgcagagtcggttttgcaagcaagttctttggtttatttgtagtaagcccggtgaaacaaccgccctggaggctgttgtggatgagcttactggcgtgtttagttcgtttcatggtcgggaggttggatggaatggaaaccacaatcaaggctgtagtagtgtgtgtagtaacgaagtagatacatgcatcagatggtgtaagggagtaccagctgttagttcatggtttcaagcttagccccccttcaatttgttcgatgatgtattacttcacaataaacattattacttagatgtatgaggtgagcacacttggtcttttgtcaagaa

SEQ ID NO: 25862 - DNA, 953 bp, Zea Mays
  misc_feature (952)..(953): n is a, c, g, or t
agacgtcccctctagggcttgttcggttattttcaatccatatggattggaggggattgatacggattggaggggattttgacttattgtggattgaaaccccttcaatccccctcaatccatatggattggggtaaaaccgaacaagcccctagcgggaatcgcaatctcaggatccagccgagcactcgacagtcctaaactcctaatccgagatgaaccacagtcaaggttctagaattattcgtggcaggggtagaaataaaaggatgtggacatcagatgaagatgacgagcttgtcaaagctttgtgtgagatatctgctgatcctagatataaggttgaaggaggggcctttaagaactgttactctcaaggcatagagaacattctttcacaaaagctacctggtcgtggtattaaagccagccctcatgttgattctcggctgaaagtgatgaagcggaagtattattcgatcaaggatatgatagcatcgacaggcttctcttgggatgacacaagaaagatgatccagtgtgaaaaacaacgatatgatgaatattgcagagaccatcctagagccaagggtctgtatggtgtcccatttgtatatttcgatacatttgatgcaatatatggcaaggacagctctgctggggaagggttggaagggtctgaagctgcaattgctaacatggagaatgaaaatataaatgaagttggagatgacgaagtggaagaggacaggatgtccacaggaatatctggtcgctccccggccgcaacgttaagctctaagagtcagaagaaagacaattatgacgggaaaaggaataggaccgaatcaaattgcccatctctggacaagttcaaggatgtacatgttcagtttcagaatgccattcagcatgccagcacaatggctgctgcaatggagctgttcaaggnn

SEQ ID NO: 25863 - DNA, 245 bp, Zea Mays
ctagcaccagaattatgaggcagtctattgggaaggaaagatctacttggctgaatcagcattggagttaagttcgttccacatgggatgaggtgtgaagttaagctgaaaagaaaagtacgaggacagaaacacactttgatagttcatgaatgattttttgaaactgaaagtcacctagagggggtgaataggcggaatctgaaaattataaacttaagcacacactacaagccgaggttagc

SEQ ID NO: 25864 - DNA, 7190 bp, Zea Mays
cgccgcccagcgccgcggcctcgacgtccgacatgggcgctggcggcgccgccaagcagatcgtcgattccctcctcgcccgcttcctcccgcttgcccgccgccgcatcgagaccgcccaggcacaggatgggcaatacctccggccatgtgatccaagctatgagcaagtattggattctctagccatggttgctagacacacacctctacctcttttggaagctcttcttcggtggagagaaagtgaatccccgaaaggtgctcacgacgcgtcaacataccaaaagaagcttgctgttgagtgcatattctcttctgcctgcattcggtttgctgagtgttgtccacaagagggaataacagaaaaactttggattggcttagaaagtttcgtatttgattggctaattaatgcagacagggttgtgagccaagtagagtatccgtcattggttgatttacgaggtctactcttagatcttgttgcacagcttttaggagctttatcacgcataagattcagttctgtgactgaaaggtttttcatagagcttaatgtgcggcgtattgattcacttgctcttagaagtgagacactcagcataatcaacgggatgcgctaccttaaattgggggtgaagacagagggtgggctgaatgcttctgtatcctttattgcaaaagcaaatcctctaaatcgtcctcccaacaaaagaaagagtgaattgcaacatgctttgtgtaacatgctctcaagtatacttgccccacttgcggagggtggaaaaaaccattggcctccacttggtgtcgaacctgcactgtcactttggtatgatgctgttgcacgaataagagtccagctcatgtattggatggataagcagagcaaacatgttgctgttggctttccacttgtcacccttctactttgtcttggtgatgccaatgcattcaactctagtttttcccagcatatggaaatcctgtataagtatctcaaggataagaaccatcgatcaatggctttggattgtcttcatcggctagtaaaattctatttgaatatttatgccgattaccaacctcgaaatcatgtttgggactatttagacagtgtaacctctcaattactgactgttctgaagaaaggcttgctgacccaagatgtgcagcatgataaacttgttgagttctgtgtgaccttagctcagagcaatctggattttgcaatgaatcatatgatactggaattattgaaaccagatagtttgagtgaagcaaaggttgttggtcttagggctttgctcgagatagttgtttctccatcaaatcaacaaattggcttggatgttttgcaagtatttggtattgggcactatattcctaaggtgaagtcagcaattgagtcaatactaaggtcttgcaacaaggcatatagcctggcacttctcacatcatcaaagactacaatagataatgtaaccaaggataaatctcagggatcactcttcaggtctgtgcttaaatgtatcccatacttgatagaagaggcgggccgtaatgataaaatgactgagattatacctcagcatggcataagtattgaccctggtgttcgtgaagaagcagtgcaagtgttgaacaggatcgtacgttgcctaccaaatcgtaggtttgctgtgttgaaaggaatggccaatttcatcctaaaacttcctgatgaatttcctctcttaattcaaacatcacttggacgcctggtggagctaatgcgtttgtggagagtatgcctatctgaggaggccttggcaaaagacatgcaaagtggtaggcgtttgagtataggaggggatgcactacagaggtctccttttcataggtccagggatgtatctgaatttcgcgcctcagaaatggatgcagttggccttgtctttctcagttctgctgatgttcaaataaggctcactgccctggagttactgcgatgtgttcgagcactgcaaaataatctcagggattactcagcaaatgaatggggtgacaataagctgaaacttgaaccagagccaatatttatcatagatatcatagaggagaatggggaagacattgttcaaagctgttattgggatccgggacgaccttatgatctaagacgtgaaatggaccctattcctttggatgtgactcttcaatccattttggagagtgtagataaaaacagatgggcgcgctacctcagtgaaattgtgaaatatgcagctgaactttgcccgagttctgtgcaggatgcaaggcatgaactctggtcttttctggaacgtctgcacgcacaatttaattagaggttattagaaggcttgaacagattactcctgccgatctcggtgggaaggctcagcaaccacaagattctgaaactaaacttgaccaatggttgatatatgccatgtttgcatgctcttgtccacctgatattagagaagaattttccatcaaatcagcaagagaagtcttccatatgatttttccatcattgcgtcatggttcagaagcatatgcacttgctgctacatctgcccttggtcactcacatttagaagtatgtgaaatcatgtttggagatctggcattatttgttgaggaggtgtcatcagaaactgaaggaaaacctaaatggaagaatcctaggtcccgccgtgaggatctgcgcactcatgttgctaatatacaccgaattctagctgagaaggtttggcctgggatgcttagtcggaaacctgtcctctgccagcattttttgaagttcattgaagaaacataccgccaaattactatttccttggctgatagctttcaagacttgcagcctctgcgatacgcattagcatctgttctgagatacctagctccagaatttgttgatgcgaaagctgagcgatttgacaacagaatacgtaagaagctttttgatcttctccttacttggagtgaggattctggtagttcatggggacaggaaagcagcagcgactatcgtcgtgaaattgaacgatataaaagtaatcaacatacgaggtcaagggaatcatttgacaaacttgcatttgacagggaaatggctgaacagctagaagctattaattgggcttccatgaatgctattgcttcattgctttatgggccttgttttgatgataatgcgagaaagatgtctggccgggtgatatcatggattaatagtttattcatggaaccatctgcaagagcaccttttgggcattcaccagttgatccacgaacaccatcatattcaaagcatactgatggacgttttggtgggagggacaaacagaaaactagccacttgcgactcctcttagcaaaaactgcgctgaagaatattttgcagacaaatctggacttgtttcctgcttgcatagatcagtgctactctccagaccctcaaatagcagatggctatttcagtgttctggctgaagtctacatgcgccaggagattccaaaatgtgaaatccagagacttgtgagcttgatcctctacaaggtggttgatcagacaaaactaatccgtgacagtgccctccagatgttggagactctctctcttcgcgaatgggctgaagacgatactgatggtgttgggcattaccgggcttctgtcgttggcaacctccccgattcctaccaacaattccagtataagttgtcttcaaagcttgccaaggaccatcctgagctcagtgagcatctgtgcgaggaaataatgcaacgtcagcttgatgcagtggacattattgcacaacatcaggtccttacatgcatggctccttggatagaaaatctcaactttgtgagactgaaggaatctggctggagcgagaggttactgaaaagtctttattatgtgacatggaaacatggtgatcagtttcctgatgagattgagaaactttggagcactgtggcaagcaatactcgcaatatcatcccagttttgaacttcttgatcaccagagggattgaggactgcgatgccaatccatcggcagagatcactggtgcatttgcaacttatttttctgttgcaaagcgtgttagtctatatcttgctcggatctgcccacagcagaccatcgatcacttggtcttcgagctatctcagagaatgctcgaggacgacgaagaaccagtcaggcttgggaaggttgatgtctctgcaaatgttgtattggagttttctcaagggcctactgcctctcaggttgcaacagttgtggatagccagcctcacatgtccccccttcttgttcgtggttcacttgatggtgcagttagaaatgtcagtggaaacctgagctggcggacatctgcagttaccggccgaagtgtatctggcccattgagtccgttggctcatgaggtaagcattccaaacccaacggcaggccgatcaggacagctacttccagcgttaattactatgtcggggccattgagtggtgttcgaagctctgctggtaatctgaggagccgccatgtttccagagatagtggtgactactactttgataccccaaactcaacagatgatattttgcatcaagggggcagtggaattcacgggatcaatgccaatgagctccagtcagcactacaagggcaccaacacttgctttcacgtgctgacatagctttgattcttctggctgaaattgcttatgaaaatgatgaagactttcgtgaaaatttacctctgttgttccacgtcacatgtgtttcgatggatagctcagaagacattgtgctcgagcattgccaagatttgctcgtgaatctcctctactcgttggctggacgtcatcttgaactgtatgagatcgaaagtagtgaaagagagaataagcatcatgtggtgagcttgatcaaatacatccagtctaagaggggcagcttgatgtgggagaacgaggaccctacccttttccggatcgaacttcccagcgcttcactcttatcagcacttgtgcaaagcatggttagtgctattttcttccagggggaccttcgtgagacttggggttctgaagctcttaagtgggccatggagtgcacatctcgtcacctggcttgccggtcgcaccagatataccgtgccttgcgtcccagtgttaaaagtgatagctgcgtattgcttctgagatgcatccatagatgcttggggaatcctgttccagccgttctgggctttgcaatggagatactgctgactttacaggtcatggttgaaaacatggagcctgagaaggttatactttacccgcagctcttttggggctgcgttgcactgatgcataccgactttgtgcacatctactgccaggtgcttgagttgttttgtagagtaatcgatcgcttgacattccgtgaccggacaacagaaaacgtgttgctctcaagcatgccacgtgatgagtttgacatcaatgggtatgcaagtgacctccacaggctggagtctagaactacttcagagagattgctatctgtgactgggaccgggaaggtgcctgcttttgaaggggtgcagccgctggtgctgaaggggctcatgtccacagttagccatggatctgcaatcgagttgctatctaggatcacgatacctacgtgcgactctatatttgggagccccgatacaaggttactgatgcacatcacaggccttcttccatggctcggattgcagctcacgagggaagcaccaccttcccttgggtcagcttcgccactgcaagagcagaaccagaaagcttactatgtgtcatccaatatttcggcatggtgccgtgccaagtctctggacgatttggccgaagtgttcagagcgtattccttcggggaaatcatgtcgttggaagatctgtttgcacgagcttcaccaccaatctgtgcggagtggttccctaggcactcatctttggcctttgggcacctgctgaggctcctggagagaggccctctggattaccagcgggtggttcttctgatgcttaaatcgctgctgcagcaaacccctgtggatccgtcacagataccccaggtgtacaacttcgtgtcgcagctggtggagagcacattatgctcggaggcgctgaatgtgctggaggcgctgctgcggagctgcggcggcggcgggcaaggcgaggaggctgggtttggtgataacggcgggcatgggagcggggagaaggtcctccagagcatgctgcttcctcagtcgtctttcaaggcaaggagtgggccgctgcagtacgctgcggggtcggggttggggtccttgatggggcaaggcggcggtggcagcagcagcgccgcagatagcgggttggtggcacgggatgtagcgctgcagaacacccggctgctgcttgggcgagttcttgatacctgcgcgcttgggcgcaagagggatcacaagcggctggtgccatttgtggcgaacgtcgggtagaccttgccaacatatagcagcacaattttgagtgggcagggcagcagccgccagcagagcgcacgcagagtgcgtgcgtgcgtttgtgaccgggtcagtgtcgtgcaaaggtggccacgcacatagacgtagctgcagttcttgaaactatttatttatttgtttatttattttattgttttgttttgatgagtgaggccgtgtgtgatgtatgtatgcatgtaattcgaaaccaactatggccgtggatggcatttgtattgtggaaaggagagtagaaattgatgatgaaacacaacaaacaggtttggaggcgtccttgtgtggtgtgtggatatgatcagccagtcacagtgtggggatgagagtgaaagttgctttcttgagtttcttccgtcgtgtgtccgggcaccaaggttgtcttcagtggaccgtataaagcaagagatttgcacttagatgatactatttgtatagtaaagtttaaaatagggaatgagataggatacatggtgaggatagccaaagatgataggtgattcaaagtctcctacatagcatcctgactgtgactttgaatcatgacacaacatagcacaagattagttggttaaggctgtctccagtagatcctcgattttatccc

SEQ ID NO: 25865 - DNA, 211 bp, Zea Mays
gcttgttctgccggttcgctctgcccacccaccgcccctctgttccccgccatccatacgacgccgagccgccatcaacgtcgatcctgcgaaccggagccccagcagcgcggccgacgcaccctcgatcctcgatccgcaatctacgctccccgccatcaacgctccccgccatcaacgctcgatctctgctccccgccatcaacgcggc

SEQ ID NO: 25866 - DNA, 5318 bp, Zea Mays
acccaagagcgcagcagcgcgtataaataaacggcgcgctcctagtcctccacctcccgctcactccgagtctcactctcactccgtcctccctcttccttacagaaacacaactcatgcagctcgtacggcaccaccaccaccaccaccaactgccgcactgacacatgcatgcgcagaaagcagctagctagcggccggtggccttgagagccgctcgctagcttttaaaattagccaccaattcaatctctagctagcttgggggagctccgttcctagctacacgtacgggcggcgcggcaaccaccagccgtgtagccgacctagtacgttggagcgaagcatatatcggcggccgcatcacatggagagcgcgatggagaaggtgtgggagtcggggcggcggatgagccggagcatcgggcggggcatgggcatggaggcgtggggcgtcgacgacgccttcgtgccgcagcacggctcccggtcccggggcggcggcggcggcggcggcgacgacgacgaggaggcgctgcgctgggcggccatcgagcgcctgcccacctacagccgcgtgcgcaccgccatcctgtccaccgagaacgccgccgtggttgacgacgacgacgacaagacgcggcggccgccgccgccgcagcagcagcacttcaaggaggtggacgtgaggaagctcggcgtcggcgagcgccaggagttcatcgagcgcgtcttccgcgtcgccgaggaggacaaccagcggttcctccagaagctccgcaaccgcatcgacagggtgggcatcgagctgccgacggtggaggtgcggttcgagcggctgacggtggaggccaggtgccacgtgggcagccgcgcgctgccgacgctgctgaacacggcgcgcaacgtcgcggaggcggcgctgggcctgtgcggcgtgcggctggggggccggcaggccaggctgaccatcctcagggacgtgtccggcgccgtccgcccgtccaggatgacgctgctgcttggcccgccgtcgtccgggaagaccacgctgctgctggccctcgcgggcaagctggacccggcgctggtcgtcgccggcggcggcgaggtctcctacaacgggttccgcctcggcgagttcgtgccgcagaagacggcggcgtacatcagccagacggacgtgcacgtcggcgagatgacggtcaaggagacgctcgacttctccgcccggtgccagggcgtcggcaccaaatacgatcttatgacggagctggccaggagggagaagggggccggcatccggccggagcctgaagtcgacctcttcatgaaggcgacttcaatggaaggagtggagaacagcctccagacggattacactctcaggatactggggctggacatctgcgccgacaccatcgtcggcgaccagatgcagcgggggatctctggcggccagaagaagcgcgtcaccacaggggagatgatcgttggcccgaccaaggtgctgttcatggacgagatatcaactgggctggacagctccacgacgttccagatcgtcaaatgtctccagcagattgtgcacctgggcgaggccaccatcctcatgtccctcctccagccagcccccgagaccttcgacctgttcgatgacatcatcctgctgtcggaaggccagatcgtttaccagggacctcgtgaatacgtcctcgagttcttcgactcctgcgggttctgctgccccgagcgcaagggcactgcggacttccttcaggaggtaacatcaaggaaggaccaggagcagtactgggcggacaagcagatgccttacagatacgtttcggtgccagaatttgcgcagcggtttaaacggttccatgtcgggctccagcttgagaaccacctctcgctgccgtttgacaagagcaggtgccatcaggctgccctcgtattctcgaagcactcggtgtcgacaaccgaactcctcaaggcatcctttgacaaggagtggctcctcatcaagcgcaattcatttgtgtacatcttcaagaccatacagcttatcattgtagccctcatcgcgtcaacggtgtttctgagaactcacatgcatacgacgaatctagatgatggctttgtttacattggagcactgctctttactctgattgtgaatatgttcaatggttttgctgagctttccttgaccataacaaggttgccggttttctacaagcaccgggacctgctcttctatcctgcttgggtcttcacagtaccgaacgtcattctcagaatcccattctccattattgaatctatagtatgggttcttgtgacatattacaccatagggtttgctccagatgctgacaggtttttcaagcacttgctgctcgtgttcttgatccagcaaatggcaggtgggcttttcagagcaacagctggactttgcaggtccatgatcattgctcaaactggtggagcactatttcttcttatcttctttgttcttggaggctttgtcctgcctaaagttttcattcctaactggtggatctggggctactggatctcacccttgatgtatggatacaatgctctagctgttaatgaattctatgcccctcggtggatgaataagtttgtcctggaccaaaatggtgttcccaaaagactggggatagctatgcttgaaggtgccaacatctttgttgacaaaaactggtactggattggagcagcagggctcttgggtttcaccatcttcttcaatgtccttttcacactgtcgcttatgtacctgaaccctctcggcaagccacaagctgttatatcagaagaaactgcaaaggaagcggaaggcaacgggcattcaaaaggggcaataagaaatggaagcacaaaaccaaaggacggtagtcataacaaggaaatgaaggagatgaggttgagtgcacgtttgagcaactgttcatcaaatggggtttcacgactcatgtccattggcagcaatgaagctgctccaacaagaggaatggttcttccattcaaccctcttgctatgtcttttgataatgtgaactactatgttgacatgcctgcggaaatgaaacatcaaggagtgcaggatgacagactccaattgttgcgtgaggttacaggatcattcaggcctggagtgctgacagcacttatgggtgtcagtggagctggaaagactactcttatggatgttttggctggaagaaagactggggggtatattgaaggagacatcagaattgcaggctatcccaagaaccaagcaacattcgcaaggatttctggatactgcgagcaaaatgatatacattctcctcaggtcacagtaagggagtctttgatatactctgcctttttgcgccttcctggaaaaattggagatcaagaaataactgatgacataaagatgcaatttgtggatgaagttatggaactagtggagctcgacaatctgagggatgccttagttgggctaccaggaatcacagggctttcgacagagcaaagaaaaaggttgacaatagccgtggagctcgttgccaatccatcaatcatatttatggatgaaccaacatcagggcttgatgcaagagctgcagcaattgtcatgagaactgtgcggaacacagttgacactggacggacagttgtttgcacaatccatcagccaagcatcgacatctttgaatcttttgatgagttgctattgttgaaaagaggaggccaggtgatctactctgggaaattgggtcgcaactcccagaaaatggtggagtattttgaggcaattcctggagtgcctaaaataaaagataagtacaatcctgcaacgtggatgctcgaggtcagttcagttgcaactgaagtgcgactaaagatggattttgctaagtactatgaaacatcagatctgtataagcaaaacaaggtactggtgaaccagctgagtcaaccagagccaggaacatcagatctttatttccctacagagtactcgcaatccacaataggacagttcaaagcctgtctctggaagcaatggctgacttattggcgcagcccggattacaaccttgttagatattccttcactctgttagttgccttgcttctcggctccattttctggaggataggcaccaacatggaagatgcaaccactctcggtatggttattggagcaatgtacactgctgttatgtttatcggcatcaacaattgttcaactgtgcagccagttgtttcaattgaaagaacggtcttctacagagagagggctgctgggatgtactctgctatgccatatgccattgctcaggttgttatagagataccatatgtatttgtgcaaacaacgtactacaccctcattgtatacgccatgatgagcttccaatggacagctgtcaagttcttctggttcttcttcatttcctacttctccttcctctacttcacctactatggcatgatggctgtctcaatctccccaaaccatgaggttgcatccatcttcgcagcagctttcttttctctcttcaatctcttctcaggcttcttcattccgagaccgagaattcctggatggtggatctggtactactggatttgcccactggcatggacagtgtatgggctcatcgtgacacaatacggagacctggaagacctcatctcagtccctggagaaagtgagcagacgataagctactatgtaacacatcattttggataccacagggattttctgccggtcattgcgccggttctggtactctttgcagtattcttcgcgttcttgtacgcagtctgcatcaagaaactgaacttccagcaacgataagaacaagatatggcagcaaaagctcttgagagtttttttggaacattgccgtgtatatagggtattttgcacatcgcgttctcctttcattttttgagtccctttaatacattgtcgtgtatatagggtattctgcacatcgccaaatgtggtgaggtcttatacagatttctagccatttattgcaagagcaaaactatgatatttttccggatacacagaagagctacatattattatattaagaagagaggtctaacgtagacctgccacaagatataatcctctattggataagaggatataacactatcttcatctcctttacctatataaataggtctccttgtatcatgtaccacataatatctctttttcgtatctatgatcctaacatcctctttacagaggacgaaaacaaaac

SEQ ID NO: 25867 - DNA, 991 bp, Zea Mays
agccgcacaagcacagcgactcgagcactgagcaaagcactctaaacctagcagtagcgacggcggtggcggctgctgctcatctccggccgacggtggtggcggctgctgctcatctccggccattcgtcggcctggtcgtcggcctgaagcccgcctggagcttgtctgcctacccgaccagagtacccggtgctgctgccgatccagcgcccttactgaggtcaacggcatctataaatgaaaaagaactaggtgaagatgacaacaccaatgtgaatgcaagtgagaacgtagaggctaataaagaagcaagtggtgcagctaatgatgtgactggatctcataccccaataggagaaacttcatccaccaaactcgggcgtacaaagaagagaacttcaggagtttaggatcactacaatgatatagttgttgaagaaaaggtgggtgacatggttgtcaagaagccaatggcagcatgcaagtactgtacagatgttctttgcgctgcaagcaagcaagctgtaccatgtgatttgcacaaaggattggataagggccgaaagaaaagatccatataatgtaacttcacttcttgatgatttatctaatattattgacaccgtgagtgatgataatgttgatcatgatggagatgcttccgatgttgttgaccacaacgtcgatgataatgacattgttcaagtggaggaagattaggattatcttttttttatagacaagctgagctgcttcagtcaatcattattggtgcttgttattcagcaatatgcactttatgttgttctgcacttttgtcaatttatgttgaatgtatcatgtatgggtgtgctagtgaacttaacggtgaactgaatgtatggcctgggtgtgctggtgaaatcaatggaccaatttatgtcatattttttttgttgttatagattatatatactactaaatatgctcataagatatatatattaac

SEQ ID NO: 25868 - DNA, 1549 bp, Zea Mays
ataatttggctaaggcttgtgctgcctatcgtgactttgtatcacaaaatgctataagagttaaaacttcttgttttttcttaaaaagttttggactagggtagtggggttttaaattttgctgagatacttctacctgcctccactaccttgacgagctggcatctgctggttacattctgctcccttcatgtagcattatggatgaagttctttgagcataagccttttgattcaagaactgtcatgggatttggagtacttaacggaatctccattgggctcctcaacttgagtcttggcttcaactctgttgggttttaccagataataatcaatccacctaactgatgctgaaatgcctttaaatttagatgactaagctggcaatcatcccgtgcactgtcattttagagacacttttcttcaggaagaagttcagtcggagtatccagatgtccctttctgtgcttcttcttggtgttggtgttgcaactgtcactgatctgcaactcaatgctgtgggatccatactgtccttgctggcaattatcacgacttgcattgctcaaattatgacaaacactatccagaagaagttcaaggtctcatcaacccaactgctttaccagtcttgcccttaccaatcactgaccctgtttctcattggccccttccttgatggctttttgactaaccaaaatgtctttgcttttaattatacatctcaagttgtgtttttcatcgtcctgtcatgcttgatatctgtttcagtgaacttcagcactttccttgtgatcggaaagacatctcctgttacttaccaagtcctgggccatcttaaaacatgccttgttcttgcttttggttatgttttgcttcacgatccgtttagctggagaaacatacttggaatcctaattgctgtagttggaatggtcttgtattcatacttctgcacagtggagacccagcaaaaaaatgttgaagtctccccacaacaggtgaaagaaagcgaggcaggccctttgatcgcagactctatgagcaaagttgaaaacgggggtggtggtgttgatgacgagcctttgaaggtacccatgtggagctcaaagtactcgcgggagtgaaaaggtcacgatggcatggcaccatacaggattcaatttagtaggcagatagtagggttggaagccaacccagagtgtaatgaacatttcagttacatttttgggcttctttagtgtcgcagtctactagcagttaaaggatctgtttcttggaaggatcctaccttcagggctctcagacctaccttgaaactagacagcaggtattgtatgattgtatctcgatatgctccacatcctcttactgtaacttccaactggtacatggcgtgcctatatccaaagatagacctcattctttttgtatcaagaagatccggataagaagacttgtgcaagatttgtagcgtttagtgaaatttgtgactgtcagtcatgttcgctttaaaaaagtttagtaatttaaaagtcaattaaga

SEQ ID NO: 25869 - DNA, 2730 bp, Zea Mays
taggcatctaccccgtcttcgtcgtccgctcctcactagctaccaagaggtcgccattattgccaacatagagtgtacgtggatgtctatatatatgcctacttgcacccatatggcataggcgttcgatccccttagcgcggaggagagctcctccggttcttctctacccttcgcatggaagttcttgcattgcttcgttgcttctctagtttcttccttctacgtctttccagcatacgcatgcccctcgtccgccggttcacgaggcatcgtctgatgatcagtagataataagcaatataatactgatctagaatcgagttgttgtactcttcgcagataggcgcgtgatggcgctttcagcttcccgagttcagcaggcggaagaactgctgcaacgacctgctgagaggcagctgatgaggagccagcttgctgcagccgccaggagcatcaactggagctacgccctcttctggtccatttcagacactcaaccaggggtgctgacgtggacggacgggttctacaacggcgaggtgaagacgcggaagatctccaactccgtggagctgacatccgaccacctcgtcatgcagaggagcgaccagctccgggagctctacgaggccctgctgtcgggcgagggcgaccgccgcgctgcgcctgcgcggccggccggctcgctgtcgccggaggacctcggggacaccgagtggtattacgtggtctccatgacctacgccttccggccaggccaagggttgcccggcaggagtttcgcgagcgacgagcatgtctggctgtgcaacgcgcacctcgccggcagcaaagccttcccccgcgcgctcctggccaagtcaatcctctgcatcccggttatgggcggcgtgcttgagcttggtacaactgacacggtgccggaggccccggacttggtcagccgagcaaccgcggctttctgggagccgcagtgcccgacgtactcggaagagccgagctccagcccgtcaggacgagcaaacgagaccggcgaggccgcagcagacgacggcacgtttgcgttcgaggaactcgaccacaataatggcatggacatagaggcgatgaccgccgccgggggacacgggcaggaggaggagctaagactaagagaagccgaggccctgtcagacgacgcaagcctggagcacatcaccaaggagatcgaggagttctacagcctctgcgacgaaatggacctgcaggcgctaccactaccgctagaggacggctggaccgtggacgcgtccaatttcgaggtcccctgctcttccccgcagccagcgccgcctccggtggacagggctaccgctaacgtcgccgccgacgcctcaagggcacccgtctacggctctcgcgcgacgagtttcatggcttggacgaggtcctcgcagcagtcgtcgtgctccgacgacgcggcgcccgcagcagtagtgccggccatcgaggagccgcagagattgctgaagaaagtggtggccggcggcggtgcttgggagagctgtggcggcgcgacgggagcagcacaggaaatgagtggcactggcaccaagaaccacgtcatgtcggagcgaaagcgacgagagaagctcaacgagatgttcctcgtcctcaagtcactgcttccgtccattcacagggtgaacaaagcgtcgatcctcgccgaaacgatagcctacctcaaggagcttcagagaagggtgcaagagctggagtccagtagggaacctgcgtcgcgcccatccgaaacgacgacaaggctaataacaaggccctcccgtggcaataatgagagtgtgaggaaggaggtctgcgcgggctccaagaggaagagcccagagctcggcagagacgacgtggagcgccccccggtcctcatcatggacgccggcaccagcaacgtcaccgtcaccgtctcggacaaggacgtgctcctggaggtgcagtgccggtgggaggagctcctgatgacgcgagtgttcgacgccatcaagagcctccatttggacgtcctctcggttcaggcttcagcgccagatggcttcatggggcttaagatacgagctcagttgctggctccggtgccgtcgtgccctggatgatcagcgaggctcttcgcaaagctatagggaagcggtgaaggggcagctggaaatttggacatcgacgggcatggaaggcttcatgggatcgaagcaaagatgtatttcttgtttctttagataacagacatgaatcggacctctatatcaacaattatattggcatgaatacttagactccagcccttaacacgtagaaactcaaaaaaagaagaaaggaagctaaagactaagcgtaaggtatatttggaagtaaattgtttttatagtttctaagcaatcccatggtttataggaatgctagagtgtttatttatggcataaggtgtttggttgcattcataaaaactatattttcaaagtcatagcattctagatacatgatatttttgtaatattggaaactacactccaacgcaaagtttttatgacatggctaacttttgtctaaatatcataacttacaacgtcctatccaaacaatgtttctcaaaaccatggtatccttagagctagctaaaactatggtattatcgtgatcattgcaaagtataatattgtaaaaccatgattttgagaaaca

SEQ ID NO: 25870 - DNA, 792 bp, Zea Mays
gcgccatatatgatcttgatcgactaccgtaagaggccaccggatccagatccgacggcccagatttaaagtcgctcacaacaattcttccgcgtttgatctggatcggacgatccggattggttcggccgaatcgatacgtgtgaacaaatcccagccgcctaacccgagatcaacggcaccagcaacgccccctgggatctaatcccaaccgtcgacacgtagatccacggccgggcacctgtcttcttccccccggtggcaaaacacgaaggcgctgtcccgcccggcggtgggcattgccgtgcgcgacgcgccccgcgctccaatgcccctaaatcccgattcgttgggtctacacgtggtgaaggataaagcgaactcgggagaggcatcctcaccgtgattagcgcgacgctgcactctgcccgccgagcgcggaggagcccgatgttaggtgagaaattccggctgccccagtggtcgattcttccacccctggccacaagcaccttccaagcaacgcagagaagctcccaaactcgtcgcggaccctcgagcctcaggcgtggacagaaacggcgttggcggacgctccctgctcttggctctctcttccgttcaggcgatggcgtttggtcttggctctggtgaatcgaaacgagaaggaggaggagctgcggacagtagataaatcccaggggaaggaagcgaggaggaccgcaacaaccccggaggtcgcgcaggttgttgagcatcggcgtcgttcgtgaggagcaggggagaacgccc

SEQ ID NO: 25871 - DNA, 181 bp, Zea Mays
agtttggaccgtgatcgatatccccagggccgtgttggttttgtaacctgtccattattgcctgatgagatagcaaatgcccgagaacggttgcccgacttcttcatgaatgaggtcatagacattggtggatcatgcagggttgagggtgcttcatataactaaatctagcatggcttcc

SEQ ID NO: 25872 - DNA, 3674 bp, Zea Mays
actgccgcggccgtaccccgccccgcatgctgcccggaatcagcgcctccgccgccgcagcccttccagaaatctccatcccgaatcctccgcgcccccgcctgcccccgcgcatcccgcagcccccgcccccgcgcatcccgcagccttggcgtcgtggccgccgcctctgctccctcctccatcccgcgcaacaacgacgaccgtcggggcctcgcctggcagatcaagcggggaatccacccgccaggcgtctccctgacagtggtagacggtggcggcgatgggggccgagagcgaggatgccccttccccatcctctaccctcccttgcgattccagcattggtgcccgcatccccgccgtccgaagcatggcgctcttcgtctcctccctcgccgccgccctctcccacctctccctcccatcgacctccaaccccaagcctcacccagcctcgctcctgcgcctgcgctccacctaccgccgcgctgttagcctcgcggtggccggagcaagaacggcaataggatgaagctgctgctgtccaacccctacggcttcagcagcccccgacatcgtgtgtcgggatctgggactccagcggcaaggcgaccactatgccgcacgggcgcggtgcaggagctcctccagcggcgccgcaactgcctctgagccctcatggtccagctcgagtgctcgacgcacccgctccgcacccgcccttgtcccccaggtgtcggcgtgcgggattcggtaacggtgttggagctcatccagtggcgccgcaaccgcctccgatccctcaaggtttggctcaaggctgatggccaggtcgaccgtctcctccatgcgcaggggaagaggaaggagctggagcagacggtgaatagcttctctgatttctccctctccggtcctgttgcaaagagccacaaactggttaggatgtcttggatcatcagacagatcagcatgacttgcaagcagctagctactgtttacagatgtcctctacttgccaaaaaataacaaaggggttctcgttcttgaaagctgcatagatagcacctcaacttggccactaaaacaactaagtttttttatggacatgtctgatgtttttctcaataattgtgcaaattttcctttcataattttcgtcgtcggggggcaggaaccgggcggtgtacgtgctggcgcagtgcacgctggacatgccgccggaccactgccgggcctcctcgatggagccatggcagagagcggcgacggaaggtcagcggcgacaagatggacgtggcggtcttcggggcgcggtgcaccctgcggtatgagatggacctgcagttcttcaatgtcactggcaacagcaagatgctgtccctatatttttacagatatttttaataatgacctcagtggaccctatgcatttcttgagccaccttttgttcaaagatcccttctatataagatacaggcaaggagaaaaaatagcattctccgatatatcgagtgggatgatgcttggtggacgtgtacatactaatattaatcggtctcgaagcttctgatacactcagttctcacatgtcgcatgaaatggacctcactagaaaccaaacacccttgaatcgcagtcacccacgtcgccaacaggagtgacttcctcaccctgctccacgccctgccgccgcagagcgggagcggcggctgcgacggccgcggtgctggggaggaggatgcctccgcgctcgccaactccctcgacgcgctttgcaaggcctgcaagcctgagtaagcaagagaacaaaacccgcgggactgtgaacaagcgcagaaagaaatacgaatgcaacaagtcctacattctgttctccttttttggggggccaaaacgttgaggtctcaactcactcgtgcaagcagtttcatcgccacccccatgtgagcaatccgggacaccgcggagatgcctcgtgaggaaagcggtacggcgaggcagagcagcgtcggtggtcgtggaaggatggagcaacaaccccacatgttttgttctaatgacacagtggcgccaaggttccagactgtggcgggactgggctctgcagccgctgcaaaggagagtgcttcgtcttcaagcaactctcgaaggagacggccaccaggtcacacaaggccgccaagaacatggccaccggatacacttcggggctgtccaccaatggacctactgcaacaagtactcctccacccgcgtgcctgcataaaatggcaggggttctaccaacaatcaacacacatgtgaagcgaagctgggacgtgcatgtatgtggatccacgacacgtgcatctgtaggaaccctgattttggtatggtttctacactcaaattcatcagtatgatataaggcaatctgctggctggtatttaagagtggccctctcttcatatcatcgaaaggtaaaactattagtggcacacgttggttttttcctttgtttccaacatgtaacattatattaggggtatgtgcagtttagggtaagtaatatactcctttgtgctcagtaagtaattgatagaaggtagaagaaggtagaaacatatgtgcagtttagagtttacctctttatgatttctgggtagccacaatattttcacattgcaattcaagtccttagtaccctggtaatcaaactaacatgtcagagcatcaggcaaattcattgtgcacctgcctattgtatgctaaagaaatcagtttttttgcatgtgttagttgtctcctaacctgctgcattttcaatttttgtgttctgtgttttgtaatttgggagcaccttcaccattgtgttattagagctaggcaccttcaccattgtgttattgatgatctttcttggtctgaatggagtttttgcacctattcacatgccagagagtttatgcattgtcctccttttttggatacactttctgttaaaaaatgctacacagttgcattctacttaccttgtgattttgatggagctctgttgttgtgcttctttgacatttgtcggtcctttgagcattaggtctgcatcatgcattatgttgttatctattgatctatatatcccatattgtggagatcactaaaatcttagtaatttaagttctgttcaaactttcaattccatcgtccgtgaaaaattgataagtatgaatgtgttgacttgactccattttatcttctccttatttgagcttgtattcttattttttaatacattgctgccctgcactgagatttctattgtaaataaacaaagtgctatttaaattttgatttattccttacgaatgtctgttggtttcaggaaagtgctgagagaggtggcatctagaggatgtcatgtcgaacgtgtgaagtttttttagaaatatgtatatttgtgtgaagctttttagaaacttggctccattttattttctatgttcctctcggctttgtttcctatcctttccaatgacttgctatgcatttgcactgtatttggcatgtctaaaactgctacacaaaacttgatatatattttgtctaaaaatactatatccttgttatgcttgattgatctttattttgtctgctcttctattcttgtgtgggtctatcaagaatgag

SEQ ID NO: 25873 - DNA, 198 bp, Zea Mays
tgatgatcagtaacctcgtaattacgtggcaccagatgagaatacctatctataagataacaccaatgtacctgtgcctcagaaaacgtcgaataaacaactaaacacacatgggccgattattggattaatgaccaatcccatgtgcgcatggacgcaaacactcgatctcaatcgccatttggatctaatcacacc

SEQ ID NO: 25874 - DNA, 93 bp, Zea Mays
cttgtgcagcccccccccacttctcccactccttggccgccaccctcccctgcccatctcctcctctctcaattcttgcagccacaccaccat

SEQ ID NO: 25875 - DNA, 1674 bp, Zea Mays
gctcgctctccttctaccagcctgctccggtcctcttggagttgggcctgcccacctcccggccggtccgccgcgcggttccagtttcgcctctcgtcgccggtcctggcgagccccgcctccttgatctccgaccagcagcttccccactgcccactccccagccccggacgtgcccttcgccggtgctgtcatggcgttcggccgacggagccccggatcctcgcggcaccctcccgcgctcaccatcgtcacggcgctactcctcgcctccctctacttcgccgccgcggcggcggctctatcgcccaccgacgcgatgcacaacaacaactgggccgtgctcgtgtgtacctcccgcttctggtttaattatcgacacatggcgaatacattgtccctatacaggactgttaagagattaggaatacctgatgagcgaatcatacttatgttggcggacgatatggcctgtaacccaaggaacagctatcctgcccaagttttcaataatgagaaccaccagctaaatctctatggtgacaatgttgaggtcgattatcgagggtatgaggtgacagttgaaaatttcttgagagttttgactggccgacatgaaagtgctgtaccaagatcgaagcgtcttcttagtgatgaaggaagtcatatacttttgtacatgactggacatggtggtgatgaatttttgaagttccaagattctgaagagcttcagagccatgacttagcagatgctgtgaagcaaatgaaggagaagcatagatttaaagagctgctgataatggtagatacctgccaagctgctactctcttttcacagcttcagtcacctggtgttttggcgattggtagtagcatgaagggtgaaaactcttattctcaccatcttgattcagatgtgtttctgttgtggataggtttacctattatacacttgctttctttgagaaactgaacatgtatagcaatgcctcactgaacagccttttcacctcatacaatccttccatgctgttgtctactgcatattatcgaatggatctttatgaacgtcccttaaatgaggtgcctgtgacaaatttttttggatcagtcatgaagactctccacactgattcagcctacacaggtttcttggctgcgcatgacaatgaaactccaatgtccacgggagataaccttgatgatcatttcatgttaaagggcagggctatcgcacgaagatcaaccatagaaaaggaggcacaattaacaccgcatggatggactgaagttctggctgaacagctggagggaaagaatactgatactgttgtgatgtatggtctgggagctatgggtatactgttggcactttcaacctggttatcaatgtaggcaccaaaaaagtgtggttcgtagtctcttacgctatccatctctggtccgcgtgcgagagagagaaaagagataatatgtttgggaggtcttttagattttttctcttggtttttaaattcattaacgatgattagagttctttagaaaatgctgtatgtagttctttagggattactgtgttatcgttttatttatttaacatgatcttttgggaaagacttgtgcatatggaagtttggttatcttgatagccatttgagtatcttgtctccg

SEQ ID NO: 25876 - DNA, 1905 bp, Zea Mays
accatccgatccggtagtatccgaacccgataaagcgaccccccaacaacgctggcctcacctcacacaaacacacataccgaatccagccccgcacccaccgttgcgcccgccgcccgagtcgccgtggccgccgcggcagcgccctcccggccgtgagcgcggcccagcgcgcgcgccgcggccaccgccgccctcgaggcgcccagatctgggccctagcgcccccctccctcctataggcctttccccgctgcatcgccatggcgcggctactgctgtggtggacagcgctgctcctcccatccctcctcgccggcgttggtcccgccgccgccgccgccgcgtccccgccccacgatgcgtgcctggtgcctaccatcgcgcaatccgtccttaggactcccgacacgtgctcgacgctggatcgccgccttggcgacccggtcggcgtcatcgagggagatgaggtgacgttggcaagggcagttaatcttcttcacgcaaacaaggatgactacattgccgtactattctatgcctcgtggtgcccattctcacaggaatgcaaaccgaattttgagacactggcttacttattcccagctatccggcattttgcatttgaggaatctgcaattaggccaaggttcgtcctatatagtgcaaacaaaaattatttcttattgcaacacatctatttttggtggaatgccaacctgatgctggaactgcagcataatttcgagatacggcatccatggtttcccaacactctttctcttgaactcgaccatgagagtacgatatcatggaccaaggactgttaaatcacttgcagctttctacactgatgtctcaggtgtgttactttttccttattgaatgactcttgttctcttttattggggtgattttagtagcatgattatcattggtcatacttattgctatgcacattcagcaactaatccatgtatgattgtgagcttagattttcccagcttgctggtggtttctcttttccagaaaaaaaatgaccttcttggtgcttgctatgcttaagtcgtttacaaatggtaaatttatgtgatgaaggtatcaatgcatcggtgaagtcaactgcaggggaggccatggtacatcccttggatgatattgagcataaaaaggacgctgaacaggaaaattgcccattctggtgggctcggtcaccagagaatatacttcagcaggatacttatctagcattggcgaccgtatttgtaattttgaggttgctgtatcgtatttttccaaagatagattcctttaccagatgggcatggaggaggcacaatatgtttgcaaaattgatgggagcacatgaatatttcctcacctaccttgagcaagcaagacagaagtttcataggctatacccttcaagttcaaagcgaggaaatctgcaggagggcgcaatgaacgctaccgcttgggcttccaaatcattagcatcagtttcaattggagaaccaagtgcaattggaaggacaaactctacaagtgagctaagatgaaatctgatcttttttgtccccagggattatatgtacagtacagtagagcgatcaggatatgaacacccagaaactgttgtaacggctatattactctttgtatcctccttagaataaatacgtccatgatttggctccttattttctgttgttgttacagcccaattctttggaggaataaagtttctggtgtattgagaggtgtctttctgaaatagggagcatatcagatgcacacgtgtctttcgtgtacatggtgctggtgcatatattgaatcaagcaacttaatatggtattaaaatcagggtctcaaatttgaatcctagttagcacaattcaatataa

SEQ ID NO: 25877 - DNA, 2159 bp, Zea Mays
tttcagaacagtaatgcatgtgttggatgaaagaatggacccatttcttggtagattggctagaccagtcaccattgaccaatcatggtttaccgcccagggtgatctgtccttgctcaacagaccggcttccagtgacactaagacttctgcagagcttaacaatggtttaatcgagttcaacgatgcaactgcgccatcgccaggattgtcgtgtcataattgctctagtgtcgcaagcaacttcaaaccatttgcaactgtagtgtcagggctgcatcaacacttcttggatgcaaatgtagaagttacttacgcagaatacttggatttgatgaaagtggaagtcgatcagcagcttaataagctcatcgaggatataagggtcctcaagagctataacgtggctcataaatgtgacctaaatgacccgtgctctacactaggccatgttgggaagctgactgagatagacgaggggttcaacagcttgaagttgctgctggttgtggtgttccgacaaattagagagatgctcacactggttaattcttcaattcatgattttcagtgggagcatgagttacagttagaaattactggctttattattggagactgtgtcagaggtcttaaggatgaactagagaggaagttgtatgagcaaagctccattgtgaacagtctaagaaaaaattcgcaagaaactgtggctcagtgtgcttccatccgtgaagacctgattgctatttctaatatgctattaccttcagaagaggaacaccatattcctctgtgtagacatgaaagtttgggtaattggagcgacagatggaagttcagctttttcagaaagataccacaaaaggatcactctctatcttcctctgaggaaaatcagaaatctgcaacacagaaatctataagtcccagtgaagttatttcagaaaaatctgacttccgacatctgaagggcatgactggacaagaaattcttaactatttcagatctgagatcagtaaattgaaaatgttgcatgagctggatttgcaggagaaaacagaagagctgttcaaattcaaacgagagaaatggtcactggctctcaagtacgatgtagaatttgagcctttgaggaagagattccctgaagtcatttcaagatttgaccaaattatgtccaatggaatggaagcacctacaatcagtactagtgatgcagttgatgaaaggagcagattgaatagtagaattgattcactatactgtgaaaaccagcatcttaggaatttgcttgcagagaagacaaagaatgttcaggaattatcctgccagatatctgatgccagcaagaaaatgtcatctcaatattatctagagaaagaacatttgagacaagtcaagaacattaaagaagagtatgaggatctatatgttgaaagtacaataagagatgaaatttaccaaactgttacaagcaaattggttgatagtcatagggacatcttggaggagactacccaaattttgcatgctaaagtttcctcacttgaagctgcacattcagaaaaggacatggcgctgtgtttatctaacgaagaaaataggaagctgaaggaaaagttgtcaatactagaaaaggtgcatttcatcaaagataatcagcatgatcaattgctaatgaaacaagagagtgaggaaatgatactccgtgatattgagatggagccccacgtgccgccacaaagatcatgtcagatttctgatcaggatatgcagtatgaagaactcatcaagctgaatcagacattagagatggcctcaaccaccttaaaagaagttgaaacaaaaaagttggattacagtgacatcactagtgaaagaaagcaagaaaaacagttagattccatcctgatatctatcatggatttgtcaaaagaatttgtggagatggaacataaaatgtcagaagaaataaaaggaaatgagaaaaagacggagaatctaaatgatcggtgcaaccatatggtgcagcaggccatcgtactgacaaagaagggcctgtggtacaagcaaatgcttgagataagacgttctgagcttcaaaaggctgaatctgaggttgacgttttaggaggcaaggtcaatgcactcttaa

SEQ ID NO: 25878 - DNA, 974 bp, Zea Mays
cccggctcccgcagccagccctacatcccccgctccgctccgctccgcaagcgaggcgaggtagggataccgtcgatacgggcccacttcctcctccacctccatgttccgtctcgccccaactgccgaccgccgccctcgccccggctcctccctttccctctagctagcaccaatcgttcatccagtctcacaaccgagctccccgaccaccagcacgcctcgcgctcgcgcgtccctcccaacagcgtgctccagttccttcaatggcatctcgggcgcgcctgccgggcacgccggcctcgatcgccgtcctcatcctctccttcttccaagcgacaaatccgaacattcgtctcggaggccaagccacgagcaactggaagattcggtgtggcttgcatccttgaaggcaagtgacgccagtgctctggcaacaacgtcatggtcggcgtccattgtgctccgatctgccttggcaattgcagtggcgaccttgcttgctgcacaacttgcaccagatcatcctatggtcagcttgctatgattcatcatggttgcggttcttgatcggtaggagtcatctaagttattttctgacaagaagaggattagagcagtagcagtgatcagcaatgggaagagaatattgtgtaggctttttgtttgtggataggtgctagagaaggaatgatgtgttacaagttggcaactggaatttcatgaacgcattgcaaggcgattcaggttgctctgttgtcatcggcccctttttctatttttgcagtaaagcgcataaaaaacatctcgaatggatactgtaaccatttgatgtgcagaggttcacagagtaatgtgattttggttagaactctacaccgccatgcttgtgttgtcactttgttatctcctcgaatgttacatgactagttttgcatgttgtgaatgaatgataagcggtaacgatttacatg

SEQ ID NO: 25879 - DNA, 2545 bp, Zea Mays
gcccaacacactacacattcgacacatatggtccaacacgaccgaacggagcagaggatccaccgaaacaccaaacggaggcctcgtgtctgctttcgcccatccctgctcttgccccgtttctcccttccatcgtgcttcctcctctctctctctctttttcgctcccgatttccaaatctcaaataataaataaccagaagggaagcgaatcttctccatcaacccagcaaatcgctcgttcgagcgtcccactcgacgagaaattctcacccatcacctccgcgtcgctccccccgttcgccgccaggggcccaatttcgtgtggacaggcacaggctgctgtgatcctttggtggatgggggcagcgcagctagccaccggaggttgcctagtttgaaatttaaccgcgttaccgaagtggtactccgtagttcttatggatcaacttgccctgcttgcgacggagctgggtgactcgtcagactttgaggtggagggcatccagaacctcactgagaacgatgtcagtgacgaggagattgagcccgaggacctggcgcggcgaatgtggaaggacagagtcaggctgaggaggatcaaggagcggcagcacaagcttgccctgcagcaggcagagctgcagaagttgaggcccaagcccatatccgaccaggccatgcgcaagaagatgtcaagggcacacgacgggatcctcaagtatatgctcaagctcatgcaggtgtgcaatgcacgcgggttcgtttatgggatcatcccggacaaggggaagcctgtcagtggcgcttccgataatatcagagcttggtggaaggagaaggtgaagtttgataagaacgggcctgcggcgattgagaaatacgagtctgacaacttagtatccgctactgcccagagtggtggaactaagagccagcacagcttgatggatctccaagatgccactcttggttcactgctttcctcattgatgcagcattgtgatccaccgcagcgcaagtacccattggagaagggtgcttcacccccgtggtggccttcagggaaggaggaatggtggaccgccctgggtcttccaagcggccaagttcctccttacaagaaaccacatgatcttaagaaggtctggaaggctggtgtgcttacaggtgtaatcaagcacatgtctcccaattttgataagataaggaatcatgtacggaaatcaaagtgtttgcaggataaaatgactgcaaaagaaagcctgatttggctgggagttctacagagagaagaaagccttgttcacagaatcgacaatggcgtatcggagattactcagcgcagtatgccagaggagaggattgcagacacaaatagcagcagtaatgagtatgatgtgtatggttttgaggatgctcctgtttctacatcatctaaagatgatgaacaagatctgtctccagttgcacaatctgctgtggagcatgttccgaaaagaggaagggaaagagcttacaataaacgccctaatcaaatcgttcctggtaaggcaaaagaaccaccaaagagaaaaagaacacgccacagctccactgttaccgagccagatgcacacagagttgttgatgcaccagaaaactcaagaaatttgatccctgatatgaatagattggatcaagtagaaatcccaggcacgtcaaaccagattgtcacctttgaccatgggggcaccacaactgaagctttacaacacagaggagatgctcaagtacaggtccatcctcctggtgctgaggttaatagcttctatagtgctccaactgcaaaccctactcctataagcatatatatgggtgaccagcctataccttatcaaaataatgacagcacaaggccgagatctgaaaatagttttcctgtagatgctcatactggtttaaataatcttcccagcagttatcagaacttacctccgaaacaatcactaccacttcccatgatggatcatcatgtggttcccatgggtatcagggcacctactgatagcattccttacggtgatcatatactaggtggtggaaattcaacttctgttcctggagatatgcagcaactcatagattttcctttctatgctgaacaagataagtttgttggcagttcctttgaggggttgcctttagactatatcagtatcagtagtccaatcccagatattgatgacttgctgcatgatgatgatttaatggaatacttgggaacataacattcggtcaggatgagtctgctagcatttgttttcatccattttagtctcactggagtcatcatcctaacttaagtatggagggctaaacttctcattttgttgccggtcttgtcattggagaccaaccatctgttgtatgctgagtgatgacttgtattctttggcaataatgtgtcatacagtgacacaattgcacatgtggaaggaagtctgtcacatgcgcggcaggcctggagcatctcaagagatcgtcagggattcagagaattcag

SEQ ID NO: 25880 - DNA, 1485 bp, Zea Mays
aaaaaatgacacgatcgcaggagaaaccaaagaaaagttcctttttctttattttcttcgtcctcttgttctcgactcgctgcccactgcgtcacccgaatcccttcgatccaatctccaaaccctaggcagcccgccatcagattgttaggtcctccttccttaaaccgcggcggccggccatgtcccacggcggcggcggcgggagggcgaaagtgacgccgaacctggcggtggacggcgagggcacgcggacgctcaatctcaccgtgctgcagcgcctcgaccacgccgttgaggacatcctcatcaccgcggctcacgtcacgctctacgacttcgacaccgacatcaaccagtggagccggaaggacgtggaggggtcgctctttgtcgtcaagaggaatgctcaacccagattccagttcattgtcatgaatcgcaggaatacagataatctagttgaagatcttttgggagattttgaataccaactacaagctccttatataatgtaccgcaatgctgctcaagaagttataggaatctggttttacaattcccaggagtgtcaacaggttgcaaatcttttcagcaggattctgaatgctttctcaaaggtggcaccaaagccgaaaattccttctgtccaaagtgaatttgaagagctggaagcagcaccttcgttggttgatggtcctctggaagcgcaaacgtcaaatatcatgtcaactactactcacgttcaagaggatcctttatctgcatttttcagtgcagctgcaaatgttggtggcaactctgctgtagctgttgcaaggcaaccaattcagccttttggtgctactccggtggctgcacatgcagctactagtatcactacaacacaatcgccaggcttgcattatttgcttccttcacaagcctcatcggtttctgggaggcctgctgatgctcatggtggcactggttctataggaaggtccacaagccttgtatatccgtcacttttctcaccattgacatcttcacagacgaaaatggtgcacactaattctgcagtaccaactgctccacctcaacatcctcggattgctcagcagccgcaaagtgctcccttgcttcagccttttccgttacctacggcttcatctccaccatatgggactccattacttcaaccgtttccgccacctaatccgtcgccatctcttgcatctgcaccagtcttgagcccagcgctgactagagacaaagtcagagatgcattattgagacttgtggagaatgatgaattcgtcgatttagtctaccgcgagatcatgaacagacagtaatggatttacaaggtcttcaacgattacagttggaggtttgcatgatcgacttgtttgcaggctcgtgcatgaagaagggcgaagatcgttccctctggccgcagactgctgatctgtgcggtgtggagtccggaggcggtggtcgatg

SEQ ID NO: 25881 - DNA, 699 bp, Zea Mays
aatttgggtcaagcctttaaacgccgtacagcggataggataaggccatctcccataacggagagagacgaagagagcggaagcgaaagagcagcggcgcaaaggaaagggagccatgctcgcgtcgccggcgctcgccggcgcccactccttcgcggcgtccgtgtatggaagcctcctcgtcccctcgcctcccgtccccgcgccggcacgtcgcgcggcgctgtccgtcgtcgccaaggtcaaggtggccacgccccaggacgaccgcatcgcccgccacgtccgcctccgcaagaaggtaagtggcaccactgagaggccgaggttgagtgttttccgctcaaacaaacatctgtacgctcaagtcatcgacgacacaaagcaatgtactctggcttcagcttcaaccatgcacaaatctctctccaaggaatttgaatactcggctgggccaacgatccatcattggaaactaggtgataaattatgtggtaagggctaaggacttcaatgtgcaattaattatctatgacccaatcagatgtatatactctgtaacgacaatttcagattacatggtctgaggtactcctactttaaacacggggcttgtttcttctagattgtgtaatcactacaaatatgcatgcattcctgatttctccacaagaatagacacgaccttatgcctctgat

SEQ ID NO: 25882 - DNA, 1065 bp, Zea Mays
cttgcatctagctatgcatgtgatttaagcatggaaggcattcttgagcgttaccagcgttactcatttgaagaaagggcagtacttaacccaagtattgaagaccaggcaaattggggagatgaatatgtccggttaaaatccaaacttgatgcacttcagaagagtcaaagctgttaggagaacaattgagttcactgaccataaaagaactccagcaactggagcaacaactggacagttctttgaagcatattaggtcaagaaagaatcagctcatgttcgattcaatttccgcgcttcagaaaaaggagaaagcacttacagatcaaaacggtgtcctgcaaaagttcatggaggcagagaaggagaaaaacaaggctttgatgaacgcgcagctccgggagcagcaaaatggagcatcaacaagctccccatcactttcaccaccaatagttccagattccatgccaactctaaatatagggccatgtcaacatagaggggcagcagaatctgagtctgaaccgtctcctgctcctgcacaagcaaacaggggcaacctgccaccatggatgctccgcactgtcaagtaacaggtgaggtcttcccagtgtagttttgcagctgatctcgacagcaacacacctgtcaccgaaatgcttcggtgaccctagatatcaaccgatgcacgatccatctcgatcctgtgatcgaataccggcgtaggtactaccaataaagtcaggccccgtcaaatgctttacatggtgattgaagtctggagcttctcagcaccaccatatattgtgttcagttcctgtgtttattgccatagctaccctttttttctctgatctacgagctagacgtagctttgtgcttggagattccactactatgtttcctctgtcctgtgtatgctttaacggagatgcacgttgtacccgtggtaatatatataaatttgcgttgtaaagatcaagtggctcttttctccgaaatgttatgaagtctcaggtgtcaaacatgcgtgactttttaactttgaactgtacgtttcag

SEQ ID NO: 25883 - DNA, 1469 bp, Zea Mays
gtcttctcccctccctccagttcattcccatttcccaacccaaaccagcggctggcacggacgccggcgagccgcgcggcccggaggaccactgcctcctgcatatagccggcttccgcggccatgtcatccgtacacttctttcctgcctcctcccagaccccggtccccgcctgccttctcaaaacctctccaaagtcacccctcccgtgcccccgcacccttgccaccacctctctccagagtgttggcggcaattgcaatgcgtggcaccgcccgcacctacggctgcagcggagggtccgcacccctgcagcaccgtccgacgcgccgcctgtgggccccgatggcgggagcgggggcggcggcgcggggggagggagtggaggggaggatgaggaggaggagggggagaagaagaagggactgttgcccgagtggatgaacttgacaacagaggacgccaagacggtgctggccgcggtagctatctcgctcgctttccgaaccttcgtcgccgagccgcgcttcatcccctcgctctccatgttccccaccttcgacgtcggtgaccgcatcgtcgccgagaaggttacttactactttaggaagccatgtgttaatgatataataattttcaaaagccctccagtgctgcaggaggttgggtatactgataatgatgttttcattaaaagagtagttgccagggagggagatgttgttgaggttcatgaaggaaaactcgttgtgaatggtgagggtagaaatgaagaattcattcttgagccaccttcttatgacatgaatcctgtgcaagtaccagaaaactctgtttttgtgatgggagataaccgaaacaacagctacgattcacatgtgtgcaaaaaacatattggggagatcaatttttcggtattggcctcctggtcgaatagggggtactaccaagggttgcttcagccctgaattaagccctggagcaaagccagaatcacttactgatgtcaaatcgacaaagtaggagattgagaagttagttttggtggtgcctgatgtgcaggggaagcttcggttattcttcgtggtagaatgtcacagaggaatcctgtgttgtgtggcaggtagttctattagaacccagagagcggaagacaatttgattctcattgagtcattgggattgggattggattggccagaaggcacagaaaccattttgtctcagggtttcttgtccttttgccttgctgtatacgtacgtattagggaaacttgataccatgatggctgacctagttaagctgcaaaaaagtatggttccactgttgaaatctagagtctggaacatgatgaaatccgcgtacagcatgacgcgcaagtacatcctgtaaatggagaacgtgtctattcaatgtgccgttgaacaacgcagagaaactacccggattacttacgctaccgcagaa

SEQ ID NO: 25884 - DNA, 1631 bp, Zea Mays
tgagtgtttattgttcgatgggagcttcgatttggattcttgcttggtctcttggtttctgctcgttttgtttggggactgtgcgctgaggggggtatgggacatgattcttgcacctgcacctgtccttccgttgattccttcctggatggctggataactgtcatcatgaggatggtgtgaggcgatctttgggatgtgttctcctgggcgttcagtgcaatcgaatgctcaattgatggcgatggagggacctgttttctgccgtcctgcaatgcaagcgaaactgcctgctgctgcgctgatcaacaactccctgaccaaatccgggcagcttgggactgcattgtttggtgccatttcaaaatacagaaacatttcaagattcatttctcccatctctcaaacatctacgaagaacataggtccatgctgtagcttcagctcgtcttctgatggtaatggatacatggctggaaactctagcgagagtgatgaagactatgttaattctactgtgctagaagcagttgaggtgagaagtggatcagaaggatatgtgataaagatgcgagatggaaagaacttgcgttgtgtccatagtaattttcaagggagaaatattccagagaatacaccacaacctgctattgttttgaggattgaagatggaagcggaactttactcccgatcattgttttggagatgccaagcgttcttctgatggcagctattcgtaatgtccacattgcacgaccgaccatatatcaagttgtcaaggaaatgattgataaaatgggttatgaggtaaaacttgttagggtaaacaaaagaattcaagaagcctactgtgctgaactttatttaacaaaggtcaatgatcctacagacaacatcaccttcgatcttcggccttcagatgccataaacattgctgttcgttgcaaggttcctgtacaagtccatagaagtcttgcatacagtgatgggattagaccagtcgagccagcaagaatggcagtaacagctggcctatcagatgggttgttatttacagagcttgacagacctgatggacagccatgtgtggaggctcaagagtttggactggtgaggaacatgctcattgcagctatcgaagagagatacaaggatgctgcatcatggaaggacaaactgattcggctcaggtctaagcgggagaactgggcctgagagcgtcgcatgtctggatggtgtaaataaagatgacgctcagctgaattccagtatgcactccagacaattgatactgtttatggctctatgtaactagctgtacatattgtaactagctgtacatattgtacgtactatgctcaggtctcagctaaattcagactaagatttgaagtgaaaaactaatccttttgtaatcttggccgtattaatttgtatgttagtctgttaggttgaatgtttggcatgaatttttagctcatcgacctgcggtgagatatgcagaatttcggttgtacacggaactaagcagcgctaatattttcacaggctgctgttaagaagagagattgctgctttgtttccattacagggaacgtacaaaagcacatatcactctcccacattagcg

SEQ ID NO: 25885 - DNA, 3254 bp, Zea Mays
atatgcagccactctctcctgtcatcctgtgtcctcgtcctttccacccaaaatccccgatcctcgaatcgattaaaccctaagcggcatggcgggtagcgactactgccggccggcagtgcgcccgcgcgacttctgagccaccggaagccgcccttgtcccggctccactgtcgcgtgccccatccaacactgggggagtgggagttcagagccgcaaacgctcagggcaaccgggaggacgggaaggtgtggccgcaaccgcaagacgcaggcaagaggcaatcaactcaccgatgtctcagtcaccgggaggacgggaaggcatatattacagcaggcagaggaaaccttcggaacgcaacggcagtgtatttacacccatagctgcaatgtatcccagcggtcacgcacttcctgatgcaaacaggaaccacagtttggtatttggcggtacgagcaaggactgggacaacatccgtcagttcattgctagtctggaacgcgcctctgaaaactcctctgcgatagccagcaaaaccggaggtggcaaatcgaccaaccattccgtggagccagccgaacaaaaaggaaagggtgacataatagttctcgattcagatgatgaggatggagatggaaacagtccagaacacaataagttggcatctgagatgaacaaagaactcggaacatctgtattggctagtaatatcgcagaaaggatggcaactaatgggagccaaacatttgaaaccgtgcatgcttatggaggtagtaagaacacgcagattgttccgtatggccaaggttctgctctggtgaatcagtttcctttgcaaaccagttggcaaccatctattcagtttgagagagttgtgttgacgaaaaggcctgaggagcagcggatgcaagatcttgtggctgctaccatagcggagaagagggcagaaacacaaatgttcctatcacttcctacggagagaaagcgaaggagaacagaccatagtttgttgatgcttgactcatttgtccctaaacaaagaagaagaaaaggtgacacaggtctagcaccagctgatttgtcattggatttacatcaaactgctacatcacaagaacctgacatagctatagaggaagaagagaaacgtaaaaatgatggtgatggtcttgaggattattggaaagattttgcattggctgttgaaagcacaaagcttgacgatgttgacgaggcggcggcaaatgaaaaggaagataatggaaagatggaggacatcgactgcaaccatgacattcggattcatgaagatttgggccatgtatgccgtgtgtgtggtatgattgtgagaagagctgattcaataattgattaccagtggaaaaaggcttcaaggagaagaatgaatggctatggaggaaattcaaaggatgctgatgagatagactgtggtactgtcaaactgtctgaagatttcatagttgcagatattgctattcatcctagacacgctcaggcaatgaaaccacatcaggtggaaggtttcaactttttggttaagaatttgattggagacaagcctggaggttgcattcttgctcatgccccaggttcagggaaaacatttttgcttataagcttcattcagagcttcatggcaaggtatccatctgcaaggccccttgttgtgctgcctaaagggatactagttatatggaagaaagaaattcaacgatggcaagtgcaggatataccagtgtacgatttctactctgtaaaggctgaaaaaagagtagaacagttgcaaatcctcaaatcttgggaggacaagatgggtatactgtttcttggatacaagcagttctccacaatcgtcactgatgatgggggcagcaaggtaacagctgcatgccgggacaggctgcttaaggttcccaaccttctgatacttgacgagggtcatacacctagaaataaggagactgatgtactagagtcgctaagtagagtagaaacaccacgcaaagtggttctctcaggtacacttttccagaatcatgttgaggaagtgtttaatatcttgaatcttgtccgcccaaagtttcttaggatggaatcgtcacgccctattgccagacgtataatgagtcaggttgaaatatttggcagaagttcaaaagggcttgctgatggcgcattcactgaggcagttgaaggaaccttgttgaacgatgaaaacttcaagagaaaagttcatgttattagaggtcttagagaactaacaagggatgtgcttcactattataagggcgctatattagatgaactacctggcttagtagacttcagtgtgtttttgaagctcacacccaagcagaaggacattgttcacaagttggaaatgcatgataggttcaaaagaagtgcagtagggagtgcactgtacatccatccttgtctttcaggactttcagaggttaatgctgagaacagggctcacaccttgagagatgattcagttgatagtctgatggattccatcaatgtgagagacggcgtgaaggccaattttttcatgaatatcctgtcacttgctaattccgcaggagagaaagtacttgcttttagccaatatatacttcccatgaccttctttgaaaggctgctggttaagaagaagggctggcatgtggggagagagattttcatgatctctggcgacactagccaagaagacagagaagcggcagtggaccgtttcaacagctccgctgatgcgaaggttctgttcggttcgatcagggcatgtggagagggcatttccatcgtcggcgcgtcgagagtcgtcattctggacgttcacctgaacccatctgtcacccgtcaggcgatcgggcgcgcgttcaggcctggccagcagaagaaagtgttcgtgtacaggctcgtagctgccgactctgacgaggtgaaggtccacgagacggcgttcaagaaagaagtcatacagaagctgtggtttgaatggagcgagcagtgtaccacggaaaacttcaagcttggtcaagtcgatatcgacgactctggggacgagctattggataccagagcgatccgccaggatatcaaggcgctgtacagaaggccaggattattgaggattaactgctatggtgtttagacttcttaagggctagtctaagggctagtctgagaaccccggatttctaatttgccaaggaaaattagttca

SEQ ID NO: 25886 - DNA, 2339 bp, Zea Mays
cgcacgcacgaatcttacgcggcgttcgaacgaatctccccttcctccgtgtagacgtgtagtatacccgttgccctccctccttccttcgttcctcccacggcgacacaccacgcgtcgccgaccaccgccaccgaatcgccgcttcccatcatcatagactatcgaggcgtcgtcacacggcccgctcttccatcagggcgcgtccaccggccaagccgccctgacccccggcgcattctcctctcggtgccgactgccgagatctccccggccctctcccgagaggagtgcccgctcttgacccgacgtccgcgatgacggtggcggcgctgcaggcgatggacgcgctgtcgcggcgggcgaccatgctgcgggactctctgcggcgaagccaggggaacacggacggcatggtcaccatcctcggctccttcgaccaccgcctctccgcgctcgaggccgcaatgcgccccacccaggtgaggacgcacgcgatccggacggcgcatgagaatatcgaccggaccatcaaggccgccgacggcatcctctcccagttcgatctcgctcgccgggctgaggcaacaatattgaggggtccccatgaggatttggagagctacctggaggcagtggatgtgctgaaaggcatttctcgcttcttttcctcaaacaagaacttcaagagtagtgaaggagttctgaatcatgtcaacaatctgttagctaaatctactctgaagattgaagaggaatttaagcagctgatgagtacatacagcaaacctatcgagccagatcgcctgtttgactgtctacccaagtctcttcgtccaacaaaaggtgaccacgagaccgatggaggcagccatcatccatccaaaggcttggaggctgccgtatacaggaccccaacattaattcctcccagaatattgcctctcatgaatgacatagctcagcagttggttcaggctggaaatcagcaaacttgctataaaatctacagagattatcgtgcttcagcactagaggtgagccttcggaagttaggagtggaaaaacttactaaagatgatgtacaaaaaatgcaatgggaggctttggaggctaaaattggaaactggatacattttatgcgaatcgcggtcaaattattactagcaggagaaagaaaaatctgtgatcagatttttgatggtgtgaattttaacaaaggccattgttttgctgaactcacagcaaatagtattataactcttttcagctttggagatgctgttgctaaaagcaaaaggtctcctgaaaagctgtttgtgttgcttgacatgtatgaagtaatgcgtgaacttcaaccagagatcgatgaaatatttgaaggcaaaccttgcactgagatgcgggaagctgcatcaagcttaacaaagcgcttggcgcagactgcccaggaaacatttgcagattttgaggaggcagttgaaaaagatgcttcaaaaactattgttcaggatggaacagtccatcctttgactagctatgtgatcaattatgtcaaattcctattcgattaccagtcaacattgaagctactgtttcaggaatttgatagtggcactgaggcagaatctcagcttgctgcagttaccacaaggataatgcaggccctacagaataacctagatgggaaatctaaacaatataaggatcctgcattgacacacttgtttcttatgaacaacatccactatatggttagatctgttcgcagatcagaagcaaaagatatacttggtgatgactggattcagaggcatcgcaggattgtgcagcaaaatgccaatcaatataaacgtgttgcttgggcaaagattcttcagacactttctgttcaaggtgcgggcagcgggggtgaccttaccagcagtagtgtttcaagagccacaatcaaagaacggtttaagtctttcaatacacaattcgaagagcttcacgcgaagcaatcacaatggatcgtacctgatcaagaactacgagaatccttgaggctcgctgtagccgaagtcctgttgccagcctaccgatcttttatcaaacgctttggcaatcttgtggacaacaacaagaacccgcagaagtacgtgcggtacagcccagaagcagtggaccaacttctaggccagttcttcgaagggcagcaatgggcggagcaaaagcgctgagcaacatagagtgagagtgacggcatgagtacagccagatgccaccacgcttgcagagctcgatctggcggtctcgtgtttggcctcctttttcagctgcttatcaatggaactctc

SEQ ID NO: 25887 - DNA, 1796 bp, Zea Mays
cgcagccgtcgacgcagaccctcttcggcagccgcgcgtcccttccccgctcccggcgccatggactgcgcaaaggggagggcggtggcggacctctacgacgaggtgatggtggagatcctctcgcgcgtgcccgtcaaagacctccgccgttgcacgtgcgtgtgcaaatcttggcgcaacctcatcaccgaccccctcaaccgcaagaagctgccccagaccctggaaggcttcttccacggcgtcgtcggagggcctcacagctacggccaattcaccagcctgtcggggagcggagaacgcgtggctccggtcgacccttccttctccttcatcacggcaatgctgcctggcgtggagcgcatggtcctcttggattcttgcaacgggctcctgctcttcgggtgcacccgggaggacaagttcgggtacatcgtgacaaaccctgcgaccgaggaattgatgactgtgcccgccagctccggctcttgtccccttccacctccatttgaaagggacatggttggtggggaaagatatgcgcacacctttctgatgtttaaccctgctgtctcctcgcacttccacttggtccagatctgggagaataaggcggcgaaggaggtggaaacggtgcactcttactcgtctgaaaccaaggcatggagtgacaggtcaagcaagtgggggcgaggtgaagagggcggtgaatgggagctgtggggtgaatccgtgattggattcatgtgtggctggacattggtcgatggtctgctgcattttcttgccttcgatcttcagaaagaagagactgtgataattgcagtggatggggaaggggaaactcgtaggatcatcggctggcatggtaaggatgtgagagcaattgtttttattggtgaatcccaagaccatctacactgcatcggtgtgaatgtgcaattagatcaaggctctgaagtgcgcttcacgcggatgtcgatctgggttcttgaggactatgatacacaagcatggatcttaaagcacaatgtgagctctttgcagttctttgaattactgagtcacccaatcaaagacttccatattgtggccattcatccatatcacaattcgttcatccttattcagcactggaaccagaaacttgtatcatataacatggatactcaggaactgcatggtctcggcactcttggaaagggctatgcggttattaccccttacataccctgtttcttggagtcatcggttcttgccaccaaacactgaggttgttgtttctcggggacttctctgcatgttcaacaagagcctgatcatccaagtgtggggcaaggtgatctagtatgatggtgctttaatgtccttttgtaatgctttgagaaagctgtttacagggcaacatggttagttccatgatatatcagtgagaaagctgtttacaggacagcatggttagttctatgatatatcaaattagatcacacttaattgctggtcagtataggtattagcttcgatattttgttgtgattattcaatattgaatgcgcacctatggtattaccctgtgtgttcagcttgttggcttttcccctctgttttttcttcttcttaatataatactccctccgctctaatttataattcatttgattttttaccctaagtttgactgttgtcttattaaaaaatcataattattgttgatctttgatgtgatattgtttagcatttaatatactttaaatgtggctttgaatttttcattttttcccgcaaaaaaataa

SEQ ID NO: 25888 - DNA, 1768 bp, Zea Mays
cgggaaccgggcagcacggcttgctaaacacgcagaaaagaaaagccgttctccctccgtttccccaaaccccaaggtccccaaccatggcagccgccgccgattctgcctccgaccaaaaccctaaggacgccgagcggcacgtgctcaccgccgaatccgacgccgatttctccgaggaggactacgacgaggatggggaggaggaatacgaggaggaggaggagctggacgggccggcggcggcggcggcggagcgggagcggatgcagtccgtgttacggaggctgtcatccgaccccgtgggcatccgcgtccacgacgtgatcatcaagggcaacaccaagacgcaggacgagctcatcgaggcggaggtcgccgagctgctccgcgccgcccccaccgtgcaggacctgctccgcgccgccagtgtcgccactgcgcggctgcacgatctcgacatcttcgacgccgtcaagatcacgctcgacgccgggccgcccgagctgcctggcaccaccaacgtcgtcatcgaggtcgtcgaggtggccaaccccctcactggcaccgccggcgtctattcgaagcccgaagcaagatcttggtcgctggaagggtcacttaagttgaagaacttgtttggctatggtgacatctgggatgcatcaggatcctttggttgggaccaaacaacagaggttggtgttggagtctgcctaccgaggtttaaatcaataccaacaccattgatggctcgggcatctttgtcatcacaagattggctgaagttttcatcatacaaggagcgcctacttggcctttcatttggtttgctgtcaacaaggaaccatgacttgtcatacaaccttgcgtggcgtaccttaactgatccatcacgtgtctcatcaaaggccataaggaggcagttagggcataaccttctttctgcattgaagtacacatacaagattgataagagggattcacatcttaggccaacgaaaggatatgcgtttcagtcaacttctcaagttggtggtctatggaatagcaaaggattgagatatttccggcaggagttcgatgtacgtggtgctgtgcctttgggattttatagtgctgctctcaacgttggtgtaggagcgggtgtcattttaccgcttgcagggggattcatgaattcgacttcatcagtgccagagaggttttatcttggaggtaattcttctccagtgtgcagcttggggtgagtacaagaacttttcggcttctgaatttcggcaaacgttccggagctctgctggcgttgggattattttgcctaccaaacttttccgggtagaggtgaactattgccgcatcctaaagcaagctgagcatgacagcgcgaagactggaatccagttcagcttttcctcgcccatgtaggaacttgccatggcagccgaaacagctgcactttcctctgtagacttgcatttcttcccgttcttttcatgctgaagcaattgaagaggttatttacgtgctcccttttcttgtgacgcttgttcattgacacgaggagctgctccttttttttggtgtcttcaggagatgggtttattatttgctgtttttgacctcacgagggatttgtcctcgcacaactcaaataccgatgctgtggctacacaatggtggatagaataatattttggcccataatgttgtataattcataccacatcagctttccgtgtcattcgctcgtttattcgcgtgtgtt

SEQ ID NO: 25889 - DNA, 1581 bp, Zea Mays
acgagggacggacggcgtgtgggtctggtctgggaggcactggcagtggcagcctgccccgcacgccgcgacgcccgaacgcaaccgaaaccgccaccacgccaccccgcctccttttctgctctgaattgctgcctcccccgctcttgtgcgtggcgcccagccggcacggaagctctcctcgcgctagctagctagctagctgctccaaatagcaaggccaccaagtgagggagccaggcaggcaggcagccagcacgcccaccaggccacctccctttccttcccctcccgagggcatgcgtgcgcggtccaagcgtgccaattgactcgcgcacgctctctcagtcccagactcccactctcccagtcccagccctctctccctgctgcaccgtgtcctacttactcctagcgagctcgtcagccgcagtaccttgctccgcctccgaccccggcgcgagcgggaatctacacccacgtgctcgcggccgtccatgggctggccgccgagcagcggctggggcgaccggcgacggaacgtgtccgccgcggcgctgctcttcctccacctgctgctactcttctccgcccccgcttcccgctcgagtactacccggaggcctggcgctgcaagtgcggcaacaagctcttcatgccctgaccggtccaacggcaacgacaacggcgacggcgacggcggcgccacctctccctgctgcgcacacgctggtaccggtgcactggtgcatctctcactcactggatctatctagctcgtcaggctaaggcagcagcgggctgcgtcgccgtggctggtgcctgcacgtaccgcactgcacgcatacatgggatcgaaggctagctctgtctaccagtgctactgctggtgtaggtgtacacacagagagacatggagaacacggcaaggaacaagtaagaataggacacgagacgacgaagagatctgcccatggaacaaagaggcctcgattccgtcatctaatgactggaagagcatttgccgagttcttggagactgatgatgatacgagctagtctggtactccctgctctatgttgtaagtaacctcctgtgtgtgctgtgtgtaccaaagagcgagcgagcgagagagagacgtcgatgtcgccatttttgttcttcctttcgctacggttcttgacatgcatgttagtgactgaaatccctatccctgtgattatgatctgtgacgtgattccattgacatactgacttggatctgatgcgacgattatgacgagttctatatgtggacctgtgttggtcatccgaaacataactttgatcattctgttgtacgtacacttgagttattctaatagatccttgtaagtcatctactacttgctctggatcgagctcgatcgggaccagctagctgagaaccattccttcctccagagttcagacccccgctttcctgtcatgcatcagggttgtctaatctccatctaccttatggccactgcatccgtgcagtcacacgacgctctgtctgagactgagcaagctcacctgcagcagataaaaaaaaagaa

SEQ ID NO: 25890 - DNA, 2253 bp, Zea Mays
gacaacatgcacccccccaccccgcacccaaccccacaaaaaaaaaggccgtgtaaaaaagggaaaaagaaaaaaccagagcaacgcagccgcaggctgggtgagcggcgcgggtcttcgtcggccggccccttcaccggtggcgagcatccaccagaccaccagtggatgcgcccctgccccccatgccccaggtcgagtcggccactgcctcggaggcgccgccgccgcaggacgcatggctcgtcgagctcggcagtcgcctcccgcagtgggagtcgctgcgggattcctccaaggtacagtctacagatgcccctgttttctcccatcctagggtttgttctgctgtatggtagcgctttgagatgccacataatttctaagttctacgtgatgtgaggtgctggagatggagactcgaaatccctcgcaagcatatgggattttagtttccccgagggcgaggtcaactaatttgattattgctaattgtcgctagattttctgttctgggtatggttttgcttatgtagataggtatggaatgtctcaagcactcggaggcattatttagttgtgaattatgatggttgttaattctggtgttgctgctggctcctggttcttcattttactaacatgaaaaggcttagaggttcttaagtaaaacaagttttgcgattgtctgtcagaacaggcagtggcggacccaggatttcttcaagtctaggcaaatcgagaactaggcaagacaatgatgcttgcagttgcaggccctgagaacaagcatgatgcttgcagttgcaggcacctagcgcacttagggggtgtttggttcccaactactaaactttagaacttttagtccctaaaataggcaaatagcaaacagggtgagtaaaatagctcttccaaataggatttatagggactatagtttagtccctaaagtttagtagggtgactaaaggaaccaaacacccccttaatttgggatgtaatgccattttttttcttacgcaggtcattatcccgatttcaatatctagggtgaaccagtttgatgctgcaaggctagatgttgagatgtcggccatgttgaaagagcagctagtcaaagtgttctctttgatgaaggactcttattccaatatgagcctgaacttgatgctttccttgagttcctcatctggaggttctcaatttgggctgacaagcctacccctggcaatgcactgatgaacctgaggtacagagatgagcgggcagcacccatcactggaaaagaagttagaacaggtttggaaggacctgggctttctgtttctcaaaagatattttattgtattagctttgttggtggccaatatgtatggtcacgattacaatctttttctgctttccgtcgatggggcgattctgaacagagaccactagctcgccgtgcttgggcgttgatgcggaatgctgaagtattttatagggctgcttcattctttaacctattattgtttctttatggtggaaggtacaaaactgttgtagaaaggattctgaaggcaagacttgtttatgggagccccaacatgaatagagctgttagttttgagtacatgaatcggcagctggtctggaatgagttttcggaaatgttgcttttgcttcttcccctcctaaactcgtcttcggtaaagaagttccttctccccttctccaaagataagtcaggaggttcttctggtgatgaagcagattgtcctatatgtcggtccagtcctagcattccatttattgctcttccatgtcaacacaggtattgctactattgcctacgcacacgttgttcggctacgacttcttacagatgcacacgttgtgacggggcggtggttgcaattcaaagactaggatcaggttagttttacgacctagttgggttaaagaattctcgcccgtttctacagagaatcagcacttcggtgtttcatacggttacaagtttggatacgcgtcattcactgtatgtacatgtaattgccccaagtgtggacagttcggatgccatgagcccataactgacttgttgtatatcgaatgaatagtccgtcacaaaactaacacggattcactatgcgttttcttttcgattcgtctatttcaaaaatcgtgtattgaaaaatgccaaaacaattattggaaagagcaactgattcactgattatgtattgaaaagagattaggtttttaagt

SEQ ID NO: 25891 - DNA, 2636 bp, Zea Mays
attccaaagccaaagattgcatcagttctgctgctatttcctcctatcattctttctgatgttgaaaatgatattaagcctaggattcgtgaatgggagaaggctggcattgaacaagactatgttagtaggatgttgttgaagtatccatggattctttcaacgagtgtgatagagaactacagtcaaatgctgttgtttttcaaccaaaaaaggatttccagtacagtcctcgctattgctgtgaaaagttggcctcatattcttggctcctcttcaaaaagaatgaattcagttttggagctgtttcatgttctgggcatcagtaaaaaaatggtggttccagtcattacatcaagtccacagttattactgagaaaacctgatcagtttatgcagaatgttttgtttttcagagaaatgggtgttgataagaaaacaacaggaaaaattctgtgtcgttcgcctgaaatatttgcttcaaacgtggataacaccctcaagaagaaaatcgattttcttaccaactttggtgtttctaaacatcatcttcctcgcatcattcggaagtatccagaacttttattgttggacataaattgtacattgctccctaggatgaactacttattggagatgggtttgtctaagaaagatctgtgctcaatgatctttagattttccccacttctaggttacagtattgaacttgttatgaaaccaaagcttgagtttctgctaagaaccatgaagaagccacttaaagcagttgtagaatacccaaggtacttcagttattcactcgaggggaagatcaaaccgcggttctgggtattgcagagtagaaacatagactgcactctgacagagatgttagcaaagaacgatgaactctttgctgaagagtacttgggacttggaggattgctcgagaaacctctacaatcaagcataggcagttaatttctggacttataagattgaaccatgcagtgcactatgccgaagctgtacagctttatgcttggattggtgaggctgtttttcagatgggaggtcacttttttttgaaaacggagatgtgtcgctggctgttcttgctatggtacccgcaaaaataattaaaacaaggactgtggctgacgcactctcaaacaacagttgggtttcagatattaaaggaggactgtccatgattggtctgttcgaaattttcagctatgggacaccacacatggagtttctttaaccactgacaatgatcgccatatctggagattctctggttggggtgaattctcgtcgaaatcggcctacagagtcttcttccatggtttggtctcctttgatccttggaagcgtatttggaaaacttggactccacctaattgcaagattttcttttggatacctgtccgaaatcgctgttggactgcggaccgattggctcggagaggactggcacacctagtccattgaattctttgcgaccaggaagaggagaatattaatcacaatttgttttcctatgttttcttgagggaattctggtttagagttttctcctggctggtgtatgttgaccgtgtgccggggtcccaggagcaatcgcttgcagattggtggtgaaaggcttgcaaacatctcccaaaagaaaaaaagggaagggcatgaattcgatgattatgttgggagcttggatcctatggaagcatcgcaatgcctgcgtcttcgaaggtttgcagctgagtatgtggaatgttctgcatgctctcgaagatgaacagcatctctggtgtctcgccggagtgcaaggactgcagagtttaggcctgggctccctgagcggttaggtggcatttcctggtctggtctcaccatttctatttgctgtaagagttttgttcttgtaagcacagcccctcacggctcgggctcggtccggaatgaggggtaaaacttgtacgggaggccacttttctggtgcttagtattaaaaaggtaatacttgttctcatgaaagtgacctaacaaaagttataggtacaaatatagactggagtgatgttgttaactcaataccaaaacagcaaagcattgggttttgagaatacttcattcaaggtttaagaagaaattgcaaagatgcggtttcaaactaggaaacggagtgaaggatgccccacacctttgagtggatgcgcgcaggaaccaatgcaagctgtagtaaggccttgaagtataaggcaacccaagtctgccatcatctctttctcgttgaactgaagcctgtccatgcctccatggcccagtccagcatcatcgccaatcagagctgagggcagccgcagagccagcggtagctagtcggctagtccattgactggccggtgcaggggtcacggactcacggttctgcatttcatattttcgtttaggtgtcgtttggatccgtttattttggaggaattagaatctatttaatagagtaggctatttagcttggaatttgacattccaccactttacaatgttaaaaaataagttatctcaaatttatagaatggaattgactttatgtatcttcaaactacgtttctactctacaatttataacatgtttttttggctcgctc

SEQ ID NO: 25892 - DNA, 2126 bp, Zea Mays
ccggaagaagccgcaccaggagcaaattcctcctctctcgagggcggttgcgtgctcgcgtgaagaaggccggggccctatctctccgatcgcggtagggcgttcgcagcgccgattcgagccgacgattggccgtccgcgaaggttaaacaaaatcaaatccccctgttcatgtgttatggcagggcatcatcataataacacacatgcctccaggatggatcatgtgaacaggttccagagtgaagcacagccttttggcccaaagttatttatgcattctagaactgatgcagcaaatggagctctaccatcaggttatgtgggcgcaccaataagaccaaatggcattccattctcaagtcacaccgggcaatctcatattcagcacagtgatgctcctggaaccatgcttgcatcctattctggctatcctcttgctggaagctccagtagcacctatgcaccacataatactcatcatctgcctgctttgagctatccacataggtctgatgataacttcattctgagttcccatatggatgacagaagggttgcactgaagcggagaaatccaattatttatccagtggatggagtcaataatgggagctgttatgctggcagttcatctaatcctcagttcccatgctacatgcctccaaatcctattcctgctcctgaaccctgccctcctcgaataacatcaaatatgggttcaagctactggactgatcagccctttggtagcaatggaggatctcagaggaatgtgagaggtcgccatgatcacaatcctatccatttgggacacaatccaggtgtagcttgcgcaacaagcagcactcatgggccaccacaccatgctaatgtaattggtcctcaaagtacagcagtgccacaaaatagagcatatttttctatacctccaagagtgactgccccaggcagcgatggaaactgtagcatggttttcagggaagggacatactactctgctccgcagaggaccaacataaatgccccccctgtcctagcacctcctggttcttctgatagtctacattttgtgcatggtgggtatgccccaagagcagcccctcctaacagcatcagcacatatcctgccccggcttttgcgactcctaacaactcagtgacagttacccatgagcctgatatcccttgctatcgacctgccgtccctggctatccgcctgctacctcagcagcagcagcagcagcaagtgttcatgctgaaggtgctgctgcatcttcgagacatctaggtcatgtggctctaggttccagtggtagtgcaaggagtagaaggctgagggattcataccatgcttttcgtccactggttattgaagaaaataacttgagaggaccagcaaccgagcgttttatgatgctaaatcagttatttatccatgaatcgagagaagattctgaccctcactgggacatgaggctggacattgatgatatgagttatgaggagctgctggctttgggagaacgaataggcaatgtcaacacgggcctagctgatgaaaaactttcaagctgtgtgacggagataccctgctgcagctctgcccgtactcatgatgataatgagagcgcaagatgtgtaatttgcctggaggattacaaattcgaggactctgtcgggaagctaaaatgcaatcacaagtatcacgcagactgcatcaagaaatggctgcaggtgaagaacgcttgcccagtctgcaaagcttctgcggcagatgacggcggaggcaccgaatgaagcgccctgccgcccccattcaccctatctcaggcgaagctgtactggctgatctggtttgctgtgtgtaaataatggtcctgaaacggattatttgtgagctgaattaaactcgacatgtaaatttaatcctcaagctagttgcaaattgatggcagcggttagccctacgtgtcagccgtctgacgtaactgcagagagaaaacgtttgcatgcatatgtacagctcgatccaatagaggttattaaatgttaacaatttattagttagttaagccgtctttacgacgtccatcgtcacctaattaaattgcaactaattttc

SEQ ID NO: 25893 - DNA, 302 bp, Zea Mays
ttcatgttgcctgccggctacgcttcctctttggtgctttctgctcgaaggtttggatcctaggtacatggatgacatgacatgcccttcaccttcagtgctgctttctgctcgaaagtttggattctaccgctgcatttcatcttcacagtaattgcccaagctcaaaacagccatcatgaacctttcgccaatgcaacccgccctattttcggtggaggcacataaggttacccgtagacacacaaacgaaccatactgcaaaaggtgataccaattgtcaatgctttcatatggtgctg

SEQ ID NO: 25894 - DNA, 2007 bp, Zea Mays
atgggagagagcgtttccagtcgctgcgctgcgcgtcattctcctcccctccttccacccggcaaaaaccccgcgtcggccactctccggaggcgactagggtttcagcccctgggacacgccgccggtcgtggcacctccgccaccggatcccggtacccgagctacgccatcgccgccccgcccccggtcaccgccggtgcgcttccgccgacaccagacgcagctcgtccgccccgtcacgtgcacctctgcgtgggcgcgggattggatagggtttggggtttcggcggctggcgccaaatcccaccgctgctgctcgcgcaggaggtctcgagccctcggggttcccctactccgctccggctggagttctcgatgaaacttgttctacagtgttcttctgttgcatgactcagttgttttgagttatacttcataataacaatgcaaacacgaaaaaagggtgctgcaaaaaatgcagtggggtatcatgccaatcctaagacaagtaggccatccagaagggcaactcaatctacagttgctgaaaagaaagtatctgatctcatcacgtcttcttccaagaagcagagacctgttggtgtcacttccaagaagcattctaaaggaggaaggaagctgctagtttcatgtgatacaactgatgctggaaatgatgcacctcaggcccagcattctgatggtgttgcagatgatcgtcccaacgattccatattctctccaacataccatcatcacaaggaaggtggtgtgaataacctatccaaaggcttagaagaacaaacaacacatgttcatggtagtaaggaagctagcctaaaatctggttcaaaccttgcatgcaacactcatgatgggataaatgaccactctggcacactaaagttgcaatcagctgggcaaagcacattgcttgaagtggatgagtacagtgaactgggaaacctttcctcagaagtatcagcaatatatcttgctatgcagcagtctaagttggagtgcattgatgaacagagtcaagattctacctcaacagaaggttatggtgaagctgaggagactgaagagtatgatgattttgacccctactcctttatcaaagatttacctgatttatctatggtggtccccaagtttcgtcctgttctccttccaaagcagacccggagttgtcctacgatgactcttgtacttgatcttgatgagacacttgtacattcaactcttgaacactgtgaggatgctgatttcacatttccagttcattttaacttcagagagcacacaatatatgttcgatgccgcccctatctcaaggaattcttggatagggttgccagcgtgtttgagacaattattttcactgctagtcaaagcatttatgcggagcaacttctcaatgttcttgatcccaaaagaaagttgttccgtcatcgtgtttatcgtgaatcttgtgtctatgtggagggaaactacatgaaggatctgacagtacttggacgtgacttaactcgcgtaatgattgttgacaattctccgcaggcctttgggttccagttggacaatggcattcctatagaaagctggtttgatgatcccaatgacatggagctgctgaaattgctcccgttcttagaaagcttggtcggcgttgaagatgtcaggccttatatagcaaggaagttcaacctaagggagaaggtatttttcaggtgccaaaggtcgccgtgatgataaatgtaggaccggagctgatatagtggttcttgttgaatgtagcatgtcaggatctcctggctccttgcattattgtatgctctaccgaccgcaatgtacaattttcgctgcagttggcagttgtagacttcacttgcattttgttggcccagttgacatgggaagggcctacttgaacattttgtcgatcagttaatatcgtgttgattcatatattgtctgcgacatgtgtgaaagtcgaccgag

SEQ ID NO: 25895 - DNA, 3671 bp, Zea Mays
tgcaactgcaagcggatgcaccgccgccttgccaccgcagccgcatcgcccgcgctccggcgcttctcgcaccacagcgtccctatagggaacagtgccaggtgtagaagagctaagaagcggtcttgctcttgctggagacgctccggcagctgtggatatagcgcatccgtggccgcagtgggttgcgctgatggaactcctcctccgtcggggccatgttgacccctccgccttcgccgccgcctcgctgtcttctaagcatgccaacgctgtccgcaccgcctgcctccgattcgggcgccagcgaccggagctcatccggcatatatcaagatgtgatattcaggttgccctacgatgtggttgtcccagcattgacaggaaggttgtaaactctgggaagcgactgcgggcttatgtagggcttgttgaaggagagcttgcaaagaagcttcatccagacacgaataaaggtgatgcggatgcagaaccgaagtttcaagaggttcagcgagcttatgagttctttaggaacattttcagggatagggattttggaagccatgatattaaggttgcacttgaactatcatttatggaagcagttcaaggatgcagcaaaacgatcaacttccaaacgtctgtcacgtgcgaaacctgcaatggagccggcgtgcctcctggaaccaaacctgaaacatgtctagcttgcaggggttcaggatttatgttcatgcaaactggacccttcaggatgcaatcaacttgcacaaaatgtggtggttctgggaagactgtgaaggatttctgccggttcctcgggcgggcctcgcctggtcgccccgttatgtgtagccagtggctgcctgcttctccctcctcaaggcgcagcgtagcacagcggctgcgttgctggcggccaaagatgatggcgcgtcgcgatgtacaacttctggtggcacgggggatctcctcatcaccgcgcctttctcggaggatcaaccaaacggaaagtgaaattgttcgaatgtttcatcctccaattcgtaagagtgaggaagcaatagcaaccattgcgccaagatacacacattctgtgcgtgtcttggatgagaggttcattaggatcctgaagatattcaagtggggccctgatgctgagaaggcgctggaggttctcatgcttagagttgatcactggttggtacgagaggttatgaaaactgacgttggggtcaatgtgaagatgcagttcttcagatgggctgcaaagcggaggaattatgagcatgacacatccacttacatggcattgatacattgtttggaagtagtggagcagtatggtgagatgtggaagatgatccaagaaatggtacggaatcccatttgtgttgttaccccaacagaactttcagatgtagttcgaatgctggggaatgctaagatggtcagacaggcaattacaatcttctaccagatcaaaacgcggaagtgtcagccaattgcacaggcatataacagcatgataataatgttgatgcatgagggccaatatgagaaagtccatcaactatacaatgagatgagcactgagggtcattgcttcccagacactgtgacatatagtgcattgatttccgccttttgcaaattaggtcgacgtgattcagcaattcagttgttgaatgagatgaaggagatcggtatgcagccaactactaagatatatacaatgttaatagctttgttcttcaaattcaatgatgctcatggagcattgagtttgtttgaagaaatgaggcatcagtattgccgaccggatgtgtttacttacacagagctaatcagaggccttggtaaagctggtagaatagatgaagcatatcacttcttctgtgaaatgcagcgagaaggctgcaggccagacacagtttttatgaataatatgataaatttcttaggcaaggctggccgtttggatgatgctatgaagctgtttcaggagatggaaacattgaggtgcattcctagtgtggtgacatacaatactatcataaaagcactttttgaatcaaaatctcgtgcttctgaggttccatcttggtttgagagaatgaaggaaagtggaatatccccaagttcgttcacctattctatccttattgatggattctgcaaaaccaacaggatggagaaggccatgatgctactggaagagatggatgaaaagggtttccctccatgtccagcggcatattgtagcctgattgatgctcttggaaaagctaagcgttatgatcttgcttgcgagctttttcaggaactaaaggaaaattgtggctcgtctagtgctcgggtatacgcagttatgattaaacacttaggaaaggctggacggcttgatgatgctataaatatgtttgacgaaatgaacaaacttggttgtgctcctgatgtttatgcgtacaatgctctcatgtctggattagcaagaacaggcatgcttgatgaagctcttagtacgatgagaagaatgcaagagcatgggtgtattcctgatatcaattcatacaatattatccttaatgggctggcaaaaacgggaggacctcaccgtgcaatggaaatgctttctaacatgaaacaatctacagtaagacctgatgtagtctcgtataatactgtccttggtgccttgagtcatgctggcatgtttgaggaggcatcaaagctgatgaaagagatgaatacactggggtttgagtacgatcttattacatattcatctatacttgaggctattggaaaggttgatcatgaatatactgaccaaggttgatcatgaatgtgaccctcaaagttggaggcgtatcatgtgcaatcactcatttggtgcaagcatgcgatcaaaccatccagagcatccaatctagatccagcggtttcatatggaagagattaaaccaaaaatgggtactaggtttcagtaaatgtaaatagccgtcaccattggattttgattagatgcactacatcaatatgattgattgcactgtatatcttcccctcaaggttcgtgaggatcatcgtgtattttgaagagtgaaaggtgatattcatgttggtgctgtcctgaatgtgacacggcttgcaaaagaaagaaaagagaagaaaaggtttctttatgaccactcagacacccagcaatattcttacttcgatcacactggcttgatcaagtcactgctaccgacatggtgcttgggattttgtagctggaataatgctggaccgccctgcctgatgtgtaatcatgcacgtaaatgctatcagtcgtgcagggactcttgtagtacaactttgtggatcagggtgaccatgtaaagaacacacggtacctgtgtcaattcatgttttctgttgaggtttcagcttttaattaaggtaaactagtgtagtgtctggctaaactttgtccttgttcttgacgaatgatgtaactctgatcgctttttacatgtttccatcttccaagaacgtgcacatatttccttattattaaagccagatggaaacggtgcctcagagcctatccacgtcgctccaaaatttcgtagccgttagatttgtctttaacgcttaggatttcagacgttaggatttca

SEQ ID NO: 25896 - DNA, 1319 bp, Zea Mays
ccacaggccacatgtggagtggtcatcgcatgcacctgagcagacaaggcaaggcaatgatgctgagcatcatcaagagggcaggtcatctggagtgaggacacatccatttaacggctactttgaactgtgtcgttcaccgagcaagcagattccactggcaggcaaagctggtatcaatcaggtgcgtccattgtcaggacaccaacagggtgttgtttgggaaaagattggtgtggaggtagttcataacatgcagccattgcacgaaatcaagaatccgagcagtgaggggcggaaggccatagactctggcattgaggattgtgtaaagaaacccatgcatcatcgtcttcagtacaaaccagtggatcaggagaatgcagcaagtaatgaccagaagagtacagagttcaacgagccaacagctgagggaacttccgctggggtgaaaaggaagctgaccaccccaagctcacctgtcaagaagcagaagccactcgggcaatggagctgcactatctgccaggctaacccagctagccagcgccaacttgagcaacaccttgccggcaagcggcaccagtcaaatgtcgcagcactgcaaccatctcagagcaacagcagcagccctgagcctgacacaaaagcgacgcccgcgaggagcaggatcatcgcgacgaacgcgcagcaagacggcaagcaggatgtgccggagaacagatggacgtgtacactctgccgggccaagtgctacactgaattgaactactacagccatctcgggggcttgtggcaccgggagaaggcacaggccaggcgcgaggagcacttgaggttctactgctcggtgtgcgacctgcaatgcaacagcgagaaaatgctggagtcacacctcggcggtaggaggcatcgggagactctggaggcgcgcgactaggatgccgaggcacggctgcaggctgacccgtccttgttcacggggaagctgttgtggctgggttccggcgggtcgatctgccattttgaggggcactacggtggtgcacgaagctgctatcgctggtctgctgctggactctgcctagttcgttgatttctctcgtttcgagcttttagtttcacgttggtaggttttaatgttatgcgacttttgatcttcgggcccaagacaaaacagacttgaaatgcgtatgtttcgatgtagtagttggttggtgttgcttattttgcgacgttttttttattttttttaaaacgtactagttgaatcctccacgctttgcatcgggaatgcgttgaaataattccacgagaac

SEQ ID NO: 25897 - DNA, 4906 bp, Zea Mays
atagagtacacagggatggaagactaccactctcaccatcacaaggcgaccagcacggctcatgagcgatgccttccagcctggcagtttgttggatactttatcaacaaggggctgcagcgctgcatttgtcagtttccgaattgacagaggaagtcctaggtaattgcatggaaactcctttaactcacaaggcaacagctcagagataacagccaaatcatcgtctccacactggataggtgtgactgaacttttggtaatgttggtcttgaggcctgtagaatgcccaaaaatatcaaggagccgagtgaccataaggaggtcagatcttagtggccggaggaatatgacaacatcatccgcataaaaagaaatacgatgtttagcctgctgatgagcaatgggctgtaagagatgctcctgagttgcaaaatgaacaatagaatttagaacttccatgaccagtataaatagcatgggtgacagagggtccccttgacgaaggcctcgacggtgagagatgcagtccccaggttcaccattgattagaattctggtagaggatgtggacagcagcaaactgatcagattacaccacttgcgaccaaaaccaagatgttgcagaagctccaacaagaaagcccaggacacagaatcaaaggccttggaaatatccagttttaagagcacatgaggctccttatgatgtaacgtccttgcaagctgctgcaccatcaaaaaattatccaggatgctcctccctttgacaaaagcactttgattgatggtgacaagcttgggcagatgaggagccagacggttagcaaggagtttagccaccagtttagcaaaactgtgaattagactaataggcctgaaatccttgacatgtagggcttcagtctttttaggcacaagagtgatgaaagcggagttgataagcctgaaattgaaaacatggcccctctgcacagcgaggagcgcagccaagacgtcatccttgattgaattccaacagaccttatagaatcggcccgtgaaaccgtcaggccctggagctttgtccaatggaatctctctgatagtagcccagacctcttcctcagtaaatggcacctcaagctcagagaggtcatgctgctgcacgcctaaggaaagaaaatccagagtgaagtctctttgctcagccgaaccgatcaaagcatcataaaaatcgagggctgctcgaagtttgtcttccggagatgtgacaacccgatcattaacaataaacttggcaatgatttttttttcttgcggtaatgtgcctgttggtgaaaaaaggaggtattgtcatcgccctcccggaggtaaagaatacgggaacgtaatcttgcaaccgtgtgctcaagagaggccagatcgagggaatgcatctttaatttttttttctaaaacgctcctcatcagctgagagggcacggctatctcttgcaatttccaagcgatgcgctgaagtttcagaaatatgcgctccaccgggtagctagaagcaactggagcattccaattttgtgagacagcatccatgaaaccaggaagtttgggccagaaactttcgaaatggaaacgtcgtttgccctgagtgacaatattcagacccaggaccagagggcaatgatcagatactccagaagctgcactctggaggagagaatcaggaaaaatatcatcccagtcagcacagcaaaaggctctatcaagccgcacaagggtgggggacgacctctcatttgaccagcttggtagatcatgttgaagtcgcctgccagcaaccaagggccaacacagagagctctgacctctcttagctcctgcaagaattgtagcttcagatcatcctcttgggggccatagacaccagtgaaccaccaattcctaccctcttgctcacaaactggacagaaaccgaaaatctgtccacacgggaagagattgcatgacagcaggcccctttccaagcaatgaacacgccacctcgagtaccatcagcggggagagccacgaacttgtcaaaagcagacccaagagcagagaggaggagctgtgacgacacgcttgcaatcttggtttcttgaagacacacgatgtcagcgctggaggaaaggacagtgttgcgtacagagtttcgcctggccgtcagattgaggccccccgggtgttccagactaggatggatgacagattcatgaggaacacgaggcacgaccaaaaggacaaaggttcctcagaaaccgatcagcagctccctctccaggacgtcctcatcatgatctgtctgccaaccgaaaatagcagcaagagcagcaagctccacatcagacagaggcgtctcgaataattactatatacaatgtcgtgcaacaaaacgttcacccgtaacgccacgtcgccttcttaatatcagccatctgatatgcatcacacggttgttcctactcttccgcttatctctgctaggctgccctcgctccttttggaagcggcttcgtcgctttttcaccgacgacgccatcctttttcgccgccggcaacatctgtgagactgtgaccgcgtaaggttcctgcttcacttcgcgtcgcttgcgatttctctctcttcttctactttccagcctctctggcgatgcaccacagaggacacagcacgcatgcgacgagctccaagcagcttgcattatttggagctttgtctgcaagacgggagccttcggctgccttactcctcttcttcgccctgggcccgagctaggccggcgtggctgcaccgctccgtcctcgacaagcccgcgtcaccgagtgcctcgtcggagacagcactggcactgtcctcgtcgccgcccgcacgatcaggaatgttgcttgcggctcgctttgctctcctctctcgtcccggcgtggtcgcacccgcgcagcgcctccaatggcgacgacgacgaagacagcaagtctcagcatggggcgagtctgagtgcataggctacgccctagcaaagtcactgctaaggccgaacattgtacaccatggtggttatctctctccaattccatctactcaagaatgtctcactcatggatgatgcacaccacgtgctcgatgatttggctctataacaatttttggtgctagcctcagattatttctgtttgagagttatgtaaggtgccatcccctctctttggggaggcttctggttaaacttgcttcagtcacgatgttactgtgctggataaagaagatgccaaagctgaactttgaggttgctaaaccatgcacccagaatcggagttttgtagttgaagctccatgtgagttgagatacttgcaactatacacaatagaatgttcttcgaacctcaagctgcagctcttgctccaactattacttgcctactttgtttttcctatcagtaatgcttgctgactcattgaaacaaaccagtctttcctttgtttggttttacattttgagagcttttcttaaaaacaaccggaggctggattggttatgtgcaaaactattatagaggccggaataaaatttctattttctaagaaaatagaaataaaccaaatacgagtccgagtccgactatgtgcaatgtacaagaatatcttaaaataagggagatactatcctacaggtgtttggttttcattttttcatgtttattatctatatgatcatgactcatatggctcaggtcatgttatctattgtagcgtcttcttgtctccctcgacattgcccgtctgcttccttgcgccttgcttgtgctgtgggctcccttgtctcgcctcttttccagccgtggccaattgtgtccattgctgggtttgccaccaccttcccgtgtcaaggcaaacccctccatttcgagcacgttccaaacccaaacttcacattgccttcttttgagagctacgtaaggttccaaatttgaaactgacaggtcctagccgtgctgttctgctggtggatcctgtgactattgaggctgacctgaaagttaaaggccgtactgaatctgaggataaacacttgagctttctagcagtgccattcttggtcatgatcccgctcgagtcatgcctgcgtacaagagatttcaccagcaagcttagcacgctgaggtttgctctcgcaattgttgttctctcagtggaggctacaattagtgtgcgagttcgtggtgggtcatggcctgatggtctccgtgcccagtttgctgcccacacggtgagtataggtcgtgaggaagttgtcttgcttgattctggggacgataaactgcctgtttctgatgatggcactatcaaacttggtcgtcgagttgcatctgttgaagtgagtggggagctgaacgtttctgtcaaggcatggcaaggtggtgaagtctttacgcacagagagaggggtttcaaacctaaagaggcaggttggagttatggcactcttgacgttggcttctgccaaatggatgtatctgtggcctggtcgcttctttcgtcgtacggtgaaaatgaagctttgtaagagtcggtgttagccgtggtcgttgcttcgattctctagcatgtaatgataagttcacattgggatatgcttgctgttttgctgtaatgataagttcacattgggatatgcttgctgttttgctttttatttatttttcttgatcctctagcatgtaatagagtatcctccaagtagagtttttttttccttgatctccctgcataaagcccaagttgctcattgcttatcctaattgttttcttgtttctagtactgcaaggctaaacctggaattatgagtaactactgcacactggttgagcaaaaaaaaaaaaaataccaga

SEQ ID NO: 25898 - DNA, 2928 bp, Zea Mays
tccacctcataccgcctgcccgcctgccgtgttcaaaattcgaacgtcctccgccgccccaacgataccatcttccccagttccccacgccggcacacccaagctcggccactcgtcttgttgcgaccaaacccaaaatccgaacaccctctcgttccccatccccggcgtccggcgctgaccgcgtgatcctcgccccgatggcggccgcctccacacccgcccgttcttccgcgcacctttcgcagccggtgcgcgtcgtgctgcgtgtgcgcccgttcctgtcgtcggaggccgcctcagcgacagcgccttgcgtctccctcctcggctgccaccccggcggtggggtcaccgtccagctcaaggaccagcacacaagtcggagtgaacagtacaaactggatgcgttcttccgtcaagaggacagcgtcagccagatatttgaccaggaggttcgtgcagtgatcccaagcatcttcgaggggatcaacgcgacggtctttgcctatggggcaaccggcagcggcaagacctacacaatgcagggcacagaggattttccagggctaatccccttggcagcttcgaccatcctagcactctgcactggcacatggtgctctgttgagatctcgtactatgaggtgtacatggagcggtgctatgacctgctggagcctaaagcgaaggagatcatggccttggatgacaaagatggtaacatgcagctgaaaggcttaagctgggtccctgtgcgatccatggaggaattccaggagctctattccataggcgtgcagaggagaaaagttgcccacactggactgaacgatgtttctagtcggagccacgctgtgctctcactcagggtcagcagcactgatgtggtgaaagggaagcttaatctcattgatttagctggtagcgaggacaacaaaaggactttgaatgagggcatacgccttcaagaaagctccaagatcaaccagtcattgtttgcgttgtccaatgtcatttcagctctaaataagaatgagcatcggataccatatagacagagtaaactgactcggttacttagagattctctaggaggcggttgccgcactgtgatgatagcttgcctgaatcctgcagaataccaggagtcggccaacacagtaagtctggcggctcgttcatgccatattgagaatttcaccagttcaagcaaacaagaaactcccaaacttaagatcgacatggaagccaaattacgagcatggttggaatcaaaggggaaaacaaagagcatccaaagaatggatggtcttttctccccaattgccagcaagactccattgtctgtgagccatatgaagcaaccaacatcttcaagaattccttgtagagttaaggcaatggatcaggatggtggtaaaatcaagaagatactttttgatccagtagtccatgttcccactgaaaatataccacgagagcacaggcagacagaagtaaatacaccaaagaaagtggtgcttccttcagttactccatgcaatgaaaaacatgaagcttctctcaggaaagctctttctccaatttcttcaaacatggtgcctgtagagcagcaaatacctgataatggcaattgccccgttttattggagccccaaactccaatagaaaaacgtaatatagtcgaggagactcctggtgcaacaccactagagagatttaatgcactagggtctaacctaaaggaagctctagttcagcagtaccttgaccttttaaatgttgcaaacaagtaagtgcgaattctacaaacttttttgttggcaccccagtgttccagatttttattgaacttggctttatttgattgatgcgtaaaatggatgatgctgtacgtattgctgaaaactgactaaaatagcacaagggaagcaaaaatgcagtggatctaaattgtaaaaaagaccccctgatctaaaaaggcatgttcatcactctaacttttaggctaatctttcttctctagcatcttgtatgcttgtggtgtagcttcaaccgtgacaaaaaaacatggacatatcagttatggtttgtgaacatcacaaattaactaaggatcaattgcaaacatgacctgacattttgggaggtgggtgtgggggtgctaatgtagtttcctagtttttagttcaagtaatttgctccctagatgtcagttcgtatgagaggatcacattatgaaacttcatctgtcattcttcattgttatagtctgtaaaactctgactattggcttgtctgttcttaggttgaccttatgtcacaaaaaatatccagttttttccagtctttatttctaatgtttatctccctttacctatgagcagggaagagctacagcagctgaaaggaattggcgcgaggagagcagaatatattctggaattacgggaggactcaccaaaaccattcaaaactcttgaagatttgggaaacatcggcctctcgtcaaagcagatccgagacatccttaagaagacggccactgggatcttcaaatgatgacctcaatggatgatgatgtattggcgctagacattcataggtgtaacagctaaatgactggcttgtgttgctgacggagaagttagttcaatgtttgtgttggtgacttcaggcagtgccctgctgctactttcaactagattcccttgattgtgtgtagaattgcagttgaagtgttgaacaagtaaactatcggagttgtgatgctacttttacgtccaggggagtttttatggaacgagctattcgaacattttatatgatgaagtggagcatcagttttgctcatttgaataatgataacaagcagagtttttatcatttgataatgtcaacatgttccgcaggcagagtttttat

SEQ ID NO: 25899 - DNA, 3382 bp, Zea Mays
cgagcaggtaccaagcaattagcaagagaaacacaaggtcgaggtggtgaggcatggagctcgccttgggggccatggccagcttggcccctaagctaggcgacctgctcatggaggagtatgtcgtgcagaagggcctcaagcccgacatcgagtctctctccagggagcttgtgatgatgaacgccgctctcgtcgacgcgtcccgggttccacctgaccagctcaccgagaagacccttgccacggtcaaggacgtgatgtcgatgaagaagttcaaggatcggcgccagatctccgacaaggtcaaagacatcaagaaactctccaacgagttagctgaacttcgtgccaagtacacggtaaggggtgtgggtgctgatcttgccgcgagcaccggcatcgacccccgtgtcatcaatctgtacaagaaagagacagatctcgttggcatcgaggagtcaagggacaaagtcattaggatgctgtctatggggaccaaagatgatgatgcacatgagtcccatcaggatctaaagatagtgtctatagtcggggttggaggactaggtaagactactctagccaaaacagtgcatgacatgcttaagaagcaattcgactgttcggcttttatttctattggtagaactcctaatctgaataggacattcgagaagatgctattggaactcgatcgtgagcataaacaagttgacatggccagatgggatctagaacaatttaaaaacgaactggatgaattcttgaaggacaagaggtacttgatcgttgttgatgacatatgggatgttgactcatgggaagcgatcagatatgtcttgaaggacaataattgtggaagtagaataatcatgactactcgcaattccggggttgtcactaaagtagaggaggtttatagattaaaacctctttctactgaaaactccgagaaattgttctacaaaagaatagagagtcaggaaggagaaagccttgatggtgaactctctagtaaaatcatacataaatgtggcggcataccattggctatcattgcaatagctagtttgttggttgaaagatcacgtgaggagtggccagaagtgtatgacaagattggtcttgggaatgaagacaatacaacaaagataatgttatacagctactatgatctgcctccttatctcaagccatgtctgctgcaactaagcatatttccagaagattgtttcattgatacaaaagctgtgatatggatgtggataggtgaaggtctagtccatcttgagaaagaggagggtagcctatttgaggttggagaaagatacttcaaggagctggtgaatagaagcatgatccagccgatagaggaaaaatatcattggtttgtagaaaggttctgtattcacgacattatgtttgatctcatctgtaagttgtccaaggatgaagacttcattacccttagcgggcaacattcatctcagtcactgcaatctctgttcaatctgcggtcagactgcaagctacgtcggctggccgtccgaaatcaacgtgtgcagcgcttccctgaagaaaccatggacatgccagaggtgttgagatcacttagcattatagattgtaatattgaggttatggccccaattgatagcttcagggtttgccgtgtgctgcatatagaaaacaactacgtacccatcagcctaaagcatctagggaagctgttgcatctcaagttcctagagatatttgacacgactattgatgagctccctagagaaattgggcatctgaggtctcttcagacactggtattagtcagtactggactagacgagctgccagtggctgtttgctcgcttacacggctcatgtgtctgatagcctatgggttcgaaaggttgccagctgacaggatagggaacctaacgtccctggaggagctacaactacatagggtggttggccggagtgccacccaagacctagtggcagagcttggcaagctgacgaggttgagggtggtcagaatcaccttctcagagcagctagaggagagctcgcaagaagcattagtgcaatctctgtccaatctgcggttactccaggaactagtgcttttttctgaaatgccagagcggggaagcgatatgtggggagactgggagctaccaaggcagctccggcgcctgattattgaaggcatcgtcttctcacgacagcctcgatggatcaaccgctcctgtctgccacgcctctactccttatatctgatggtgcacgctgttgaagcacaggacctagataatctagcgaggttgccagagctccagtacctcatgctatttggtttcagctggcctccaaggtatactgttggcccagacgacttcaggaatctaaggttctgcgaagtgggcacaacgttcgagtttcgtaagggcgccatgccaaggcttgaagtgctgcgatttggagtttgtgtgccgttcgagcagttcccaacgaaggatgtgatcgaagatcttgacttcgacctggataacgtcattttacttcagcaagtcagggtcaaagtcaactgtgcaggtgctactgtcacacaagtggaggaggtggaggccgtggtcatgcgtgccgtggaaaatcatgccaaccgtccaaccataaaaatggatcgagtatatgaacaaaatatcctatccgacgaagagcgggaggctctgctgcggaggtatcgacatcttcagaaagccattattttcatcgactgttcgggtgccagcatgtgtgaggttcagaaagtggaagcagcttatagacatgcagccgaggttcatccgaaccatccaagtatcgaacttatcagaacaaacaccgacggaatggcctcctcctcatctgaccatcccaacacagagcccaggaattgatggctcggtttgtccaatccttccaacccaacagtaggtaaatgtgagttgcttaagtaccaaagagagaggtcctgttcagcaagatgattagaagcattggcatggcttgttaattagattcgcggttcttagtctaaaatcacattgaagagggagacggacccaagtgatgcagttcatgtgttatctgtatcaatccctatttttataagctgtcatatattttctcgaaactatcttctgttgattttgtgtgaagtgtacttttaatggcacgggccacgtatttccttggaaacgaccatgtggagttattttttcccccattttctttcctgagatgggctgtgtatttgcttgaaagataaggatgatattatctttgtatttgaactctagatgcttaaatgaagtgatcatcctggatggagataagt

SEQ ID NO: 25900 - DNA, 2951 bp, Zea Mays
gccgtcgtgtattgcaaaatttcggaggctttgactaaaaaagcttcgttttttcgagcttgctcctgccccgaaataaaattcggggccccaaaaattcgcaattctgggggctggccccccgaattagcgcgcctcccggagatccggcgccggcccaggcagtgaagatttctaatctggatgtacttaactgcaggctaaggcaatgaagatttctaatctggatgcacacttaatcttgtccagttcttgatcttgggctttgctgcttcctctcaagttagtttgttggccaatcgagtccagaggcgcagatgagtgaggagtacaatatggatgtggccctaaaagccaaaaatgttgctgagaccaagttccatgcccgagacatcaggggtgctcggaagtatgcactcaaggcccagaatctctgcccaacacttgaaggcatattgcagatggtctcaacgcttgaagttcatcttgcagctgagtccaagattgatggagagagtgactggtataggatattgtgtctaggtgcctttgcagatgaagaggaggtgaggaagcaatataggaagctagctctgctgctgcacccagacaagaacaagtctgttggtgctgaggaggccttcaaactgatctctgaggcgtggagtgtgttgtcagatactagcaggaaggtagtttatgatgagaagcgaagaaatcattctgttgtcaatgtaaccaatggcatttatacctatgataagaaggcaaacaagagggctcgaaagaatgctgctgctgcagctgctgccgctgctgctgccgctgcagctgaggctactactcgtcctgttgggattgatacattttggacatcttgcaaccgctgccggatgcagtatgagtacttaaggatttatcttaatcataacctgttgtgcccaaattgccataatgcattcttggcagtggagactgggttcccttgcaatggaagcagctcatcattctcatggtcaaccaagcagcagccgcagcagaaccacaattcaaccaagcattcatatggctcaacaagcaggacttctagcatccctggtacagggaatggggggtaccagcaagataatacttatgattcttacaacaatcaaggcttccagtggaatcagtactccaagacaacaactgcagctgttactaatgcttatagtacacaggccttggagaaacagagaaggaagcatgacgagagctacagctacaactattctgaaagcggcaacacatatgttcatgagaaagctgcttcaaggcgcggtcgcttctcaaagcggagaaggcataactatgatgcttataccactgtggattatggtggcgataacaaagaaacagttgctgcaactgcaagcacagaaccaactgctgtttttactgatgtgggacgggtcaatggtacttcagtggaaaggtttaaatctgcagtgagtggaagaagagcaaatattctgggtgagattacccagattgatacacgaaatttacttcttgagaaagccaaggcaactgtctgtgaaaaattgcatgaattaaacatcacaccatcttcacgagctgcagatagaagaggatctgaaggaaagctgtatccttgtgacaacaacataaaggtcaacggtgtcctctctgacaaacctggcaagggagtcaagctatgcaactcaagaagcatggaaatccaagtgcctgctaccgatgacaaaaatccagagcaacgccgtgtgcctgtgtccatcgatgtcccagaccctgacttccatgatttcgataaagaccgaacggagaaggcttttgatactgatcaagtatgggctacctatgactgcgaggacggcatgccccgcctatatgtaatggttcagaaagttctttcaacgaggcccttccggatccgcatgagctttctcaactcgaagtcaaatatcgaactggcgcctataaactgggtcgcctctggtttccaaaagacatgtggtgacttcagggttgggagatatcaggttgccggattcaaagccgtcttccacagacacgtggatcccgaggaggtgaggaggataccaaaggaagagctgttccggttctcgcaccgggttccttctcgtctcctgacgggcgaagagggcagcaatgccccgaaaggctgccatgagctggaccctgctgccactccagtggaccttctcaaggttatcacggagcacaaggaagacgcggtggcgcagagtcctaaataggagtgagcgactccgataacagcgaagataaggtagctggatgtctgagtgaccagatccccacttggttaatgacagcgtgccagcacatgatggtgtctaaagctctactacgccatcttattttcggctgatggcttggacaacacttccagggcaagcagcctgtgtgtgtgtgtgacggacttctgaccttgttaattcttaggcattcctaacatttgattctatcactacacaagccaaccgccacgtagattaaatggccattgggaggaggccggccgcgcacggcaccgagatgagatgaggaggttagtcacggaggtagggagggtgaagatgttacttgtttgtgttgctcactctgtaatgtaggaggcaggctcgagccgagggaaagagctgcttggctttgcttgcccatgtaccccgcatttctgtacctgtttttttacttatgatgatgatgatgtatttccttcttgttttatagtagtaagtaattcacggccagtaattgtagactctggtaaccgtttcggaaaatctagtgctttatctggtggatgattctgtctgaccctgtgctgtttggctgtgcaccgagctacttggatggattggctgattcgaggatgaattctttgt

SEQ ID NO: 25901 - DNA, 2069 bp, Zea Mays
ctagagacttcacgcaggcagtcttcaccgcgcggcggcctcatacccgcaggcagttttcaccgcgcggtggcctcatccccgccggcgagcctccactctcctccgccgtgagaattcgaaaaggaggaagcaatgacggaggtggcgctcctccggggcccgaccaacctcgcttccaccaagcggcagccccgagcgcactgcgggatctgctaggagccggcgactccttgaacagcatgggcaagaggccgtggaggaggaagaggagcggtggtcgttcttggcactgctcttcgagctgttgcagaagtcgctgctcgggtgcaggacggtgggcggcggcggtgaaggcgaacacggcggcggcgggatggagattgggctgcccacggacgtgcaacatgtcgcgcacgtcacgtttgacaggttccatggattcctggggctgcccgttgaattcaagcccgaagtgcccctccgtgctcccagcgtgaggtatgactcttagtgtccatcgtcaatttagattaattttaagttcacgcttccagaaatctgactttatttttgcagaatttacttatgcaataacatgaacttttttagctccaatttgaactttaacttgagggtgtttgcagttttcttcttttaattccaagtatgtctggtgctttggtaattgatatgaacagttgataacaataagtattagattatgttcttttagaaagctgtaaaatctagatgatgtttgcttgacacaggttcgttaatagttcatcactctttagcattttgatggcatgctcgtttccgcaatatagttttgatccttgaaaagtagtcccttttgtttgtgttacagcctccatgctcccttgatctgaaatatcattgaaaaagcaaaattttaagtggaatttgagtttcgtttgaattgtgttatgaagtatgaagttggttttcgtgttggcggccttagcaggatctgaactacggttgatgaaatgggcatgtcttctgatagtggatatgctttggaccgcaactgttcatagaaataatttctgtgttttttcccatgttccatcaaacaattggtcaatcatttcgctgatgcaatcttgtagcatccatgattttactgtacttgcttacctcatctaagaattattccgattgtactaggtacataaagttgattgttacatcatctgtcattagtaagattggaaagttgccagggattccatgatttatgtatggcctattttgtattgattagattattcactatttttctctagacttgcaaattactttggtttttacctttttttctatccttcatctattgttcgtacagtagaccttggcttcaaatacttggtatattattttttgtcccatataacagagctagaaatattgccagcagccgagcacatatgactccatatattgtaggaatatttctttatcagaatatgatccaagaccacctgaaggaacaatttccaattctgaacatgaaagatgagtgtaatgctaatgcatgaatctgaaagtgcaggattttcgaaccagtgcaggatggggcacaggttggctcctgtcaagtgccaataacttccgtactaaattctaaatgctggtgaatagaagttcaccaagaagacaatgaaaaaaaactagaccaacaaggaggaactaggcagcttttatatcaagaaaataggcacccaatttgcctggacaagtacttgaatgtgggtggtataggaacaccacaaagcacaaacaactgagcctgttcagctgccttagccaggaacccactgagagaacaataccaatattgggccaaaaaaatgttgtcaaatcatgtctggcaatttggaagttgcgaagttagttaaaaaaactgtgtgaaagatatgtttatggacatgaatgaactcagttacaagaaaattcatcaataaatttgcaaaattgtaataactgacctaatgatcagctactacttctaaaagtttactactattgtttaccagcaa

SEQ ID NO: 25902 - DNA, 339 bp, Zea Mays
ctgttgcccagaaacgctcggttcgggacggaaactggacagcaggcaggcaggcaggccggccggccggtctgcgatgtgtaccgccgccggtactcggcagacattacgcagcgcgtgcgtgctccggctgcactgcactgcactgcaccccggcccctacgtaccggcgagcagttaatggagaaacatgccgtgtcggccagactgggcaacccgacccaccagcgcggcctggccatgcccatgggcagggacacggacacggttggctttggcttggctgcctgatttccttttttactgtttctgtaacacccactttgtatttgctagaga

SEQ ID NO: 25903 - DNA, 1981 bp, Zea Mays
acgaacccaacccagtcgaaccacctcgccagtgagcgcctccccccgtcctctttccctgctggccagaactccgaatgaaatcgctgctccaccagctttctttaccttcaggaagcgagccggtagcatcaagctagatcgcggagaagctcctcgtttcccccatcggcgctgctctggcggggagaagcgtcctctcacggcggccgggaagaccaatccgcgccgccagtccctgcggcggcttccgtgaggtggtcttggctcctggggcggcgtgttcgtggtggccggcgagatgagcagccacgcggttggaacaagcaacggcggatccggggatgcggccgccgggggcgcggccaggaggaacaccaggatgcccaaatattccaagttcacacagcaggagctgcccgcttgcaagccgattcttactccaaaatgggttgtctctgttttcttaatcgttggggtcatctttgttcctattggtgttgtttcactgctagctgcaagagatgttgttgagattattgatcggtatgatgaggcatgtgtgccagttaacatgactgagaacaagcttgcttacatccagaatgagaccatatccaaagagtgcataaggaatcttacggttacaaaatatatgaagcagcctatttttgtgtattatgaacttgataacttctatcagaaccataggaggtatggtgttttttaagatttgcatgcaatcatttgaatctttaccccttggtacgaattgacagctcttgctttcctgatgttgatgaattatcatttgcaatcgtgatgctattttatttggaaaacatgatacaacaattttactgctaacttggatatcttaccgccaaaggaaaagaagtgaatagtctttcatttgagatttaccatgcacttccctggttcagatatgtaaagagccgaaatgatgcgcaactaagagatgctagtaaagctaaccagacatccgcttgtgaacctgagaagaccacagctaatgggcaaccaattgttccttgcggccttattgcttggagcttgtttaatgatacatataatttcactcgtggtaatgagaacttgacagtggacaagaaagacatctcctggaagagtgatagggagcataaatttggtaaagatgtctatccgagcaacttccagaatggtgcacttaaaggtggagcaacacttaacccaaagatcccgttgagtgagcaagaggacctcattgtttggatgcggaccgcagcacttccgacgttcagaaagttatatggcagactatactttgacctcaaggagaatgacacaataacagtgagattgaataacaactacaatacatatagctttggtggcaagaaaaagctggtcctctccactgcaacctggcttggggggaagaacgattttcttggctttgcataccttatagttggtgggctctgcattttcctggcatttgcattcaccttgctgtacttcgtaaaaccaaggaaactgggagaccacaactacttatcctggaacagacgctaggatgtttcggaacaccaagtgtccgtactactcgaaatgtagcttgtatgaaatgaaatgctctgaaccagaaatgtcgatgggcataagcaagcatggttcaggaaagaacttcatgtatattttttacgaaggggtctaggtggctacgttatttttgtttcttgtgttctttagtgtagcactgaacaggagaataccaattgatctctattagcttgcttcgtggtacaagcactctaaatggttgactgtgtggtgttgacgctttggctgccgaagaataccaattaatgatgttggttgactgtaatatcctcaagtgggaacagtaccaacttctgtataaattgattaccgtgtgatgtttgtttctccactaccattatagtacacgggtgcc

SEQ ID NO: 25904 - DNA, 2451 bp, Zea Mays
cctcagcttctcacccaccccggcccggcagccaatctgtcatccatcacgtcgcgtgccgtgcgtcaccccctcccttcgcctcgcttcaaaaatccctccgttggcgcccaagtaccaaaccctagcctcgtccgggcccgccccctctggccggccgggcggaacatgcgaatgcggccatggcgaccggggccgatctgacctccccaaccggcgccgctgcggcagcggccgccgccaggaaggaccgccacatcgtcagttggagctccgaggaggatggcgtgcttcgtgctcaaatcgctcttcatggcactgataactggacaattatagcggcacaattcaaggacaagacggccagacagtgcaggagaagatggtacaattatttgaactcagagtgcaagaaaggtgggtggtccagggaagaggatatgcttttgtgtgaggctcaaaaagttcttggaaacaagtggactgaaattgcaaaagttgtttcaggaagaacagacaatgcagtgaagaaccggttttctactctatgcaaaaggagggctaaggatgacgagctataccaagaaaatggtgtgccatgttccaacacaaatgcaaagaaggttctcactgaaacaggacgcctcacaccaggcggagctggctctttggtacatattaagcagacgaggtgtgaagcgggagggtaattttctgaagaaggatgacccaaaagttgctactttattacagcaatctgactttctttgctcccttgcaacaaaaatcaaaagtgacaatacaagtaaaagcatggatgaagcatggcagcaactgcaagatcatttagtgaaaaaagagcacaacaaagtgccagaaaacagtgggtctgaaatagcttcacttttagaggagcttgatgatttaattgtagacccctatgagaggaaagatgaagatgaacagaagctaagcgagcacaatggacggaccgatgtggacaatgatcactgtaacggttcttcacaaactagcatagtagtaacgacaaatatggtcccagaggaaatgatgggagattgtccagtcgataactgcaatgaggatagtagtctttgtagaaaagtgctttctggaagtacagaaccttgcccaggtgcaaaaatgacaggatgtgggaatttgagcgaagaccaggttgctgaaggtagtgtgcttcaacgtgtagaatctatatctcctgttataacagatattgatgatttactcgtagacccgtatgagagtgaagcggaagatgaagaaaagtcaggggagcagaatggacagattgatgtgcatgctgagcagtgttttggttcttctcaaactatcatagaagtgatatcagacatggcccctgatgaagtcatggaaacttgttcagcagataaccgcgaagaacatagtagcatttgccgaaatgtgctttctggaagtatggcaccttgcccaggtgcagaaataccaacatctgaaaaaatgagtgaacttgctgaagatagcagacttcaatgtatggagtttgcatctcccgttctggcaaattttgcgagcaaggaatgtggagaaacaccagaaccacaagttcttaatgagattgttgaagatagcaggcttcaatgtattgaattcaactccccggctcacacaattctcccagataaaacaggcgccgaaaactttgcatccccaagttttgatgtggttgcaaaagatagtaagcctccgtctttggaattcacatcccctgctcatacagttgcaacattccaaccgtatgcagacggcatccctaccccaaaattcactgctagtgagaggagttttctgctgtcagttttagagctgacctcaccagggtcaaggcctgaaacttctcagcagccatcttgcaaaagggctcttcttaatagcctttgaaatgggtttgcataaaatcccaacaccaagcctgctatgcccctcagcataatttggctactcctatatgcatgaagtgtgcctaccctcaaagggtttcatagtatgttttgtttgttgtatagaatgatgcattggtgtagttgtattagcatacaggaacgaaagggtgatggtgtaagtgtttacagcttgtgttcaaaatatagaaaaagtaatattctttgtgtaattaactcttgtaattcttcccatgggtgcgagttattagattgttgcgtagtgtgatgtaatggctttcctttgttgagcttttggtatggaagaaccgactgcaggctatggctgtatgctttattgatttgtatggttggaacttggaaacatgatattcggttgatagactgcgttctctgcagctgatccggcactaagtttggtgtccattttcagaataaaattcatgtatttcccaggcctccagaatcc

SEQ ID NO: 25905 - DNA, 1434 bp, Zea Mays
aaagttaataaccgggccggatgggccggcccaccgtcgctgctagctcattcatttcttctttccctgccgggccccggcggcctctcctctcctcgcttgtccccaccaggcgccatggacgctggcgacgacgaaccccccgttctcctcgaccgcgccgcccgcgcctcccgaggataaccaagctgctcgaggacgaggtcgagcaggacgaggctttctggaaccaagaagccctcaaggatgaggagaacgatgacaactacgtggaagagccggatgctggtgacgaattcgacagtgattttggtgaagatgaatctgaaactgatgatgagccggagaaggaagtacgcgagagattacctatcaagaaacggctaatgtttcctggcaagacgctgaggaagaccaacgtcaagaagaagaaggcgaccccaaaaccagaagatggcacaaaagccgacaagtctgctgataagccgagttcatccacacaagcagatcttcctgatgaactggaggctgagaaggccatccggaaatcaaccagaacgtcggtcatcgtgaggcaagctgaaagagaagcgatacgtgctgaaaaagaagcaacggccaagccgattaagagaaaaaaggagggagaagaaaagcggatgacacaagaggagatgcttttggaagcagctgaaacagagatcatgaacatgagaaatctagaacgtgtcctggcaagagaggaggaagtgaagaaaaaagctgttgttcataaggacacttatgagggtcctacaattcgttttttctcaagagatggggaatcacgtctggaattcataaatggagcatcatttgggtctgaactttgtacaacatcatctccttatccggagaaacctgtttgtgtggtgacaggacttccagccaaataccgtgatccgaagacagggctgccttatgcaactatggaagcatttaaaataatccgggagagtttcctgaaagaggaggctgatagaaagcgtccgaacatgtcgaatatgggagagcttttcgaatcaataactggtggacacttgatgcctaagaagagaagggttgagataaggtctccgaacatgttaggaggctctaggcatggcgggcgtacctggcgaatacctgcttttgatatggtggacgaggactaacgagacagatcccgtggctcccaatatgtcgaatatgagagatctttctaaatcaatagccggtgaagaggaagatggataggatgttgtatttagtgttagatcttgtgcttgtagttatcttaatgtatttttgtcagttgataaattcatggttattaaagtggtaaaacgttaaaatgttatgaaacaactttttaatattttaacgtttaaacgaacgttgaaacgtcttttcaga

SEQ ID NO: 25906 - DNA, 2578 bp, Zea Mays
caggccccagccaagcgcgtgcgctgccgttgccgtcgcgcgccccacctcccgtcccctccgcagcgctccgcttcttggagacccatccagcatctaccatcactggcccgtccgtaacggcgacacctcctcgtcctcggctcctgcttctacggcggtaggtaggtgccgcgtcggcgcgtcgccttccttcaactgcgcctgcccgcaccgcatctcttctccttgctccatctccctactgctccagctcctatcctcttggctccgcccgtccgcggtccgcgtgtgtgcgctccatccttctccaccacctgtcgccgggccaaccgcaccgccctctgatgactgggccgggcgaggagctggccgagctgctgtgggaccgtggcccggcgctgcggagggcgccgccgccgttccagcccttcacctgcagcgccgccggcagcagcaggtcgcaggagctgaagcggcatgcctcggacaccaccaaggcgtcagcgttcgtgaccgccgtctccgtcccgctgggcacgcacgacgccggctccgggctcgggctcgccggcctccccgtccacgacgacgacgacgccgtgccgtggttgcattgccccgtcgccgacgacggcgacggcgacacggcgccgctgccgccggagttctgcgccggcctcctgtccgagtactcggaggtggccgcgccggcgccggccttccacgccgcggccacgccgccggccgaggccgcggccaacaagctggccccgccgagcgccgccggcggaggggagggcgtcttgaacttcaccttcttctcgcggcccctccagcgaccgcaggcggcggcggcgcccgccgccgcggccgcgagcaaccccgtcgagtccacggtcgtccaggcggcagcgaaccggctgcggagcacgccgctgttctccgagcagaggatggcgtggctgcagccacccaaggcgccgcgcaccacagcggcagcggcggcgccacctcctcctccgctggcgcctctgctcccagatagccgccatggggagacggtcggcacggtagctcaacctcagccccggtcgcaaccagaagcaagacctccggatgcggcggcggtgacgacctcttcggtctgctccggcaacggtggtcggagccagctcaagaggagccgccacctggccgcggactgctcggtcagtccggacgaggacctggacgacgagcccggcgcgacgaggaggtcggcggcgcggagcgccaagcgctgccgcaccgccgaggtgcacaacctgtcggagaggaggagacgggaccggatcaacgagaagatgcgcgccctgcaggagctcattcccaactgcaacaaggtcgacaagtcgtcgatgctggaggaggcgatcgagtacctgaagacgctgcagctgcaagtgcagatgatgtcgatggggaccgggctgtgcatgccaccggcggcgatgctgctgccagcgatgcagcagcagctcctgcaccaccaccccatggcgcacttcccccatctcggcatgggcctgggcttcggcatgggcgcggcggcggggttcgacatgctcccgttcccgtgcgtcgcggccggcgcccacttcccgtgcccgccgggggccatgttcggcgtgccggggcaggcgatgccctcgctgccggcggcgttcgctcacatgtacggcgctggcagtggcgccgggccggctgggcagacggaagctgctgatgcggctgctcctgcacggccaggagaggcagagcagggtgatcagcaggtgcagcacgcgaagcagacgtgatggcgaaggcgacgaggcggctgccccccgaacattcccgtttggttttatggtgattatgagaatctacccatcaaaatctgctaagagagagccaaacaaacaggatattacaccttggattctgtgcattatctcacaatcaaggttcaagttgattttcttggttaatgtgtagaatccaaaaatcggaaccaaacggcacagagtcctttcttttggttgctctggtgttaggtgagatgataagagatgcgcgcgcatgcatgaagtgttttttacccagctagccggctagcctgctataccttgcctcgtaaactgtaggagaatgtagaggaacgcttgttttcacccatgagactggtctttgatgtttcatgagcagaaaacgccgtcccctgcacggaagctggccatcaagattcaagaattgacatggtggtgtttggttaagtatttataatttgataggtaactgataacactaaactatgtttgtataagtccaatcgtaatgaaatattccctccgtttcgttttagttgtcgctgaatagtgcaaaattgaactatccagcgacaactaaaaagaaacgggggagtatcacgctaagaactagtatctgacattggtctactcaaacttgttgccgctggtacttagtgtaaattattattgttgccatttatattagggaaatttggatccataccattaaaagatcaccactttgg

SEQ ID NO: 25907 - DNA, 3555 bp, Zea Mays
gtgaaactacatttcatattttacctccttgatgttgcatatgttgctaccgttatgtatagacttggtcaaactttggattgtttcacttaggacaaacttagatctgcacactcctcaaagacttaaggcaagtttggcaagccaaaaaacagtgtgcctattgtcatgactaaggggatcttgatagattttttggatctccccaagaaccctaaccactagatcaataccaaaaacagatcataccttcaatccgattgctatcacgttcgtcggtgaaggtctgcactagggcagcgacggccgaggaaacgtagacggaagtgaaccttgtactgagccgtcaacccccacccctctatttatagactgcgcaacaggggcccaccaacctcgtcttgggctggacaccccccgatcaaggtgcgaggtcaagggcccagttagccgttgggccaactgatggagatcaattctaacagatcttgtcactctttcttactctgtgacacatagatcctaatataaagttgcctaggcttaattgccaaccaaacacttgccaacttaatcaaacttgcctaaggtgaaatgtggctagcaaccaaacaccctctttgatccattgtcatttctttttcttttctttttttgttctagccccatagctgctatgattgcttcatgtaatgcactgctatctgtatcagaaggatacagatgcgtttttttagaaaacatgataaacagatacactttattattctaaataaataaaagacatccagtgttagaggctcccacattagtggggtctggggaagggataaactgaggcaattcttctcgcaaatatggagaggctacttcgaacccgggcaagccttccccacaaatacagcgaagctgctatgaacccgcaacctggtgactaagtgagacaactttcaccattcaccaggcctgtccttatttaaaaaaatagtactgcaaatttaaattatgaaagtcaaatttggagaggccatctattcgatgcacttgtgccagcgctactcatatttggagaggccatctactcgatgcaagcaatcaagcatggaaaacactaatcatgaaggttgaaggagatgtgggggatacacaaaatcaagcaacgagaactgcagaagtagatggatcatccatggcgaactggtgggtgctccccagcgcggtgctcccggcacaatggtctggaggaggaggagaagtcgattgatggcacggaggggaagggggctcgtctatggaggccagtgagaggtggcacacctcttgtgcggtgtgcgtgtgcgcggcaggcggcacgaaggggtgggggctcgtcgctggcaggcggtgggcggcgagtggtgacacatctctagagcgggaggcagctcatgtgtgcacaggaggcaggcaccgtgcaaccatgcgaggtgttgggagataagggagcacttgttgggctgggtcatatttcagaggctgataggtaaaagtgcagacctggatcaacaaaaaagataaagatgagtttgttggtgttggtgctcgatttggccccaagatagagtcaaaggaaaagcatgccaactggacaaacttgctgttagcagacccttctgattgctgcacccctccaagagagaaggttgctggagatattttgttagtggagaggggaaactgtaagttcactacaaaagctaaggtggctgaatctgctggtgcttctgcgattataattatcaatgataagcacgagttatacaagatggtatgtgagaccaatgaaacaaatttagatattggcatacatgctgttcttctgccaaaagatgcaggctcttctttacaaaggtctctctctagtggtgaagtcttagtggagctgtactctccagatcgtcctctggttgatactgcagaggtgtttctgtggcttatggcagttggtaccattctttgtgcatcatactggtcagcatggagtgcccgagaagcagatattgaacaagagaagcttctgaaggatggtcgtgaagtagcaccaaactttgagcctggaggttctagtggtatggtagatatcaacatggtatccgcaatactgtttgtggtgattgcatcatgcttcttgataacactctacaagctgatgtcccattggtttgtggagcttctggtggttatcttttgcataggtggtgtggagggtctgcaaacatgcttggtggccttactgtcaatgtcaaggcggtttaaacctgctgcagaatcgtatgtgaaagtgccattttttggagctgtttcataccttacattggcagtttgtccgttttgcattctgtttgctgttctgtggggtgtttatcgtcggttgccttatgcttggattgggcaagatattcttggtattaccttgatcgttacagtcatccaaattgttagaatacctaaccttaaggtgggttcagccctcctgggttgtgccttcttatatgacatcttctgggtttttatctccaagatgttgttccatgaaagtgtgatgattgtggttgcacgtggtgacaagactgatgaggatggtgtacccatgctgttaaagattcctcggatgtttgatccatggggtggatacagcatcataggctttggtgatatccttcttcctgggctgttggttgcttttgcattaaggtatgattgggctgccaagaagaccttgcaatctggctactttttgtggtcaatggtggcatatggttccggtctcctaattacatacgttgccttgaaccttatggatggccatggccagccggctctcctttacatcgtgcctttcacaatcggcaccttcttagcactgggcatgaagagaggcgagctcagaaacctgtggacaaaaggacagcccgagagagtgtgcacgcacatgcacccatcccccaaggattcgcctgttgcggtcagctcgctgtcgtagacaaggctaacgaccttacctgatgttgcctggccccggagaatgttgctgatgaccaaaaaaagtttccagggttaatgaaggagtctactgatttgtaatgaaccttacatagggataagccaagatcccctgatcgtgatcctcgttgtacagtaggtggtgtatttgtatagtgagtgatgactattgagatgtgcggctgacactggataaaaaaggcgcaggagcttgatgtgggagcagcactgcatctgcatcatgtggctggtgtatggttttgaatgatctctgccgcctcattcttgttcttgacatggacctgttcctggtcttatgaggcgcacacgtggcaagacgctgctggttttgtcggtgaagcgatgtgacgcagtgtatatgtgtgtgtattatcggccatccgtgaccagttagttccttaatattgtaatactagtcgaatgcccgtgcgttgcaatgagaatatataatatcagtataatacgataacttatatacaaaatgtgtgttat

SEQ ID NO: 25908 - DNA, 3218 bp, Zea Mays
gcctccgctctcgcctagtagtccaccacgcggccacttgcaccgccgtgaatcgtgatcgtgctcttctcgcccgcccggtcttgtctctcctctccagaaccttccaacggcagagtgctcgccgcgtggtctagaaccttccacaagcctcgcgacgtgtctcgacgcgccggtacggcggtgggggtatttaggggtccggccaccggccaccgcccgcccttctcccgatttcaccgaccatttttccccatttcacagcgggcgaatatctctcatctcccccatcctctttcctgcaacaactcctacccacccgacagaaatatcctaagcgctgacccgaatacccgattcgctcctcgtccggtcgattcctgctcctaatcgctcgaatcgagtccttgccccgtgttccgtgccacaatctgggcgcttggctcccgcgagccggggttcttgggcctgggcggaggccatggacaagccggtggcgccgggcattatcaaggaggagctcctggagcagcagccgccgacgcaggacggtgtgggtggcggcggggatgcgccgcgcccgatggaggggctgcacgaggtgggtcccccgcctttcctcaccaagacgttcgaccttgtggaggacccggccaccgacgccgtcctctcctggagccgcgccggcaacagcttcatcgtctgggacccgcacgtcttcgccgacgggctgctcccgcgcctcttcaagcacagtaacttctccagcttcgtgcgccagctcaacacctatgtgagtcggcaaaacccaaaccccccttcttcctttcctttgaaataatccttctcttggtcagggcttgctaatggtaatttgcgtttggttgcaattgcaagctgctttattcggcggagagcatccgaatcctctgcaatattacttgtatattaaactagtttgcaatgttaggacaggaaaatctgttgtgcacttgttcttcactaaagttttaggtgatgtaacactgttgtgaggcattgttgtgatttggtgcattttttattgttgattttaggcagctggttccccaatgagatcgaggatgcctggctaagatatgaagagacatagggctggtttggtgacaaaggaattgaaggggatctataggaagaaaatcccttgctttactttgtcaccaaatcagccctttgccttgtttggatactctagtattccccctaattcacatgtgttgagatatattggggtgtaaattagtttaatttatactctaataaacctcaacacacgtggattgcggtgaatactagagtatccaaataaggcctaaggggtattaaccccctcccccccaaaaaaaagtcctgggaatctatttactgatttcacttatataggtgtagtgttaggaaacattttagcgtcggaaaacaagattttgaagcaattaagtgattttgtattttgtgctctttgaggttgtggaaaacaagactcgaagtggttgaagtgattctgaccagacctactgcattatgttttgagcatatctggtcgtgtagtgggtttatggcagtagggattcagtgctatcgttttcactcattagcgcatttgattgtaaacaaatacatccttgaaagtgtttatgatacattctccggtgaacctcatcttcaggtgaggcaaagagaggggagattaactctcccagcaaatttataatcctgacatggtttcttgaacttttttattgtagctagatggaacaagatactggatgaagtaccaagaatcagattgttttgttctagaagactctactgaccaccttcacatgctataggcttcagaaaggttgatcctgacaggtgggagtttgcaaatgaaggtttcctcagaggtcaaaggcacctgctgaagatgataaagagaaggaagccaccatcagctgtggcaccattgcgacagcaacgtgcccctgcttcttgcctggaggttggtgagtttggatttgaggaggagattgataggctgaagcgtgacaagaacattttaatcacagaagtagtaaaactaaggcaggagcagcaaagtactaaagatcatgtgagagccatggaggaaaggctacgagtggctgaacagaagcaggtacagatgatggggttcttggcaagagcaatgcggaacccagagttcttccagcagttggcccagcagcaagacaagaggaaggagctcgaggataccatctcaaagaaaagaaggcggcccattgacaacacaccattctacagtgatggggaaagcgaacagcttgattcacagttgaaaatgttcgagtcaggtgttctcaatgggctcaatgaacctgagctggagaatttagcagtgaacattcaggagcttgggaagggaagcatagatgatgggaacttgactcaagttagtgaccagtcagagctgaacgacgacttctgggcagagcttttggtcgaagattttggagacaaggcaggacagccagagttggagggaagaactgaagacgtgaatgaccttgctcaacaactggggaatgatgatggatctggcagacaagttgactggtggtggagaggtgttcatactgaaggcgtgctgtggagaggtcactgccttgacgttgaaggcttagcgctgtactctgctgtgggagttacgtgtggggtgttggctaaatgtctcttccggcgtcttctggcaaaatgatctcgtggacggtgactggcaaagatgcctaggggccaacgtatacgtacacagctgttatcagatcttgttcaaagtcattgcgcggttttgacggtgctatgtatcgatcagggttctggccttctggggttgggttgtagaattgactggctgatctagtgttctccatgtatgactggtgtaaccttaaaacaccctcagcttgttgttgaactgtgacaagcatctcgtttttttgttgtactccattttcatcatcattgtacatcaaattgctgaattatgaacagatccctaataatttggtggactgcgtcttggcatttggctacggcccagcttgcagtgtagttgatacatgcttttgttgaagctcttgccataggttgggcgcccacagtacgccttctgcatgtgcactgtcacagttggctag

SEQ ID NO: 25909 - DNA, 2055 bp, Zea Mays
gcagcgtgatccgctggcgctcgcggtgaggcgtcgaaggtcaacccctatcttccacctcggggggactgcctacccggtggatcgacgcagcagctttattggttccccggagacctgcaagttgcaagacgagctagacctagcaaccgctccctgccgaccttcggcgtcttggagtaaacatttcggcgtccaggcaataccgaagatctcccatccgctctgtcgatttgcaatggagcccggcagcccagccccgaagaaatcacggctggtgcactcagcggactgcgaaatggaggaggcgcaggcgccttccagttccaatgcagcggggggcgtgaaccagagcttgcactggacccagtggcagatcctggactccatcctcccgaccggcggcttcgcgcactcgtacggcctcgaggccgccatgcagtcccgcgtggtgaacgaccaggaggacctgaggtcgttcgtcgtccaggtcctcgacagcgccggcagcctgctgctgccgttcgtgcactgcgcatgcgcaggcaagtcccccggcgacgcagcggcgtgggccaagctggaccggttgctggacgccacgttgacgaacgaggtcgccaggaaggcgtccgcggctcagggctcggctctgctgcgggtggccgcgtccgtcttcgccgaggttccggcgctgcaggagctccggcggacgttgctgggctccaagagcgtgtcgttccaccacgcgcctgtgtttgggctggtgtgcggcttggttggattcgacggcgagacggcgcagcgggcgtacatgttcgtgacgatgagggacgtgctctctgccgcgacgaggctcaatctgatcggcccgctggctgcttcggtgctgcagcaccagcttgcgccggatgccgagaggatggtgcggaaatggagggaccgtgatgtctctgaggcgtcacagactgccccgctgctcgatgccgtgcagggctgccacgcttacatgttctccaggctgttttgttcgtgacaacaaggatcacatcgacaggagccaacgacagctgtcttctcataaaaaaaaagcaccaggtgagtacaagaatcccaggaacagattcattatgcctcatactgaccctcgtcgttattttcatgcaaacttgtacaacagagatgcaatagtgcatcattagtatcagggttgtaccctctctaccatctattacaccatcatagcatcgtcccatatattcaacggttacagaacacaaacatttgcatgtcaagtgtcacaaagaacacgcttcattatttctgttccatgatacaaagtgccacagcagttgctcgtctccaagcactgtcctaggatccctgagctgcagctgctgcagcagcttgcttggcttcaagggacttctcataatcctcgatggacttgaacagctgcgagaagtttcccttgccgaacccgccgcagccacccttttggtattcttgccccttctcatccttctccatgcacccgatcctttggatgatttccaagaacagcgttggcctgaatgacgcagctggtccagttagattttggattgcataggggtcaaggaaaccatggcattgacactagaatgctgagctatgatcttcagaattaaagtgcaggggattaatgatgagaatggaatgttgaccatcatgtaatcagctgggacatgggagctcgaattatgattcacagcatgcaaaaaggatcctcttttttgctgtcacggtcttcataaagatgcatcatgcatggaggcacaaaaagagggtttgataccttcgtactgtatatatattctatatatgcctgcaatcctgaactagctgaataccttatcctggaattgttcctttgcaattctagatgcatcatgcacacttgtaaaacaaaaaaggtgaaaaagataacgattttacctgtcccccactggcttggtgaagatttggagcagcacgccctggtcatccctgtccaccagcacccctagctcctgg

SEQ ID NO: 25910 - DNA, 2020 bp, Zea Mays
taaaagcgtgcgtacaacgcatacccgtctccaattctcacgcccatcacaagtgaaggaaggctactggtgctggtgccggcactggcagccggtgcctaaccatatctacctcatataactttccactggccgtagtcggcttcttctctgaactgaagcaggggggagacaagcgccatggctgaggatgccagaggagagaagaaggatgcctacgcggcggcgccggcgtccaagttgccggcgaagcaacggggagggttcaggagcatgcccttcatcctagcgaatgacttctgcgaccggcttgcttcggtggggttcacgacgaacctgatctcgtacctcaccctgcagctgcacctgccgctcgtggaggcctccaacatcatcaccaactacaatggcactgctaacctcactccgctcatcggcggtctcatcgccgactcctttgccggccgcttctggaccatcacattcggctccatcatctaccagctcggcatggtctgccttaccctctccgccgcgctcccctcgctgcacccgccatcctgcgccaagcacgctgcagactgccagcgcgcgtcctcctaccagatttccgtgctgtacctgtctctgctctgcacgtcgatcggcaccgggggcacgcgcccctgcaccatggcgtttggcgccgaccagcttgagctgaacgcgcacaggcaccggggcgccaagcccaagtggagtttctttaacctctacttcttcgccgtcgagctcgcgaagctcgcggccgtcaccgccgtggtgtacatccaggacaacgtcgggtggagttggggaataggcgtgcctaccgtcgccatggtcgccgcggtgatcgccttcgtgtccgggtactcgctctacatcaggatgccacccgggggcagccccctggtccggttggcgcaggtcgctaccgcagcatacaagaagcggaaagccgtcgtgccggacccgagcctcctgtacgaggacaaggagctcgacgctggcatctccaccaccggacgccttcttcacaccgaccagctaaagtgcttagacaaggcggctattgtgacggacggcgacgtgctgccgtcgggtcagccgaagctatggcggctgtcgacggtgcaccgcatcgaggagctcaagtcgatcatacgtatgctgccgatctgtgctgccggcatcatcctggtgacatcggcgtcgcacaatcacagcttcgccatccagcaggctcgtaccatggaccgtgacatcacgccacacttcaagatcccgccggcctccatgctcatcttcaccaacttcgcgcacgggcgtgggactgacgatcgccatgctgtccaacgtggtggccgcggtcgtcgagcggagacgcaagtccgttgccgctgcgagtgggctgctcgacgctcccaaggccaccctgccgatgagcgtcttctggctggtgccgcagtacgccatccatggcatcgccaacgccttcatggacgtcggccgcatggagttcctgtacgaccaggcacccgagagcatgcggagctcagcgacggcgctctactggctgaccttctcgatcgggagctacctcggcacgctgctggtgaccatcgtgcacgacaagacgaagcgaaccgggcaatggctcccggacaaccttaaccgagggaagctagacaactactactggctagtcgtggctctggaggtggtcaacctcgtctacttcttcatctgcgttaagtactacacctttaagccattggagatggtgagcggtgaggaggttgagctctaccaccatggcaatggcaccgacgacgccaagaagcaaggtgtggaagcttagagtgagcaaatccggatcccaacaagaaggcttgggtccggatgaaataattgtacttcgacatctctttaaaaaatagcacctatcttaaagcataagagaaaaaaaaatgtttcccaccactctcaacttgctctt

SEQ ID NO: 25911 - DNA, 1513 bp, Zea Mays
caacaacacatgtataaggacaaatttaatggacagctagatccaaaagactatgcggatttgctatgttgttgtggagtcatatggcatgtttttggtgtctcgattgggaactggatgtaggcagtgagttgacgttagcttaatatggaggacaggaagttttataagatacgagacatttttggtatcataaaagggcaagaggaacctgaccgatatgtgatactcggtaaccacagagatgcatggacctatggagcagttgatcctaacagcgggacagctgcacttctagacattgctcggcgtcttggaataatgctgcaatcaggatggaaaccacggaggtccatcattctttgtagttgggacggtgaagaatttgggatgattggatcaactgaatgggttgaagacaaccttgaagatctgcattccaaagctgtagcttacttgaatgttgattgtgctgtgcaaggtgtgggattttttgctggttctactccccagttggacaaactcttggttgatattacaagacaggtaagggatcctgatgtcacgggaaagatggttcatgatacatggaatgaaatgagtggcggcatcaaaatagaaaggcttgccagaactgattccgattttgctccatttctacatcatgctggaattccatctgtagacttgtactacggagaagaatttcctggttaccatactgctcttgacacttataattggatggaaaagcatggcgatccattctttcttcgtcatttggctatcacagaaatttggggactattagctcttcgattggccaatgatcctgtgttaccttttgattatcaagcttacacttcgcagttacaggagcatataaaaacattgtctgccctgacgagcaatggccatgcagtaaatttgatgaatgggtgcgtcaatgatctttctggtgcagctatggaagttctgaaggagatgaagaaactacagcagatggatttatatgatgaacacgccaggatgagaaggcgattgttgaacgatcgcctcctacttgctgaaagaagcttcctgcaacctgaagggctccaaggaagaggatggtttaagcatctgttgtactcgcctccggaggactacgaaagcaagctgtcgttcttccctgggatcgctgacgccatctcacggtccgccaatctgagtgacaaggaacaggaggtggcaatgcagcatgaagtgtggaaagtctgccgtgcgattcaaagggctgcgagtgttcttagaggtgaattcagtgagcaaaaaccgacgaattttagttctttggtgaccccatgagatgtgtttgtgcaaacaaataacaaacaatggttatttagtatctgcgcgaaatggaagtgtgatgaagaatgtgatgcttttgggcgtacactttacagcgcagcgttggggcagcagcgagtagagggccgtttacgcatgtcaaaatggaattgtgatgaag

SEQ ID NO: 25912 - DNA, 2303 bp, Zea Mays
ccggcactggctccttccttccctttccctgatccctcgtccagtcgtcctcctctgcccggtacagctgcgaagccggcactggctctgctctgctcgccagcagcaccgacctccactctacgtctccaccagaccaccagcaaggcgagctcctttttcactcccccaaatctctgaataaaaaatcgcgcaagcaacctcgctccaccggcctccgcaagttcgttcagtcaggtcaggtcccagcccacgcagcatttgacagcgcgaggcggttgcccagtcagctggggtggacggctttgatttgcttcgaagggagtgagattggttgaagccttcgaccaaggttgtcgatggattctgggatttgggcatctgtttggagcttcatcaagttcctgcctttcttctttgcgcttctcctcctgggcatcatcaaaggtgctttgtttggcccatgggcatggcttgtcatgacaattggaatttctgcacttattctaggcttatggcctatgcatgtgatttggacatattactgcatcatcagaaccaagatggtaggaccggtcgtaaagttgctgcttcttattgttgcaactgcggttttggttatatggctaataattggcgtcgtgggaagcatccttgctggtttggcctatggctttctcgcaccagtaatggctacatttgatgcgattggggaaggaaaagaaaatccacttgttcactgttttttggatggaacatggagcactatcacaggaagctgtacagttgtcagggacatgaaagacatgttggtacactcatatttttcaatcatggatgaagttcgtcttcatgcaccacccgacggcaagccatatgagataagattgctacaaattcctggtgcaatatttgctgctgcttgtgggcttgtagtggatgcaataatgttcacactgattgccttgtacaagttccccgttatgctattcaaaggatggaagcggttgattgaagatcttattggcagagaaggaccttttcttgagacagcttgcatgccatttgctggtcttgcaattcttctctggccatttgcagttataggagcttttatagcctctgttatttgcagtgttccttttggtgtatatgctgctgtggtggtttatcaggaatcctcacttttcttgggactgtcttatgcaatatcatcagtatccatctttgatgaatatacaaatgacgtacttgacatggcaccaggatcttgctttcctaggtttaaatataggacaaatgaagcttcctcacatggtggctctctctcgagacccgcttcattcaaggacaagcatgatggaaagaaagcccctcagcgtgtaacatcatttaaaagtagctttgatgagttcaatccattcaagttgctagatcaccttttcatagagtgtaagcaccatggcaaggatctggtcgctgaaggagtgataaccccaaaagatatagaaggaacaaaggcaggcaaagccagcactggggtacttaatgttgggttaccagcatatgttatccttaaggcactcctccgatctgctaaagccaattctgatggtctcgttctaagtaatggatctgagataacatccgacaataggcctacgagtaaaatctttgagtggttttttgaccctctgatggtaatcaaagatcaaatcaaagctgaaaacttcacagaagaagaggaagcataccttgagaagcaagtgctcttgattagtgatccaaagcgcatcaaggagaatctcattcggcttccaccattgagtgagagaaaacaagcagaaatagaagcatttgctcgaaggttgcaagggatcacaaagtcgatatcaaggtaccccacatccaagcgtcgcttcgacgcccttgtgaaggctctttcagaagagcttgcaaggacaatgggtggtaatcaatctgccaatgggtctcaggtccggaagataagaagtggtatcgtccgaatgcttagtcagagatcactagggaaaacaacaggcatcccgggcgatgatcatgaggctcagctaacaagcgatggtttcacttcatgatgttctggaggtgttcaactgtaacctcagtttgaaaaggagatactacttttctgtgttattttgctaactggatacaaagaactgacacttctgtatgaagagtttaacctcaaccatctcgaggatgagttgtttgttttcaggactgtatctggacaacactgtagtaatacttcgtaacag

SEQ ID NO: 25913 - DNA, 3627 bp, Zea Mays
ctgcatattactgccatttaagtgaattgctagttggttctgcccgcgtgctgttcatggatgagatatcgacaggccttgacagtgcaactacatatcagattatcaaatacctaaggaattcaacacatgctcttgacggaactacaatcatatccttgcttcagccagctccggaaacatatgagctatttgatgatgtcattcttatagccgaaggtcaaatcgtataccaaggtccacgtgaatatgcagttgacttttttggtgctatgggattcaggtgtccagaaagaaaaaacgtggctgattttttgcaagaagttttgtccaagaaagatcaacagcagtattggtgccactatgattatccataccaatttgtttctgtatcaaaatttgctgaagccttcaaaacatttattattgctctttgtacatcaagttacggtgtcaagaggcttgagcttctcaagtccaactaccagtggcagcgtctgctcatgaaaaggaactcattcatatatgtcttcaaattcattcagcttctacttgttgcccttatcacaatgacagtgtttttcagatcaacaatgcaccatgactcagttgatgatggaatcatttatctcggtgccctttactttgcaatagttatgattctgttcaatggcttcactgaagtctcaatgctggttacaaagcttcctgttctttacaagcacagggacctgcacttctacccaccttgggcgtacacacttccttcttggctcttgagcatccccacctcactttacgaatccggaatgtgggtgcttgtaacatattatgtggttggttatgatccccaatttacaagatttttgggacaatttttgttgcttttctttctgcaccaaacatctttggctcttttccgagtcatggcctctttgggccgcaatatgatagtcgctaacacctttggatcattcgctttgttggttgttatgatccttggaggattcatcataaccaaagaaagcataccagtatggtggatatggggttattgggtatctcctatgatgtatgcacaaaatgctatttctgtcaacgaattccatggtcattcttggaacaagcaatttgcaaaccagaacatcacaatgggtgaagcgatactcactggatatgggttattcaaggaaaaatactggttttggatcggtgttggagcattgtttggttatgcaattattttgaacatcttgttcacaatgttcttgacacttctcaaccctattggtaatctgcaagctgttgtggccaaagatcaagtacggcacagggattctaggaggaagaatgacagggtaatctcaaggaacagaaggggatggtgttaccttttcaacccctttctatgtgcttcaggaatatcaactactatgttgatgtaccagtggaattaaaaaagcaaggtgtagcagaagaccgcctgcagctgcttgttgatgtcactggagcttttaggccagggatactaacagctcttgttggagtcagtggagctggcaaaaccaccctcatggatgttttagctggcaggaagactggaggtctcatagaaggaagcatcactatatccgggtatcctaagaaccaagagactttcactaggatatccggatattgtgaacagaatgatgttcactcaccttgcttgactgtgatcgagtctttgttatactcagcatgccttcggttgccttctcatgttgatgcagacactcaaagggtaagccttgattggttatacatcacacgcgctttttgtcctccttatcttttgtgttccctttcataggcttttgttgaagaggtgatggaacttgttgagttgaatcccttaagcggtgctcttgttggtctgcctggggtaaatggtttatcgactgaacaacgtaaaaggttgacaatcgctgtggaacttgttgcaaatccttctattgtgttcatggatgaacccacgtcaggattggatgctagatctgcagccattgtaatgaggacagtgcgtaatattgttaatacaggacggaccattgtctgcacaatccatcagccaagtattgacatatttgaatcttttgatgagcttttattcatgaagcgtggaggacagcttatatacgctggtcccttaggtgccaaatcgcgtaatctggttgacttttttgaggcaattccaggagtgcctaaaatcagggacggctataatcctgctgcatggatgttggaagttacaagcacccaaatggagcagattcttggagtggattttgctgaatactatcggcaatcaaaattatttcaacagaccagagaaatcgtcgaggccctaagcagaccgagcagtgaatcaaaagaacttactttcgccacgaagtatgctcaaccattttgtgctcagtatatggcttgcctatggaagcacaacctatcgtactggaggaaccctcagtacaccgcagttagattcttctacacagttattatttccttgatgtttgggacaatttgctggaaattcggttctagaagggggacccaacatgatatattcaatgcgatgggtgccatgtatgcagcggtgctgttcataggaattaccaacgccacttctgttcagcctgtgatctccatcgaaagatttgtatcttatagagagcgagctgctgggatgtattcagcgttgccttttgcattttctctggtcactgtggagttcccttacatccttgtgcagtcactcatatacggttcaatcttctacagtttgggatcatttgagtggacagcagccaagtttctgtggtacctgttcttcatgtacttcacgttgctgtacttcactttctatggcatgatgacgacggcgatcactccaaaccataccattgcgcctattattgcggctccattctacacgctgtggaatctcttctgtggattcatgatcccaagaaagcgcatcccagtttggtggaggtggtactactgggccaacccggtgtcgtggacgctctacgggctcctgacctctcagttcggcgacctggaccagcccctgcttatggccgacggcgtcacctccaccaccgtggtggctttcctggaggagcacttcgggtttcgccacgacttcctcggcgccgttgcggccatggtggccggcttctgcgtcctcttcgccgtcgtcttcgccctggccatcaagtacctcaacttccagcggcgatgagagagcaagtggttcagctagctagctagtatagtagccaccgccgacacagacccaccaaacggatcgcagcctactgtacatgcatacaccgatcagtgcaggagggcagcagcacaatgaattatgaatgcgatgtacctaccagcgcgtcgtattggcacagttaatttgcccattacccccagaacatttcgccggggtaaataatcttccggtcggtcacgggagcgagagtgagaaaaagtaaagggtactgtatagccagctattccatgtacttgctgccttggcctcccctccatcgttatacggtggcgtcgcttcatgcagggttt

SEQ ID NO: 25914 - DNA, 413 bp, Zea Mays
agctacgccattatcatgtgcaggatggggttcagctgaaagcggcaaatcctgctcaaggacgacgctcactccttcaggcgctttgccttgcctttgctggagtagacgacccaacagtttccaggatgatatacttactcgaaaaaaatactgaagcattgtgaatgatctagaatgcaatgcaacgacagagggtaagcgattgcttcggcaggagaaagcagatgccttttctgctgctgtgacctactagcggtcgtttctgttgggtgttgccatgaccagaccaaccttgtttgttgtcattgtcactgtccggtcgccctggcccatggatccaaaatccatccattccattgtatattcagcaacaaaaaaagaacgatataaaaaaactcggtcgaggaggg

SEQ ID NO: 25915 - DNA, 1691 bp, Zea Mays
atatattcacctgagccaggtcgctgtttcatcatcgtgcttgactgcagtctgcagggggtgtggccgcgctgcagcctgcctgtcaatctcgatcgatcaaggggtggcgtgccgagatggcggaccggccgtcgcttcctgctctcattattgctatcgccgttcttgctggcagttactgccgcgtggcgagctcggcctcgccggcggtggaagatgagctgcgcggtggaggaggagccggcggtccgacgacgatgcggcggcgcgcggcgtcggtgatggtgcccatcaccatcctcaagtccgctgttagcgacggagctgtgtgcatggatggaacgccacctgcttaccacttggatcctggctccggagcgggcagcagaagctggattgtgaacttagagggaggtgcgtggtgcaacagcgccaagacatgccggctcaccaggagctccggccgtggctcgtcggaccacatggacaaagagatccccttcaccggcatcatgagcagtagccgtgccgtgaatcctggtctcgcccgattctaatttctacaactggaaccgggtcaaggttcgctactgtgacggtggatcttttgccggcgaggccttcgacaaggacactgggatctacttccgagggcagcgcatctggaacgcggtcatccggcacctcctctccattgggatggccaacgctgaccaggtgctgctcgccggctgctcctcgggcggtctggcggtgatactgcactgcgaccagctccgcgccttcttcccgtccggctccaccgtcgtcaagtgcatctccgacggcggcctctacctcgacgccgtggacgtctccgggggccgcagcctgagatcctacttcggagacattgtggccatgcaaggaatagctcagaacctgccgccggcttgcaccgcccgcctcgacgccacctcgattgtgctcagcctggcgccagacagagctgacccaagcggcgcttggcgagcctgcaagtccaaccgcacggcctgcagcgcatcccagatgagtttcctgcaagatttcagggaccagatggtagcgtccgtcaaaggcttctccggttccaggagcaacggggtcttcctaagctcctgcttcgcgcactgccagtccgagcagctgggcacctggaacaccaaaccaggtggctcccccaccattcaaaacaaggggatttcaaaatccgttggcgactggtactttgatcgagctgaggtgaaggcggtcgactgccgctatccctgcgacaacacttgccaccacattatatgagaggatccacgtttttttattattttatgcatagggaagaacattcgctctctcaacgaagtgtacatcgtatttgattttgggaatgcaattggatacagccatcaaatgaacacaacacgcgaaaataaatggtaatggcgtgttccagtaagacaattgagtgattcaacagctgttgtttagcatttgatccatgcaatggagttcctctgtattatcattctagtcagttggcactgctaccagcaaatatcttctactagtacattcggaattctgcgtgcctgttcatgctaatcctgcaaaaactgaaggattgagctttcagtaatcagtgccgataagaatgaattacattattatac

SEQ ID NO: 25916 - DNA, 4136 bp, Zea Mays
gaggacagtacgagtagactagcagtagtagctgtctgcccctctctcatctagtatctctctgctccttccattccttgcgactccactgtcctcctccctcccacagatcttggcttccgtctcctacccccagcacaagcacttgcagctcaaagcagccagccagaagcctcggtctcggagtcggagggacgcagccagccggcgccgcgcctggcgggcgggagagtgcgcttcaggcggcttcagtccagtccagtccactcccgccaagacgcaaaagaaaacacagcgatgcaccaagacagtttcaggtcggtggtctgcagatccctctcgaagagcctgcccccaaggagcaaagatggcagctgttccgaaacagtccagtgcactgtcccctgtatcgtcacgctgcagccttcggtctgtcggagctgccaaggtcgggatgtacagagcgcgtcgcagagctacagggaggatgaaaggtccatgtcgttccacggggactacctgatggtgccctcgctgtccaagcattttgctgaggacctcctaataagaggcgccatggatctccaggagtcccttgcgatgcttgagaggttccaagctgcgtcactgagcatgagactactgtccagcaagaagataagaccggaaactggtgaacagtctcctgcgatagacaccatagtccgtgaagttctcctgaggccatcgaacgccaagcaggtgcaggtcaatggattaaaacaacagctaagcgattctaccagtgagttgaaaaatattgtcaaggatagtttttacaagaagaaccactctctggtgtccaacaatgagcaggcctctttgactttgagccagtcggcacggcacttgccgaacagttacctgatgcccaagcctgctgctcatcagaagaaatctgtgcccatgtcgtcgccatcttgtgcagcagtgcgacctgaaaagtctaagacgccaagcttggtagccaagctcatgggtctcgatggattgccctcgccgaaagctaaatccaccatgaaagacgacaagaacaaggcagcgagttcaccaagagcgctgttcgataccgagaggcccaggtcgaagaggctgctgccgcagttactcaaacaggaggctggttttggctcagagatgcctcggtcagaaaagctgccaccattgcaatctaacgttcaaaagaactctaccagctcaaagaagggcatcgtcggcacttcgtatactaccggagcggttcatgatactgcatcgatcaaaccgatccaaagagcggcatacgttgagcaggctcgaccgaaatccccgaaagaaatcaagatcgtctcttctcctacaggcaggaagcaacgggcgaatgagatcaacaggaggagcacggagaaacaaaggccttattcaggtgaaagaagcagagaaaggatgaatgctgcgaagtcaagagctggatcagcgtctcgtagcgcggaagcagtagcgaaacagtgtgataggagatcagttgcgtcaaggagcaatcgtacttgtgactcggtggtgaagcccaactcaccgaaaccacagagcaattccagagcgaggagagtgcccaggagaaatgttaagagctccaccgttgatgaattagtggcttacgagatagaaaaagagattctccatgccctggaccaaactgacggtccatccacagaacatagcgcgacaccgagcgacgaagcctgcccgagcgctgactgggacgaagcatcttctgtgggcgacatcctgaaagatcctggcgaggccagcgaaacatcgcagtctgctgtccgtgactgtagaatcagctcagctggtgcggatgcagatgctattcactcaccgacgcacagagccccgacaagggaagctgaaataaaagacgagatcggcttgcttctcctcagtgacaaaccgttccttagcagagcagctgagctcataggcgttgatgtgtatggggatctgagtaaccagtgtgacaggatctccaaggctagaacgagaaaccgtcggctctatctggacgcggcaggagagcaactggagctgaaacaccgccagcagaacatcctgtggccttacgctaggccgctgggccggagatggaggtcatcgtcatcggcgtacctgtcgctggaggagctgctgagagatgtcagcgacggggttaggaatctggaggatgggtattgcagtggagatgcccgccgtggcagcaaggatagcctggacgtgaagctggagagggatctcacctcctccgcagatgcgttgatcagtagtgtttgggacatgggctggcaaggtttggcttgtgtggaggcggaatgcttcgtcagagatgccggggaggagatcctgtccttgctcgtcgaggaagctgctctagacatgtgtctgcactgccatagtgccatgtgatgatatgaacatacagcgataagttgctgccatcgggacgatctataacaacttgcagcttcagttcttgtagttgtttttctttttttaggtttgaagtagatttcgtccgtgtaatcaccaggattgtagtagtataggaaccagtgaagtgatgtgttcatgagttcatcaagacatgactgaacaaaacaaggccatgaaaggaaggaaaaaaaaacagaaaaggtcacatacctgtcgtgttttgttgagtggcgacttgcgagcaccaacaaagccgagtcacgggccgagcccacgggagattcctattggcatctccatccgtcctcgtcggcatcccagccacacacacacacacaccgcacctagccacctaccctgctgtcccccgtgccgtcgccgatggagtccttgggcgtgctgctgctccaccccttcaacgcgtacctggagcaggagctggaccgccgcttccgcctgtaccgcttctgggagacgccccgcgaggagttcctccgcgcgcacgcgggcgccgtgcgcgccgtcgtcggcaacgccagctacggcgccgacgccgcgctcatcgacgcgctcccggcgctcgagatcgttgcctccttctccgtcggcatcgaccgcgtcgacctcgccaagtgccgcgaccgcgggatccgggtcaccaacacccccgacgtcctcaccgacgacgtcgccgacctcgccgtagggctcgccatcgccgtgctccgcaggatcccgcaggccgaccgatacgtccgcgcggggctctggaagtccaggggagactacaccctaaccacgcggttcagcggcaagcgggtgggcatcatcgggctgggcaggatagggcaggcggtggcgaagcgagtggaggcgttcgactgcccggtgagctaccaccagcggacggagcagcgggcgacgtacccgagctacacctactacccgtcggtggtggagctggcggcgaacagcgacgtgctggtggtggcgtgcccgctgaacgcgcagacgcgccacatcgtgagccgcgaggtgatggaagcgctaggccccagcggcgtgctgatcaacgtcggccgtgggccacacgtggacgagcgcgagatggtggcggcgctggcggacgggcggctcggcggcgccgggctggacgtgttcgaggacgagcctaacgtgcccgaggcgcttctggggatggacaacgtcgtgctgctgccccacgtcggcagcggcaccaacgagacgcgcaaggccatggccgacctcgtgctcgggaacctggaggcgcacgtgctcagcaagccgctgctgactccggttgtctgacgtttccttgtttctattacgaaataacaagcgcctgcgcctgacagcgagtggggattaaattcaaaatgttttgttttgatttgatcgccgctggtgaatggaactgaaatgtgctgtcaattctcagtccagtgcacacgacacgcttgcacgaatgtcgagcaaattatggcatcttcttttgcgaagccgcctcctcgtctgtacactctcttcccctttggagactttacgtatctgcgatgaggtttgttcatcctaagtccttttcggttggagggatttagtgagga

SEQ ID NO: 25917 - DNA, 201 bp, Zea Mays
ttttactgtgagctactagctgaagctgacccttttcaactgcatctactccatggattatacacgggcggcgtcgcagcgagcagcctggcccgccgcccatatgctctgttgctatgccataatggactgcttggatgatgccgaccttctggccaaaagggtgtggagatttgaggttactaagacatcgatggcatc

SEQ ID NO: 25918 - DNA, 5296 bp, Zea Mays
cccacgacggcccatcagcgacacttccgtctcagtcctccccgtttcacccacgcgtgcgctctctcctcactctccctctccctctcgtcgacgattgggaaagcgccgccgccgccgcgccacaccacgccaggtggcgagttcttcgtagcgccgttcgccaggtctccgtagcgcccttagccgtccgcgagaaccctcaaaggcatttgcattatggttgcagcgtaggtggggagccattagaaggaggggcaacaagagttgctgggcatggcggctcaggaggccgcggcagctgattctttgggccctcggtttgctccggatgacccgacgctccctgcgccttggaaagggctgattgatggcgcgacgctgtactattggaatcctgagacgaatgtcacccagtatgagaagccggctgcaactgcaggtgtgccccctttgtcagcaggtcttccgccggcaacccctgcgcaggttccggaatctgcaccagtggcttttccgcagcttaacgtgcagtttggacaagctggccaggcagggcaccaggagcgtcctgaccaggcagcttatcctcaggctggccagcttggccagcagcacactcaacagccagctcagcagcaaccgtttcagcagcagcaaccgtttcagcagcatgtccaggcgcaacaccaagcttcgtttcagcatgtgccatatcagcaacagcaaacacacatgccaaatcagccacatcaataccacagcacgcatcctcaacacatgccgtaccagcatggtctttacatgcaacctcagcagcaacagcaggctccaccatattcatatcaggcagaccagcagccacagatgcgacaaactgcttataatcaagctcagcagccatcagtgcctcaagctgcctacaatcaaagtcagagtcagcagccaccaatgcctcaatcttcctacgatcaaggtcagagtcagcagccaccaatgccgcaaccttcctacaatcaaggtcaagttcagcagccaccgatgccacaaccttcttacaatcaaggtcagcaatccatgataccacagtctgcctacaatcaagctcagcagcctcaaattccacatggtgcttataatcaaagccagcaaccgctgggagataggattccccagggtcaagggcaacatcctcaacaatctttgagctctcatcatcctgcccaagcttcgcagtcgccgcaagtttcccaacctcaaggacctaaaatgccgactcaacaaggtcaactgcaacatggattgccgttcactcagcatggaaaaacgccattgtcacatgggcaacaaagtcctttgttgaaggatgatgatggaggagttcatgaaggcaagcggactggctttccgttaccacttagtcagcagcgtggccaagctcctcttccaaatcagcagctaccttctactcatcaacatcctggagcccttagtagccagccaaatatacctggagtcggtgggccattttatcctgccaggaatcttcctgatggaccatcctctgctgagactaataacatgggttttatgaactcacctgctcaaatgcatcaaggtggagcagatacaaactaccagaaaaaaccagttagtggccatacagttccaaatcatgttggtccatcaccaattcgacctccaatggggttcgatatgggtaatagtgttggacactttgaaagagatgaccctcactcttatggaaggtttgatggagcaaaggctctccagcagcagccaaagcttgctgctctcccaacttcacaaaattccatggtcatgcataatggaccgctttatcctcggccagacaattttggtggtcataacatggcacctccgcattcagtaccaaatccatataatcttggtccattgcctattggaacttcagtgaggccaccgtcaagtatgtttgctcctccagattttccaagcgtatcttcagctgatgcataccgtcaacaccatgaagtcactgccatgggtgagaacgttcctgctccgtttatgacatttgaggccactggattccctccagagattctgagagaggtatgtcctctttagtttggctttgctacttgtggatccatggatgcattatctaaactttatcttaacctagaaattcttgacaatgtgggccgttgaaaatgatatctttgaaatggaaaattatcttctctcatagtgagtgcattgtatgcattgctcaatgatgtagcacaatggatttacggtgatgctgagtgccctaattcaacaataggttttcaatttctgggcactgtagtgaaatacttgtggctattttctgctgacaagtattgggaggattgatgttgtttcagattataaaatgaggctgaggcttcctgcttcttgtctctgccactgaatcaacaaagagcttcttcatgccttgagttgcttaagtgggcatgcccttatgatgcttattcgttttttcatttaagatccatgcagctggtttttcaaatcccactccaattcaagctcaaacatggcctgttgcgctgcaaaaccgggacatagtagctattgctaagacagggtctggaaagacgctggggtacctaatccctgcttttatacatctgaggagatgccacaataatccgatgctgggccctacagtattggttttggcccctactcgcgaacttgcttcacaaatacaagccgaagtagttaagtttggtcaatcatctagagtttcttgcacatgcctatatggtggaacttcaaaggtccctcagctaagagaacttgagcgtggagcagatattgtggtagcaacaccagggcgtcttaatgatatcctggagatgaagaggattaacctccatcaggtttcattacttgtgcttgatgaagcagaccgcatgcttgacatggggtttgaaccgcaaatacggaagattgtggatgagcttcctaatgctaggcagactctaatgtacactgccacttggccaaaggaggttacaaaaatagctggggatttactgagagatcctgtccaggtgaacattggcagtatcgatgaacttgttgctaacaaatccatcactcagtatgtagaggtggttccacctatggacaagcagcggcgtctagagcagattcttggagatcaagaaaggggctcaaaaatcatcatattttgctcaactaagaaaatgtgcgatcagcttgctcgtggcattggtcgcaactttaatgctgtaagcattcatggtgataaatcacaggccgaaagagataatgttctcaatcagtttcgaactggcagggcttcagtattagtagccacagatgttgctgctcgtggacttgatatcaaagatattagagtggtaatcaattatgactttccaactgggatagaggactatgtgcatcgcatagggcgtacaggaagagctggcgctactggagtctcgtacacatttttctcagaacaagattggaaatatgcttgtgatttggtgaaactcttgcaaggtgccaaccagcttgtccctccgcagctgcaagacatggctgcacgcagtgcttctggaggtccaagaaaccaggcttctgggatgagtcgctgggatgggcctggtggtcgtggttttgaacctggtgttggtggccctgttggttatggtggtgttagggagggtcctggaggttttggtggtcgtgagggcccaggtggacttggtgttcgagaaagcccagccatgtttggtggccccggtggcttcggtgatcgggaaggccccggtggcttcagtggccatgagggccatggtggctttggtggccgggaacgggagggtcctggtggctttgttggcagaaagggcccaggtggttttggtggacgggatggccctgggtcaagtggtttcggtggtagaggacagcgtggatctggtggttttggcagtagaggtggagcaagccctgggggctttggtggacgtggtggcaggggcgattctcctggttttggtggacgcggcaggggtgatttttccggttttggtggacgaggtaggggagatttttctggtgggcgcggtggcaggggccgtggatttggtggcaggggacgttctgaccggtttgtctcagatggacggggacgatatgataaccgtcgaggatttggagacaagggtagggatcggagctacagccgcagcccggatagagtccgggcacggggttatgacagaagaagtgacagcaggagcattagtaggagcaggagtcgcagcaggagctggtcacgcagcagaagccgcagcaggagctggagccgaagcagcagccggagtcacagcaggagcaggagtcgtgaccatggggcagcaccggagcgcaggccccgagcaagatccggcttcgatgtgctgcctcctgcaactggagctgctggacctgcacctgttcccgtacctggaccagcagcaccgcctgttcctgctccggcacctgaacaatcactggctaatacatcttcaatgtcaccgatgtctcctggtggcctagtccagccagctgctgcacctgctggtggccaaccttcccaagggactggcgctgcattccccagttctcctgcaggcgaaacgtttccaggcgcagcagctcagcatcccgcgcctgatgtataatgagtcggacgacatccagtgccctaaatatgtaatccggtgtacaataggagaaatgagtttccgggtagtagtttatatggcaaaaaaatcggcttttccgcaattttctgatctcgtggtgaattgacgtatggatgttgtgtgtttttgtgctgaattcaagaaaaagttatgttgtgcaactatattttgttttgtgtgttttctcgttttacaattttgtgtttctttgaattcttttgttgttgctatttttgcctacaattgcgcgacctgattttgcgtacaattgcgcgacctggtctgcattcttgtacttgtgttttgttgccagctaaatccagttgtttaacaggttttcagcgaaacacgtggtcgatacattttaaatttttctttcaaaatttgttgtttccgggtcaactgaattgtcgcttcgtgttgtcattgtttttttttaaaaaaaatcggctaaattctgttagttcgaccggtttttctggcatgtgaggtacatacaattttttttt

SEQ ID NO: 25919 - DNA, 1333 bp, Zea Mays
tcaaatttggcagtaatctcctgttctcaaacgaaattactctgttagagaggatccatatggggagattcgaagagtgagaccaaagatcaatggaaattcatgggacatttcaaaattcaagcaagttgatattattcgaaatcatccagctgcaaattcacgtgaagagctcactgccaggaatccaaatgcttccagagatggaaagaaactattaaaggatattatgggagccagcaatttaacataccctaactttatttcaaaagctgaaaccgctgatgaaacatcagatgtccccgataaaccttcagctgtaaccccacaacaacatgattccagcttcccgcaagctggtaagaaacaaaaaggttttgctgctacaacacttaatcagtgttctaatgaggacctgaagaaaggctttgctttgaaggtggagcctttgaatgcatttattcctttcgagcagcagatgatggacctatctcacaggaagcaagagaatgctgcctgtgacgattcatgctctctctcaaaactaatgttgaaggaggatattgaggctgcacccagcctgccgacgggcattcaagtacagaatggctccaagaaccgcaggaggaggcagcccaacgtacagaagaccacggcgactccaacaaggtcgcctgcaaggggtcagcgtcgaaagaacaacgatgccatggtcaaatcggagatgggcttgattgagcagagtaaacttgtgctgacggaacaagagccagagctgggagacgttccggtgaagagacccgttgggaggcccaggaaggcgaggtaggtaacctccgacattttccaatttttttttttatatatatataggaacagaacagggcatggtgacctttcatggtctacttgtaaactaggaacggacctagctcagatgacccgggcacccctgcttcgtaggcttgagctccgtttggcttggattccggcgccttttccagtttcctgtgacttctgtacagtgcaagccatcttaacgccgccaaggttaacttatcgaaacatttggagaacctggaagcaaacggcgaagtttttccgtgtgcgttaatgtttcagagaagggagtccgagggaaaaaaaggttgccactacgcagctcatgtactgtttttttttgtaggatgtattgacatcattgtaccaaatcagctccatataatcctgtttgatagatataataccattgtatcaaatctcgagttttgataggcaaagattactagtaatcttgaagagcccgcggtcgtcagagacggcggtaattttg

SEQ ID NO: 25920 - DNA, 2895 bp, Zea Mays
agccgatatgcgacacaagcccaacccttcctgacgctccacgcgctcgtctctctccttccttccatcctccctccctccttccctccctcgctcgcctctggaggaccctcgccatcctgcccaagcgcaccaccaaacccccagcagcggcgctagggttcgcgcctcggcgcgtcggcaccgtcacctgcggcgatggcggggcaggagcgtaggacaatcgatctggaggagggatgggcgttcatgcagaagggcatcaccaagctgaagaacatcctcgagggcaagcccgagccgcagttcagttccgaggactacatgatgctctacacgacgatatacaacatgtgcacgcagaagccgccgcaggactactcacagcagctctacgacaagtatcgggagtcgttcgaggagtacatcgcctccatggtactaccttcattaagggagaaacatgacgagtttatgctgagggagctagtgcaaaggtggtcaaaccataaagtcatggttcgctggctgtcacgcttcttttattaccttgaccgatacttcatatcaaggaggtcacttacaccacttaaagaagtgggccttacttgcttccgagagttgatctatcaagagattaaaggacaagttaaagatgcagtgatagctctgatagacaaagaacgtgagggtgaacagattgaccgggctctgttgaagaatgttttggatatttttgttgaaattgggttgggtcaaatggagtgttatgagaatgactttgaagatttcttgctcaaggatactacagagtactactctgtcaaagctcaaagctggattcttgaggactcatgcccagattacatgattaaggctgaggagtgtttaaagcgggagaaggagcgagttggtcactatttgcatattagcagcgaacagaagttattggagaaagtgcaaaatgaattgcttgctcagtatgcaaccccgctgttagagaaggagcattctggatgttctgctttgcttcgcgatgacaaggttgaggatctttctaggatgtacagactcttctccaaaatctcccgtggtctggagcctatttcaaacatgttcaaaacgcatgtcacaagtgagggtacagccttggtcaagcaagcagaagattctgctagtaataagaagccagagaagaaggatatggttggcatgcaggaacaggtctttgtgtggaaaatcatcgagctgcatgacaaatatgtagcttatgtgacagaatgtttccagggacatacactcttccataaggcacttaaagaagcctttgaggtcttctgtaacaaaggtgtctctggcagttcgaatgctgagttgttggctaccttctgcgacaatattctgaagaaaggctgcagtgaaaagctcagtgatgaagccattgaagatgcccttgagaaggttgtgagattgctggcatacatcagtgataaagacctgtttgccgagttctatagaagattacttttcgacaaaagtgctaatgatgagcatgagagaagtattctgacaaagctcaagcaacagtgcggggggcagtttacttccaaaatggagggcatggttacggaccttactgtcgctagagatcaccaaactaagtttgaagagtttgtagctgggcatccagagttgaatcctggcatagatttggctgttactgttttgacaacgggattctggccaagctacaaaacttttgacataaaccttcctgcggagatggtgaaatgtgtagaggttttcaaggaattctatcaaacaagaacgaagcacaggaagctgacatggatttattccttgggaacctgcaacatcaatgctaagtttgatgctaaacctattgagctcattgttacgacatatcaggctgcattactactactgttcaatggatccgaaaggcttagttattctgaaattgcaacacaattaaacctgtcagatgatgatgtagtgcgtttgctccattcactttcttgtgcaaaatacaagatccttaacaaggaaccagcaaatagatccatctcgcccaatgatgtttttgagttcaattcaaaatttactgacagaatgagaagaattaagattccactgcctcccgttgatgagaagaaaaaggttgttgaagatgttgacaaagacaggaggtatgcaattgatgcatcaattgtgcgcattatgaagagccgcaaagttatgggtcatcaacagctggttgctgaatgtgttgagcagcttagccgcatgtttaagccggacttcaaagccataaagaagaggattgaggatctcatcacaagggactatttggagcgcgacaaggacaacgccaatacgtacaaataccttgcctgattggtggttagtgacaaagtccaaaacagctccgggactatgcgataccactgggatggcaatcttcctgcaatgtcgtgatgcgtattctggctccgttgtcacctgttggtttgtggaggcagagtggattggtcagctagctgacggaagtcactgactcactagaagctattaagtggttttgtacttactgagtcaaatatatgtcatacgttgaaaccatgtttcgtaattatgaatagtttctttaaaattaaattttgcgcaatcaaatgcctttctctgttgcctaaggacagtcacgctctgatatgcgatcatttcacatttaccgagtcaaatagacgtatgtatatagaaaccataccagtatacttaagttcattttagctcgttataaatgttctctctctcttaacgtccagccatcagtcgaaatattgattcttgtgtaaatgacatctattttttttt

SEQ ID NO: 25921 - DNA, 729 bp, Zea Mays
ttcgacgcagcctctgcgaaatgcaggggcacttatagctgattttgaattatccgaggggatatactcctgtgcgaaaatcgaggatactgactcagtgtgcctgtggttgggtgcaaatgtgatgctggagtactcttgcgatgaggccaatgccctcttgaagaaaaacttggaaaatgctaaggccagcttagaagtccttgttgctgatcttcagttcttgcgagaccagcaaaccatcactcaggttacaattgctcgggtattcaactgggatgtacaccaccggagaagcaaacaggctgtaaaggaaccttaatcagttagatcacgaggtcaaccaatgtgattgggacaaattttttcgtaccttttggtacctctggcagattagtccatcatagcgagctctttgtttgttgatggtttctttgctgtgtaacaatgtatcggtttattctctttaatggtgtgggaacattagtagaagatggaacattttactgcctttttccccactggatgtccactggatcacgtcgcaaaatattttttttttcatgattcatgcataattcctgctttccaaagggcttcctttatgtttactgcattacagtccaggagatagacggtccattgtcatgttgagcaaagatagaagaaaatcgacaacaggtgaggtgactcgtttttacatatgtagggctttactgcttgacactt

SEQ ID NO: 25922 - DNA, 1978 bp, Zea Mays
tgtggaaatgcgaatatatctttccgcgtgtgttaattctgtaatcttgtcaacttcagttaatggttaatatgagggacattgagacatcaaacgacggacaattggacgagcccttagggcgagtgtccataatctcttatggttctgggcatatgctcaatgacatcacatcaagttgttggtttacctatttgctggtgttcttgacggatgtgggactcagtccaggcgatgctgctattgtcatgctttctggacaattggcggatggcttcacaacaatctttgttggggaattgatggatcgctttgggcatttcaaactgtggcatgcaggaggatctattttagtggcaatttccttctcgtctgtttttggtagctgtgttccttgcaaacttatgggaactaattcatctactttggagactgttggatacagcacatttgccactatttttaatgttggttgggcagttactcaagtcgctcatatgtctatggtaaactgcatgtcatcaaatccaactagccgggtttcacttgtaagctgtcgtaatgccttcacgatggttgcaaatcttagcctgtatggcattgctttgttgatatttactatattgcagtcagtgaacgtaatgtttcagtatcgttggattgcttatgtgtccatttccattggatcttgctttgttgtcatcttcttggttggaaccaaagagccaggatcaattcggcactgtgtagataagagtctttccagaatttcatggacctactggttcaagaaagtattgtactaccaagttgctctagtctatactctgactagactggtgactaatgtttcacaggcatttcttgctttctatgtaatcaatgatttagaaatgagtcaatcctccaaagcattggtacctgctattatctacatctgcagtttgatagtatctgtaatattacaggagactagatggtcaagttggcgtcttaagctttacttttcagctggagcagtgctttggatattgtcaggtcttggaattgtttttctaccgagcagaatgcacaacctcatgtatgctatttcaatcataataggagctgcgaatgcacttatgacagtgacaagtattagcatggaaggtgttttagtaggagaagatctaaatggttgtgcttttgtgtatggctcattaagttttgttgacaaagtttcatgtggagtagttctgtatattcttgagtcctatcaaggaagtacagagatcagatcaaatttaggaacagcatttggctattcaattacaagacttggcttgggcttagttccagctgtctgttcgctgctttcatcaatagtggcttataccatggacctccctgaccctgatactcggcggagacctttggtggagccccttctagtataacttcactggtgacctgttacagtttcatcctgaacatttacattaattgctcgatagaatgacactgctgctggagcctgaagatactactgacattataggcaaaggagcaatcgggtacctctggtcaattctctttgacttcatatgtatagtctgaataaattgtggtggaaaacatgtactcagaaacgttgagtagggattagaatttataagtagcataggggcaagaagattagtattgatcatactgcgcttacgagccattctgcaatccaatgtaaatataacttaagcttcattgttcagtacaacgcattgcctgtacggtactacctccattctcaaatatttactacctccattctcaaattagtaaaatgcaatagagaagcatgtagatactttcagttttcaagcaactaatgcaaaaccagagaaacattaccagctctaggcaataaaaaccatggatttaggtgatcattgtaaatttaatgctgatgctttattagatctgacccaaaaagtacaaatga

SEQ ID NO: 25923 - DNA, 3401 bp, Zea Mays
cgggacccaacggacagccagccgaacatatcccccctacgctggcgccgtcgcacgcgccgccactaggtgtcacccgtccttgcgccgccgccgcatccttcgactttcgatctgcgagctagcgattctccgctgaggagtggggcccatccctccggagcccaaccccagggcatccgcccgcccccgccgccgtggctcaggccccacgcgtcatccccgcgacggacaacgtagtcacgcaggtggagcgcggtccactcccccccccccccccccccccgcgcttcgcctccgctgagaccgcgccctgctggtgcgagtacccgggagcttccaaaccctagggccgggcatcgagcgagcgagggggtgagcgcggagcccaggcatgccttgccgcccgcggggatccaggcagtgatgcgcggatcggcgcggcgggggcggcccggaagctcggccgcatgaggtgcctcgtcggcggcggcgtccaggacagcccgcgcgcagcggccaaaagagtatcgccggcgtcgtggcggctggacgccgccacagcggaggcggacgcggggagagctgaggccaagggggtcaggttctgcgtcaggccgccggacgtcatggagacggtgcacgaggtggccatttacatccaccgcttccacaacctcgatctgtttcagcaaggatggtatcagatgaagattagtgcaatgtgggaggaaggtggcaacaaaacaccggcttcacctgccagggtcgtgcaatatgaagcttctgatgttggtgcggatgatgcattaggcatttggaaaatagatgacgtcgacaatagcttccacacacagccgtttcggatcaagtatgccagacaagatatctatctgtcagttatggtgtcgttcaacatattcaacattgaagaggagggtccagcagcctcggcggtgatgttgaagtttgagctgatgtatgccccaacactagagaacgggtctgagcttcaagcttctagtgtcacatcttcagcagctgtgcatgaatttaggatcccccacagagcactcctgggtctacactcctactgtccagttcattttgatgcgttccactctgtgcttgttgatctgacattacacatagtgtacctgaaagctggtgcaactaaaccatcattgaaggtaccggaccaaggtttaggtcctacatcatatcatattgtcaaggcattattaacttctagaaagttgttgctggaagaactgaagaaaatcagtggtgctattggtaagacagtagaggaattagatgttgctgacttgaatcttggtagatatgagtcatttaatccatcaaaatctggattaccaaattctagtaaagtgttccctgcaactggcaagggtgtgggacagttgactggagttttacatgatttcttggagaaaaacaacgatatggttaatggtacagatgattctatgctgtatactcttccccaggaagagttgtttgaactatttctaactctgagcggacaacttttcacttatatggaatgcatttttgaaatttcatagggtaaataaaacaaagatattggagtacttgcacgatgcttgggctattgacaggaaggcagaatggtcaatatggactgttcactcaaaaattgagatccctcatcgctatttgcggagtatgaatgatgaatcatctcaccgtcattcacttcttagagtttctggatcaaggaagttccatgacgatcctgcacagaactctgcttcacgggctgaactacaccggaaaagcatagcacaaatgaagatcaatacacaatctgttcaagatatgcatatatatgctgatccttcacatgttcctgttgttcttatagaacaacatgtcatggttgttccacagcatagttccagcaaggatttggcttcgaatgcttctgaacaaaaggatactattgtgctacctaaactacaaggagagcctctggtacccaaaagtagtgttgggccaccatttggatttacgtcttgttagaaaccaatggcttctattggaccctggagctgattgcctaatgtctgaggctaatgaagataaaacatctggagacttcaaagaaatgggtagcaggttggccggggaggtaattgccttcctgaagaagaaaatggataagctttctagatatggaggctgcaaagagctgaagttaagttttgtcggccattccatcgggaacatcatcattagaagtgccctggcagaacctgcattgcagccatacttgaagaacctctacacttacatgtcaatatcagggcctcacttgggttactggtacagttcaaattctttgttcaattctggactctggctgctgaaaaagctcaagaatgctcaatgcatccatcaactcactttcagtgatgatcaagacccccacaatacatacttctataagctttgcaagttgaaaacattggagaacttcaaaaatatcatattgttatcatcaccacaggatggctatgtaccatatcactcagcgagaatggagctctgcccagccgcatcatcggacacctcaaagaagggtcaagtcttcacagaaatgctcaacaattgcttggatcagatccgtgcgccctcatctgacacccggacgttcatgcgctgcgatgtgaattttgaccagtccaaccacggacggagcctgaacaccatgattggcagggcagcccacatcgagttccttgagaccgacatctacgccaagttcatcatgtggtccttccctgacctgttccgatgacagacaacgccgctcgtctctgtaatgtctctgtaatactgctgcataccaaacctacaaaccgatagcgcacactactgagtactgaccaggcaaggaaaagtaagcttgcataaaggctcccccagaatccaacaccgccacaggcagagtagcgctgtaaagatcctagaagcaacggtttttccagcttgctagatctgattctgtataaatagttgattctttcgtcattccattcatagtgctgtagatgtgcacctttgctgtgaatttataatcctttgtcggcttgtgtatctaacgcttcggtttaggatgtgctgacaatcagtgagcttatgtccaaataagccccctttcttaatgtttggttttagtcaccttggtctttgtgctgctgtaaatccagggtgttgtttctgtttggtgaaatgactgctacatgaatatctggttctggcatcttgccatagccggatcttgcttctgctaaggttattcctatcagggatatataggattggaaaaaaatatgaaagattttgatttattt

SEQ ID NO: 25924 - DNA, 2232 bp, Zea Mays
agaacagaggttattcgttttagctacccgttttgaagagaagccgattttggaggagacgatgatgagtccggcgtcggagcgcagcctcatcatccagagcgacgacgacgacgacgcccgatccggccacgacgtggaggagccggagcaggactccgactcctcctcgtcgtcctcatcctgcgccaccccacgccgcggcccaagctcacccccctacatccagcaatggccgcagagttacaggcaatcgatcgacattctcagcagcgtgcagtcacccaacctgagctttctggggactccaactctgagcaggctgtcgaactctttcctcgccatcaccgattctttccggagcaaggcccccgaaacgatctctagctttatcaagccactccttggccccacgccaagtgacgagcagcagcggcagcatgaaggcacccgaaagagttccgagtaccttgtgccctcgagaagatcatctctgcagcagatcccagaggatcaaaagccacctgtaggtggccatggggcgtctcatgaccagaactgctcttacacccagggagtgatgaatggaataaatgttctatgtggtgtggggatcctatcaacaccttatgccatcaaacaggggggctggattgggctggcgatactctgtacatttgctcttctcgcatggtacacaggtgtgctcctgcgccattgcctggacagcaaggagggcctcaagacatacccagatattggccatgcagcctttggcagcacaggccgcatagttatctcgataatactgtacgtggagttgtatgcatgttgcatcgagtatttgatattggagggtgacaatttgtcaaaattattccccaatgctcacctgaccattgggagcatgacactgaactcacatgtattttttgcaatcttgactaccatcatagtcatgccaaccacctggctccgtgacctgagctggctgagctacatttcagctgggggtgtcattgcatcaatccttgtggtcatctgcctgttcttggttggggttgtcaatgatttcggctttgagaatgaagggactgcactgaacgccccaggaattcctattgcaattggattatatggttactgctactcagggcatggggtttttccaaatatctattcctccctgaagaatcgcaaccagtttccttcaattctttttacttgtattgggctgtctacctttttgtatgctggtgctgcagtgatgggatacaaaatgtttggtgaagccacagagtcccaattcacactcaacttaccagataattctgtcatttctaagattgctgtttggacaacggtggcaaatccaataaccaaatatccttggtgtgccaattgatagtctcataaaaaaaaatggaacaaatgtttctttatgtccaagtatattttagtacatagagttagttaactacttagattcaaaagtaaaaagggtacactggaaatcgtgctgaaacatttctcccaagctcctctaaaatacagtcgggttcttcattccattgaggataccatacacgttttactacatcctcagattattgcaatattgttcgcttactttccttaatgaataaacacatatgcattaactattattccattggctatgagtttggaagagctgctgccaccaaaccaacaaaagtattctacaataatcatgcttagatcatctctggtgatatcaaccctcctgattgctctatctgtgcctttctttggacttgtgatggccttggttggttctttgtttgccatgcttgtgacctacattttgccttgcgcttgttttttggcgatcctcaagacaaaagtggggtggcatcagatagcagcttgctcgttcatcatagttgtcggggtttgctgtgcctacgtgggaacatactcgtccctgtcgaagataatccagaactacgcatagcacagctgttcctgtgatcctgtatatgcatctgcccgacaaaatcatgtgtgtgctatatgggccgaacatatgtacaagatgaaagtttaccattcaattcactcgatgtataataaattattggtgccttatcatagggctcaatgatttctactacgattttaaggttgtatggtgcgtgagtaacattgttccttatggtgagaaaaaagttgatttggtcttcttctagc

SEQ ID NO: 25925 - DNA, 3662 bp, Zea Mays
agcacattgcccatgatggcaattgggcgaagcccgcctttgataatggtgaacgggcaaataactcgccctcgaagcataaccgttcccatcctcctttcccgaacaaccggagcgcggcgcgagacaggcctctactccccgtctcccccgctccagctgacctcgcccactagggggacgtgcgatcgatcacgtgcgcggcgactgatggcaggctagattccggcaatccacagtcagacacatacattttgcgatcgatttttggtgaagcgaccttgatctgaaaatggggctgttccgggcggcgtccggtctggctcgtttggcgctgcggcggaacctctcgcgcgccgcagcgagccccttcgccggcagcggtggcgccgtcccgggtgcaatgccggcgcggtacttccactccacacgcccgcgcaggttcgccgcgcccgcgccccgtgcggtgccgctctcgcgcctcaccgacagcttcctcgacgggaccagtagcgtctacctcgaggagctgcagcgagcatgggaggccgaccccaactccgtcgacgagtcctgggacaactttttccgcaacttcgtcggccaggctgccgccacctcgcctggcctctccgggcagaccatccaggagagcatgaggctgctgctgctcgtaagggcgtaccaggtgagcggccacctgaaggccaagctcgacccactggggcttgaggagcgcccagtcccggatgtgctggacccggggttctatggattctctgaggcagacttggaccgtgaattcttccttggggtgtggatgatggctgggttcttgtccgagaaccggccagtgcagacactgcgttccgtgctggagcggctcgagcaggcttactgcggcaccattgggtatgagtacatgcacatacctgacagggagaagtgcaactggctcagggataggatcgaaacagttaacccaagggagtacacttatgatcgtcgtcaggtcatgctggataggcttatctggagtacacagtttgagaatttcttggcgaccaagtggacgactgcaaaacggtttggtcttgaaggcgctgagactctgatccctggcatgaaggagatgtttgacagagcagctgatcttggtgtagagagtattgtcattgggatgccgcacagaggcaggttaaatgtcttgggaaatgttgtgaggaagcccttgcgacagatatttagtgagtttagtggtggtaccaagcctgtcaatgaaggggaggggttgtatacaggtactggtgatgtcaaataccatcttggaacttcatatgacaggcctaccaggggcgggaaacatatccatctgtcactggttgcgaacccaagtcatttggaagcagtcgatcctgttgttgctgggaagacaagagcgaaacagtactattccaatgaccgtgacaggaccaagaatttgggtgtgttgctgcatggtgatggtagtttctcagggcagggcgttgtgtatgagacactgcatctcagtgcccttgaaaactacaccactggtgggacaatacatatcgtggtcaacaatcaggttgctttcactactgatccaaggtcagggagatcctctcagtattgcacagatgtagcgaaagcattggatgcgccgatttttcatgttaatggtgatgatttggaggccgtggttcatgtctgtgagctcgctgcagaatggcgacagacatttcattcagatgtagtggtggacattgtatgctaccggcgatttggccataatgaaattgatgagccgtccttcacccaacctaagatgtacaaggtgattaggaaccatccaagtgcgcttgagatttatcaaagaaagttgttagagtctggaaagatctcaaaggaagatattgataagttaaacaagaaggtcagcactatacttaatgaggaattccagaacagcaaggactatgttcccaacaagagggactggctttcagcttactggactgggttcaagtcaccagagcagatttcgcgtatccaaaacactggagtcaagccagagattctaaaacgagttggagaagccatgactactctaccagaaaatttcaatcctcacagggctgtgaagaagattttttatcagaggcgtcagatgatcgagactggagaaggcattgattgggcagttggtgaagcacttgcttttgctactcttatcattgaggggaaccatgtcaggttaagtggtcaggatgttgagaggggtacatttagccaccgtcattctgtcctccatgaccaagaaactggagagcagtactgcccactggatcatcttgttatgaaccaagatgaggagctttttactgtgagcaacagttccctgtcagaatttgctgttttgggctttgaattgggttactctatggagaacccaaactcattggtcatatgggaagctcagtttggtgatttttccaatggagctcaagtgatatttgatcagttcctgagtagcggggagtcaaaatggctccgccagactggccttgtggtttgtcttcctcatggatatgatggccaggggcctgaacattctagtgcaagattggagcgctttcttcagatgagtgatgacaacccttatgttatacctgagatggatccaacactgcggaagcaaatccagcagtgcaattggcaagtcgttaatgtaacaactcctgcaaattatttccatgttctgcgtcgccagatacaccgggactttaggaaacctttgattgtgatgtccccaaagaacctccttcgccacaaggactgcaagtcgaacttatctgaatttgatgatcttgcgggccaccctggattcgacaagcaagggacacgcttcaagcggctcattaaagaccagaataatcacaaggacctcgaggagggaattaaccgtctagttctttgctctggaaaggtgtactacgaactggatgaagaaagaaggaagacggagcgcactgatgttgctatatgtagagttgagcagctctgcccattcccctatgacctcatccagcgcgagttgaagagatatccaaatgctgagatcgtgtggtgccaggaggagccgatgaacatgggagcgtacagctacatcaacccccggctgctgacggcaatgaaggctctgggccgtggtggcatcgaggacatcaagtacgtcggcagggccccgtcggctgctactgctacgggcttctactcggtgcacgtgcaggagcagacggagctggtgcaaaaggccctgcagcgcgaccccatcaactacccgttctgaaagaaacgagacccctgtaaattcttggaaaattgggcaccttttgattttgatatacctctatagagagagcaggccttaaggtatgcctgtgctgctgtgcagccatttgttgaaataatcgtttcggactctacagtaccgcattatatagtttataattccatgataaatattgtataagtaattattgattaattaatattatttacttcctccgtccacaaatgtttatcgttatgatattcgtgctagaagtttaactgaatttatagaatatataagtgatatt

SEQ ID NO: 25926 - DNA, 897 bp, Zea Mays
gtaaggatctcttcttcttcactctagcagggaagcgaagaacagggaagcaaggacatggatgctttcagtgcagtgatggacaaggtaaagagccacccagaaatgatggagaaggtaagtgcagtgatggacaaggtgaagaagagccacccagaagcggtggaaaaggtcaaggacgaggtgaagagccttgctgacgctctccacctgcggagacatggatccaaagataaagaacctgagtctgaagagaaggccgtagaaggcgaggcagcgcagagcgtcgaggaggaggagggtacctctgctgacaagactgcagaacctaatgtgttggagcaggccgtacaggagattcaggctgtcgccgcagctttgcagcagacagcacctgaaactgaaactgaaattccagttgagactgctgctgctgctgctcctgaaactttggctgaaggagacaagcctgaagaaacaaacagggatgtggagaaagacgacccaaagaagcggctcgatttcgccgggttcttcgccatgctgtttgagaggttctgctccccggccaacaagaagaaagactgagtgattgcaggtcagctgtggatttctcgttttgtgatcttggacgtggaaattacattttactgggtggtgtacagtctgcacttgtgttctattaagataaatctgctcttgcttttttactttcttctggtgcaatgactacagtttacttgatgtatttattgtcgcccttgtggaattgatttagtttatgtgaacgattgatttattttgggttaagataatgcagtgagtgtgtgatgccttgtatggacatgtgagaaccgattttgctcattgtgaacaaaattttagccctactcaagc

SEQ ID NO: 25927 - DNA, 1868 bp, Zea Mays
cgcgtgcgctgtctccccccaggccccccacctctctggctctctctctctctgcgagtctgcgacgacggggctaccgccgcctccgtacgccaggtgccgaggtcttcgttggtcctttcgccggcgacatccaccagaaattatatcatcaattcattaccgggtgtacatttgtacacagtacacccatgtccttcactggatccgcccctgtagtgaggataatatctttggagtttcggagggggcgcgctagaaggatggtttccaaaatgagatttcggaatgctctcggttctagaccatttcagtgttgttcgcgtgagaatcatacatatgtccggaagctgttggaccgagtgtcggagagatcaaagctccttaaaaaggtgtctgttttggtgggttacagtaatccacaagatttagttgagaaacaaagagcccctggggaatcttctgcagagttgattagtgccttgaaagaaatcgatttcccagaaattactgcaaagtttccatgcataaaagttggtgatgcatcacctgttgaactgtatgaggattctactaacatgaagtttaaagaagctgcactttctgaaaagctcacaaatttcatccaaggctcagctcgaaatttggagtcagcttatgaattccataatgactgtcatccattgaatcaaacacccacaactgcaggtgatctttcaatcagtgaagagatccctctcattgaaccaatagttgatacgaagtcccccgagtcattgtcagatgctataacctctgacaatagtatactggataaaagtataaggtgcttgcctggaacaactagtaggcaatatcgccagctagaggatggtggtttccatacggtccgcaaattattgcagcattttcctcggacttatgcagatctgcaaaaccctcaaggccccatagaatatgggcagtatattatgttatctggtactgttatatcttccaggggaatcaaggttaagtccactttaggtcttcttgaggtggttgttggttgttccataatcgagtctgaattgagctcttcagttgagagtagtcactctggagcagagcaaaagagaattcacttgcacctcaacagatttttcagtggcgcacgtttttcttcccaacattttcttaacttaatgtcagcaaagcacaaagaaggggatcttgtttatgttagtggtaagataaaaaaggtgcttgctaatggccattatgagttgaaggagtacacaattgacgctattgaaggagaaggggaacacagcactatgcttgctaggaaaccacaccctatatacccgtcgaaagcgggattaaaacctagtctgcttggcctttcaatctctagggccttgaagatattgagcccagatgttgatccagtgcctcccgatgttctcgttgaattcaacttgcctaatctctttgatgcttacatgggaattcacaaacctaaggatcgatctgaagctgattttgctcgaagaaggcttatatttgatgatttcttttacctccagttaggaagactatttcaaatgcttgaagcagttggtacgcgggttgagaaggaggaattgttatacaagtgcaaaagtcatgagctgaatactgttggtgtagatgattggtctcctcttacaaagaaattgttgagggctcttccttattggcttactcctagtcagttggatgctgttcaagagattatatgggatctcaggagaccagttcccatgaacagactcttgcagcaccgaagcgaattcttcgttatgtttgaggcactcagcactctgcatttggggttgatgatctgt

SEQ ID NO: 25928 - DNA, 2660 bp, Zea Mays
ataagagacccctccgccccgtcctctcttctctccgctccacccactcccgctctgctcccgtcgatctgccatcctctgcctgccccgcttgctccgcgcgtctgctctagtgatttgagacggagatccgccagagatcgaggagccggagagcggcgtcgacgagggatggacgtccacggcggcggaacgggagccggcaagctgacgcggacgccgtcctcgctgctgcgctcgccaacggtgcgcaactgctcctcgttccaggccgtggttgtcgaggacccggagcccgacgacaagaaggcacaggcgcaccccaagcctccgccccaccacttccaccccggcggcggctccaaccacccgctgctcgtcctcgtgctcccgctcgccttcctgcccctgctcctcctcctccgcggcggcgacggccgccacctcgccctcctcgcggcgtccgcggccgccgcgctcgccgccgccgcgggggccgcgcgcctgctccggggacgcctgcgccgctcgccgggctccggctccgtccagtggttcatcggggacgacgacgacaagccgcagaagcgggcggacaaggccgccgcggcgccgcacggccgcgtcgtgcgcgagggcgtcgagttctacagcaatggggactgctacgagggcgagttccacaagggaaactgcaacggcagcggcgtgtacaacttcttcggcaagggcaagtacgagggcgactgggtcgacggcaagtacgacggctacggcgtcgagagctgggcgcggggcagccggtaccgcggccagtaccgccaggggctccgccacggccacggcgtctaccgcttctacagcggcgactgctacgcgggcgagtgggccggcggccagagccacggcatcggcgcgcagacctgctccgacggcagctcctacgtcggggagttcaagtgcggcgtcaagcacggcctcgggagctaccatttcagaaacggtgaccgttacgcgggcgagtacttcggggacaagatccacggcttcggcgtctacagcttcgccaacggccactgctacgaaggctcgtggcacgaaggcaagaagcagggattcgggatgtacacgttccggaacggcgacaagcgatcgggggactgggattctgggacgctcaagacccccttgcccccggccgatccttctgtccagcgagccgtacaggctgcacagcgagctgcagagaacgcgtttcgcttgcctagagttgatgagcaggtccacagggcggtaatggccgcgaacagggcggccacggccgctcgagtggcggcgatcaaggcagtccagaacaggatggatgggaagttttgtgagacctatgtgtgaattgctgtgtgcgagaccatgtttcgctctctctctctctttctaactgtacattagggtagtgaaggacaataactaatcagtgaggtgagacgacgaccggggcagcacaaccgcgcgcttccgagtcagggttcagcaacgagacgacgggagcctgtctgacgaagagcggagctggcagaaaccatttgcgagaaacggccatatcgccatggctgtcggaggggttccctcgcacctttccttgcaacaagctgtaactgtacatagatccaggcggtgtatcaatggtggagagcgagttttttcttcttctttccagtgcccttctcagttttcatttactcctcaattatgtctcagtaggggggatgtgtgcagggcactggggccactgcttacagtcacaggagtctgttagctttgcatctgcgtctccatttctccaacctaaatcttgaccgcttctcccatgtgcagtgattctccgtttgcaaatgtacttggaggtgcacatgggggaaggactgtaaatctccccgcttgtcctgccctgcaatgcaacccaagcgtctctggtctggcacagatggcatgaataatttccagtggcctgttgtgttgtcgatccactccctgctccctacctccctgagcccactgttttctgaaacctagagagagagagagagcaattcacagctttcggtcccctcacagatctttgcaccgggggcgtgaatgctggagaaaaagggttccggatcgcggaaatgtgaggctggcacaacgcattgttggttgccctggatccccctgttgcttcaaatttctcgcattattataggacagctatgtatgcccatctctcatacagttatccttccgctgcaccatgtgagataacgtcactcattccatcgtgtcagaagtggtgataattctgaaccttttgtccccgtatacatgatgttcttatggatcattcattcattcattgtactgcttcgggaacagtgcggtgatgaaatgggtcggttgacctgtaaaatactaaaatgtcgagctcaggagcgtgaacatcggaacatgcacagatggccccggatgctctagcctactaggaaactgtgtctatccaactagctactagctagacggctagacacatgcaacaggcgctctcaacacttcctcgaggcttgtgatttgtgacctcgagtacagaccgaacaggagataatctcggagcttgtggtacttta

SEQ ID NO: 25929 - DNA, 4148 bp, Zea Mays
actgatttgcagggcgtatgtgttggaaatgctcagctgctagtttttcctggtagatcatcaagtcttgagagcagttaaaacaaaccaatttttcctgcaagagctctacgtgctatggagacagcaaatacattttcctttggttcacttcaattttgacatgatgttgttatcttcctcaagccggctactagtgatatgctttcatcatggatgtgcttcacttgtttgggggaggcttctggtcttaaaaacaatgtgcaaaaaactagtgattttcctataaggtgtgaagattaatacttgatggtcattcaaggccttctgccatgcaacatcttgagcttgataggattgccaattagctacagaggtggaaggctaacttaataacaagggctagcaggagggtttgagtttagtttgtgctcataggaatgttgatctactttgctatgactactgacattcctccttgggttttcaaagcaattgataaaatcagacaaagatttctatggaggagaaggaaggatgccaaaggcgggcactgcctcgtggcgtggggaaaggtttgtcacccccttgagcttggcggccttggtatttcaagtcttctagagctatcttgggcactccgcatgagatggctttggctccaaaaaactgagtcaaataaaccatgggctgatttacctatccaagtcctagccaaagcctaggtgcttttttctattgctctgatttctaaggttggggacggcacatccaccctattctggactaatcgttggttgatggggcaaaatatcatggaagtggcaccaaggttgtttgctgcttgttcctaagagaattacaagaaggagaattgttcttgaagccctcactaatcatcactggattttggatgttcaagttgctttaacaattcaagtaattgtggattatatctagattcgggactgtctcagtcaggtggagttacagcagggggtggctgattctcacatccagttctcgcgtaatggaagatattcagccaaaatggcatatgcgggtttttttgttggctcggttccttttgaaccttatgagaagatttgatgttcatggccccttcctaaatataaatgttttctgtggttggtgacgcacaacagatactggatggcaggcaggctggcttgtagaggcctcccggtgcctgctgtgtgactaggaagatgaaacagtcagccatgtgcttctttcttgtatgtttgcgtgagaattttggttcaaaatcctaaggccttatggcctgcagacccttgcaccataatctgaaggtaggagtttctttctctggtggacgcaggctgaagagagaactaaggggttgacaagaaaaggtttcaactccctcgtcatcctgggagcttgaactctgtggaagatacgaaatggatgtctttgaaggcctctccccatcatatgatttcagcttctgctcactttggtgaagaaatagatttatggatgatggctcacgccaaaggattggtgttcctttcagccgtggctgaggattagtgggagtgcttgaagatggctttgttgccgtcaagaagttatactcgtatattgcaattgaagacgaaccatttcatcgtgaggttgattgtctaatgaatattaggcaccacaacatagtcttgtttgttggttactgtgctgaaacacaggaagtggttgtgcgtcaagaagggaaacatatttttgcggaaaaacgagaaagattactttgcttcgagtatttgcataatggaagccttcacaagcatctgacaggggttacatggcacccgagtacttggatgatggagtgatcacaatgaagacagacatctatagcttgggtgtgataatcagacacatggtgaagggacgtaactcggcagacaccactgatgaagaagtactggcaaactggttgattaggctggaaaaggatccatcacagatgatgaggcagcagacgacccgattattatttgaaacagagtacaaagagcaaataaaagcgtgcatggatatatcatggaggtgcacgctgcgtaaaccaatggacaggccaacgacgcagcacatcctacttacactggaggaaacagaagcaaagatcaaatcggtcgttgggcctactccaccaaatgccgggcagcttcagattgccaaatttgggccgtggggtggagatggagggaagacgcgagacataagaatgacgccttgccatttgcatagcgtaacaattagcagtggaactattatcgattctatcgggttttcattcactgatcactatggtcagcaccacacaacagggccttggggcggtaaggagggtacgaataagattgaactaggcccttcggagtttcttacaggagtatctggaacaagcggcccattcaaaaatctaacaaatgttgtaacgtcacttacgtttgtcaccaatactcgtagttacggaccctttggaaaagggcgaggaacaccgttccacatccaaacgcagaacaacggcaggatcgttggcttctttggccgttctggccagtatctctatgcgattggggtctacacgaaccaagatgctagggtcgcaaggatcgggcgacctttgggtggagatgaaggggttcttcatggcatcacagacctcagtgggcagcagcgcagcagaggtggaggtccatcgggagaatgtggagacagcgacgacgagcccaacggtgatttcgccaaattcggcccgtggggcggcgacggaggacagccgcaggacatcggaacactaccctgccgtctagacaggatcaagatcagcagtgggcttatcatcgactcgatcgagttctcgtacgctggccctgacagccagtaccgcaccgcaggcccttggggtggtcatggaggagacaacagctcttttcagctagctggttcagagttccttacaggtgtgtctgggtcaatcggcacattcaacggccatgcaaacgtcataacgtctctgacgttcgtcaccaacgctcgtagctacgggccgtttggaagagggcgaggcacatccttccacatcccagtgcagggcaatggctgcatcgtcggtttctttgggcgctccggacggtacctcaacgcgatcggtgtctacacggcgccgaaacccgaaccaaaagcagttgggaaacaagatggtggtgatgaggccgtcgtcgccaggattgggccttggggcggggttggaaatgctctccatgacatcgcagagaggccgcatcgcctgcacagagtgacgatcttcagcgggacgatcgtaaactcgctggagtatctgtacagcgatggcgacgggcagcagcacaccaccggtccgtggggcggctgcggaggaactggtcgaaagattcatcttgcccctgaagagttcatagtggaagttactgggacattccatccatgcgcgtgggacagaacaatacccagtgtcgtgtcctctctgacgctcgtgaccagcacgggcaaaacacacgggcctttcggaacgcagctgggagccgcgttccaggttccggtgcagagcgacagcaggatcgttggcttcttcgcccacggagacaattacatcgaagcaattggcgcctacgtgaagaaattgacagaatccagcaaccgttaactcttggaacaacttgcagctgttcacactgtttcttgggccattgctccttaaatttagtccagatggccaaggagcaaccaaacagaaatcgctatggcagggaagatggactaaactggactgtggcacctccagcatagcctgctcttagattagtgaccagacatcatcgagatatttcgatattataataaatgaggaacccatctcagatgtttatgttagctcctcagtttttgcttctgaatgattaatttagatcttccttatttttgcaataaatgaggattcttttctgtctcttctgaatggatacgaatcatgcatcacgtatcagtgcacctattgcagtgaggagatgaggacaaggtgctgacgaacttattgtcctgagctcccacttgagtttctg

SEQ ID NO: 25930 - DNA, 3489 bp, Zea Mays
actgaacagccccccggtcgctcctcctccctctaccctccagctccagccgccagccgccagccgcccacgcccggagcaccgccgcaacccgcagcgccgctcgcccggaggccggagcaccgccgctctccccgcacggagcaccgccgcgaccacgccgctgtccatccgccgctccgcgctccctccttcgaccttcgccttggttccgacgcggtgaccgtgcgctaaacccttcgaccttcgcccggaggcgggagcgcggcggaccggagtccggagcaaccgtgagacgagcaggggcggccggcgggcgcggatatttgggcgcaacaactttctgcccttccatttctccaactaagaaggaataggatgccaagagagtttctgcaaccccaatgaagatggcaccagctccgcctccggaggggactgcaattctgctaattcgtggagctcagagttctatcttaacggtgctgctagttatgcttgggtgttagtgctatggctactcattaccaagctgctaccttgattgcctctccgtcttacccaaatgccattgcttggtcaagtgacaatctcgtggctgtcgcatctggtcatattgtaactattctgaacccagctgcgcttgatggaccccgtggattggttggacttcgtcacagtgacccttttcctataggagtggttaagagagaagatctcttggagccatgtttattgcccacttccttagcgcgtgaaactgaaccatgtgcccgatcgatttcatggtctcaacaaggatttgcacctaactatgggtgtttgctggctgtttgcactgtgaatgatcatgtgaagctttaccgatcaccaatttgggagttatgtgatgaatgggtagagatatatcacagttgctgtttaactattataaaattataaacttcggagaggataatggttctcatttgacttcttcgaagaatacaaattctggggaggcagaagttttaggatctacttgtcgatcggaagaatctctttatttcaggggtcctggacagagaaaaataaagccagcaagagttggtggttttatttatgacggcaatgaagttgatttagatgcttcaaaggatgcagacttctcgatggaaccatgctcaaaatcaaagaagaaatctttgaaaaagactgtaaaacccagggatgaagtggttgctgtaaatggacgaaacagcacagggaatgttaaagcatcattgtcctccaatgaacaaaacaaatctcttcctcttatcacggcaaaacagtatgcctgtcgtgctgcacatttgtcttcccttgtagtttcatggtctccagttgtgtcattaagtgatagaacttcttgtttattgaggcattggtgcattcttgctgttggctctaaatctggaaatatttctttttggaaactatataagccagaatattacacaatagatgctggtgtggttaccagtgatccgatgctcatcggggttttgcatgctcatgaatcatgggtcaatgccataacttggcaagttctttctgcgggctcttcaaaatcctcgttgcttttagctactggatgctcagatggaagtgttaagatatggttagggaatattgaagggttaaatcaatgtgcaattggagaagaagtgccatttgtgttagttgctgaggttgccgctaatttatcagctccagtgtcgtcaatctcattgggcatacctgcccggtctcaacatgaggttagtttggcaattggaagagtatccgggttactagaaatatggatatggaatgcatctaccaacaaaattgagagttccagtgcatggcatgcacatgatcaagtggtttacgatgggctatcgatggcaattgtttattcagctgcagtcaggacaattctacacgttgttggatatctcacgaaaaccaccttgaagaattttttttgcattcagaattttcagagctaagggagtcagaagatctatcaaaagtttctgatcgatgctatggtcttacgctatcacctggagaagagataattgctgtggtccgcagtttggatctgaaccttttgaaccagatgtatcaagtcaggacacaaaaggcggtggtcgagttcatttggatcggtggccaatttgttggtattccactggacgggagtatcgatatttgcagtccgcagtctgcggacttatcctcaagtaaccttatgtggtggggatccaacatcttgtggtcgctgaagaaatacgaaaatgtcgaaaagaggcttgtgttgtgggacgttgtagctgcgctgcaagagctgaagaaaaccgcgcccgcctttctggagactctagtgcacagttgggcctcagctttatttgcgggcgactcacagtgtgtttctatcactgcccagtcatcacgctcgatgcatgacatgatgccccatgtcagctcgcggaagctgcacttactgaacataatctgcagaaaagtgatgctcggcaatcatgcgcggcatggtcctggtgctggaaacaacagtaatgatggaacaactgatttctggagcactcttttggtagcgagtgaaacggagctgcgagagaggctggtgggtttcacctttgccgcggtcgtgaaacggacagcgtgtctgttcaacggcacctccaccgcaaattgctggttccctgtcggcgtcgcccagatggattcttgggtatccatgaactacgaaaaggtgcacggtcagctgcagtcgatcagatcgaagatcaaagagctaggaagcaggatcgacggatactccgacgtagaaagctgcccctactgctcttcgccggtccgtttcgagtcgcctgacgtggccatctgcggagaaaggcacacgctgtcgcggtgcaggacatccatgaccctgtgctccgtcgcgcagccagtgtggcactgctcgtgctgcgggggcacggtcgacaagctgctgccggagtcgttcttcaccatgcctttggacgccgtccgtgacgacaaaggatcgctcgatctgtcggcagcctccgccccgctttgccccttctgcggcgtcctgctgcagaggtcgatgccggcgttcctgctctccacctcgccggtatagtcttcggatgcccccaggtgttacatgcagtagcaatgcaatgggaatatcgtagtggagccaactaccaagtttgttgtagctgatgctgtatggctgcagagtggcagtgccgtcattggggctcgaaatgtttgtgataggttttgtgacttctttctgcttagcccctctaatatatctcgagatacctattttttatttaccgtaccctgcctctggaccaaagcctatgtggcggtggccgccaggctgagtgcggggcgaggggcttgggccagctcctgcactcagcctgatgaccatgtccg

SEQ ID NO: 25931 - DNA, 2071 bp, Zea Mays
cctggctcagctcggataggcaaccaatcagacgctttctgaagttatggcgagaagaggcatgaatcctactgttagtgatcaagcaatccgcctggatctcattgccaaatcgagaggcatcgctgctgccgagaagtactttttggacctcccagaaacatccaagactcatcttacatatggcgctcttctcaattcttactgcaaagagttgatgactgagaaggccgagtcccttatggagaaaatgaaggagctcaactttgctttcactgccatgtccttcaacagcttaatgacgatgtacaccaaagtcaaccaagctgagaaggtccccagtatcattcaggacatgaaggcagatgacgtattgccagatgtctttacttataatgtttggatgagggcgcttgcagctctcaaggacataccaggggttgagagggtgattgaagagatgaaacgggatggccgtgttgctcctgattggacaacatacagcaacctggcttccatatatgttgaggctggaatgtttgagaaggcagaggctgctcttaaggagcttgagaagcggaacaccagcaatgacatcgaagcctaccagttccttattacattgtatgggcgtacacagaacttagtggaagttcaccgtgtctggcgatcgctgaagcgggataaccctagaatggcaaacatgagctaccttaacatgattcaggttttggccaacttgaaggacctgtctgctgccgaagcctgttttaaggagtgggaagcccgacacatccatccacccaagaccaacacaaagggctcgggggcagataatacacctggtgcagatccaaaatctccaagtaacccgcctaataatcagtctggcaccaaggaaaccggggacgagacagcagaggacctccagccgaagcatccaaaatatgacatccgggtagcaaacgctatgatcaaggcgtacattaccgagggcatgcttgacaaagctgtcgccatgaagaagcgtgccaagatgcgcggcggaaggctgaacgccaagacatgggagatcttcatggagcattacctcaagacgggggatctcaagatggcccattggtgcgcggaccgcgcgatgaagaaggggcacagcagcggcaggatttgggtgccgccgcccgccgtgacggagaccctgatgagctacttcgaggagaacaaggacgtcgatggggccgagcggtacgtgggggctctgaagaaggtgcagaaggatctgggcgcaccggtgttcgagccgctggtgcggacgtacgctgccgccgggaagaagttccccgggatgcggcagcggctgaagatcgagaacgtggaggtcggggaggggacggcccagctgcttgactctatctgcgccgatcaataggtggttttcttttgtcctcgccgtttgtgtttgtctcaataacagcaggaccgtttcgagcgctcggctatttgctctgcaagcgctgtgatgcctgtatgtactctgaaatccggccaacgtttctgttcttttcgacatcatcagcccaagcacgtcctagaggcggtggcagcgttggtggcggctgctatgcgatgggggcaccacctccgttgatgtattgtctggtgcgggactgcgagtgacctctgaggcgggggcggagaataactggatctacctaacgtcggaatggagacctgcaggtccatttgaaattaaacagaaggttggtaagagtgtgatggtgctcattttgcgttttagaggatccatacttgcatgtagccaaagaaactattttagtaccttttttccttgtactttttttttgtcttattgctttgcctggagctacttgaaatgctccacagttatgtcctctttttaactgagatgtcgttggcctgaacaaaggatgcttgacgcttcgaagtcacacgcaatgataaattcagtttgcagcatcgcgatgcatttggacgctcattttactccttgaaagctgatactaagtgtcacgcgatacctattacgata

SEQ ID NO: 25932 - DNA, 1843 bp, Zea Mays
cactctgggtcctggtcttctcagcccattcccaccggccagtcggccacccaccgtgcctcgtcgtcgccgcagcccgcacctgcagccgccatgtggaggggcggcgccaccaccgccttcgtcgctagggccctccgctcgcgcctcctcctcgaccccatccaccacccggtcacgtcgctcgctcctatttcttcggcgcgtacctcttcctcttccacctcgtccactgccgcggcgaacaccatcgtggaagaagcggcggtggcggcggctgtatccgtttcgcagcataccggatccatctccgacgcgctacggcactatgggaagtgctaccgggagctctcgaaagtccgcctcaggttcagtgaatcttgtgattcaggattcaaccttgcctactaattttgggccccttgtaactgatgactgaagatataatttctaatatcgatccaacattcgtatttagtgctcttgttgtggcaacttcgggggctggttatgtgcttggtagtggcaacatcgtggatattgctggactttgttgcacatgtgctggtacaatgatggttgcagcatctgcaaataccctcaaccaggtgttcgagataaaaaatgatgctaaaatgaaaaggacaatgcgacgtcccctgccatctggtcgcatcagtcctgcacatgctgcaatgtgggctacaagtgttggagttgcaggaacagctttgttggcctggaaggctaatggcttggcagctgggcttgcagcttctaaccttgttctgtacgcatttgtttatacgccgttgaagcaaatacaccctgttaatacatgggttggggcaatcgttggtgccattccaccacttttggggtgggcggcagcttcaactgaactgtcactaaatgccatgatactccctgccgcattgtactattggcaaatacctcattttatggctcttgcgtacttatgtcgaaacgattaccttgctggagggtatcgaatgttttcttttgctgatccaactggtaaaagaactgcatgggtgtcgctaagaaattgtctgtacatgctacctttgggtttatttgcatacaactggggcctcacatctgagtggtttagttttgaagcttcactcctaacattaggccttaccattggatctctatcatttgtgctgaaaccaagtccaaagactgcgaggagaatgttctatggtagcctgctgtatctccctgccttcatggctgggcttctgttgcatcggctgccaaatgaacaaaaggcgcacaacttggctgagaaaagtgaactggacggagttctgtacggggccgatctgcaggacaaagaaagagccacacagaaacgccaagacaggaatccttccagcatgcaatcacgccctccggttgcatatgcttctgtggctccattccctttcctaccggtgcccatatatgactcatgaaaagtttccctggttcttcctgcagcagtgggacagtcagagcaatgtattcatgcacttttggcttacatgaatttctgccaccaagagttctttggtgcgtctgttgttaaaattataggatagttttttaatggattgagctttttgcggctcacctaaaagtaaaaaaaaagtgctgtggacactcgttctgatgcctcgggtaacacggatatgctgatgtactcttgtgcttttcttgtaagattcgatgtccggaaacatgcaataattgaccgtagacagaagtaacatggtaatggacatttagggcgtgtttggtttgaggaatgaagtgatttatcttcttctcactt

SEQ ID NO: 25933 - DNA, 2429 bp, Zea Mays
gaaaccgctgccagtgtcagtatttcaaaaatgtccatcccgtacggtcagccgacttgcccctttggcctctgtgttcgtacttcgctcggcagaaacctcttgctccagggggcgaacgcgccgccgcctccgacagccccctccagccgcgtcaaatcagcgccctcctctgctgcgccggcggtctcccgccgcaaagacgaagccccgcactcccttatcgcagatccgtgcccgccgccatgacggagtattgggtgagccaaggaaacaaatggtgcgacttctgtaagatttatatagcaaacaattccttcagcatcaggacacatgaacttggtaagcgccacaaggacaatgtcaccaaacgactgtcaacaatgcaaaaagagagtgagacaaaggaaaaggaacagcagcaagctgcacgagccctacagcagatagaagcaaaagctaaaaagagttatcaaaaagatttagagaataaccagaggaatgttgatggagacacttctgcagcacctggagatggttgtgtatggctttactaatttatatatatcaataattcagtacattctctagtaccctattacgatgcatggtctgtacatgctgtgtctgtgctcatctttgacctgtaattctgtatagagtgcacccacatcgaggatcacgatcatcttcttttttttcttaacttgagtgcttattagcttgctatattactcttatgcttagtaaccaagtttctagatcgattggatcgaggaacgggaacgtggtatgtggctactaaagcaaggttttaacactacgggaacgagattgttctcattttcccggaacggaacaaacgttcctggaacgaggaatgtggccaagttccacgttcctggtttctaagcttatatgttccagttcttttctccaccactgtcactagctcctaactaatatattttcaggggtggaggaacagcaggtgctccccagggccttattcagctaaaatacattaccaagcaccccacttctagtattcctggctccacccctgtatattttggacttcttcccatcgagctaaaacagccagacttgcattggtgaaccaaaaaatcctgataattagctggactgtatcagttttttaaggcctggcttatttgatctacaacttatgtaactacatatcaataattatgtatcagttttcaaatcctgacattacattctgctggcctgtaactacatacttgctttgctgctttctgttttcttattccaagctaaatgttttgtttatcaattgccaatcttgatatgttgggtagaagctagattagtgggtattaatgactatgtgcaagtacaagcaacccatttttgattattctcctgagtcctatgaattatgaagcattatttgcataaacttgatcatatgttaactagaacaaaacattttatctgaatgttctcacttttgctgacatatctccaaatcttgtttctgcaggatgggtgcttgactcggcgtcaggatattaccatgacaaatctactggactttactacgattcaaactctggcttctattattctgacagtttaggcaagtgggttacccaagaagaggcgtacaagtctgtgcaagcttcgaaatcagacgctggccaatcctcagcttcacaaacaaaagctcctgctgccgcagaaacagctgtccccgcgattaaaggaggtgcagctccaggccgggtggtaacgaaaccgttgaacccaatgagaccgattaagggcactcctgctccgtctgctgttgctgttaacaagaggaagagggatgacggcaagcccaaggcggtctccaaggaggaggaagcggccctcaaagcgcgggaagcagcaaggaagagagtggaggatagagagaagccgctgatgggattatacaagacgtactgatatcttgtccttgccagactgctactactcttcctccatgcatacgggtttgccaattacagtgtgatgttgtaaaataaatttttttaaaaaatctaaccgaacgcatcattcgcagaaggaatgccggtaatggtgtggcactggatttcagagcttttctgcatcagcaatgtgtgtccacacggtgtaatacctcatcagtggttcttgagtgaatcaagttccaatttgaatcttgtacaaggatatgttcattgttttttttacgcggatggagtgtcgtactcgtaccatatcatatactgcgaaatgaggatgtggtgaccgttctcgagatgttcaatagtgtgtttctgtcctcgacaacggagacagtattgaccagtatctgactgaacaaaagcgcttccggaaaattaattaagaaaagaataaccgtgtccgggctc

SEQ ID NO: 25934 - DNA, 3950 bp, Zea Mays
atggcctcggatccaaccagggaaggaaggaatccaagccaccccagtccgctgcttccattccatctcccttctctcgccttctgcggcactgcagtgctctgctgcctcggcgtctccacctcctcccggcgacggcagggcatccgatacgacgccgcgcttccttccgaatcccaagccgcaccccgcaccctcccggtcgccattcccgatgctggtgttctcgagcgacgacgactgctgcggctcctcgtactaggggggcaggatcgatcggcaggtgacgtttcgttcgttctgctgttcggttcgaacgggagagtttgcttgggggttggtgcatcggtttcagaacgaccagttcattagttttggggattggggctatttcttgttttttttaaggcaggagagttgcttttcattctacgtattcgagagatgaaaaaaaagtgttttttgggctagttttgttccaatgatttggtagcaattaccatggcagttgcacgaaagggattcatgtactgggtctgaacggtttcatggcgatgcagtttccatcaccaaattcaccgtgagatgtctggtactcgttgtgactaactcagtaggcagtctgtcagttaagccaggtaaactagttactagtacttgacattgccactgtattttttgtaattactagtaccatttgatgagaagtggtactgagttttatgtgggtagacgaacgatgtcatcgcactcccttctcagtgtcaacgatcatgggtggcatgacctgtgggctgtggagggcggtcccggtccccttcgtttggcttatctggaaaatgctggttgcgcgtcaaggccatcttgaaccttggaaaaacgctgctgtgtctatctttcctgccttcctggttccgtccgtgctgtgctgacatgcgtgtcgaattctcgctcatttggttaccggtagtggggtcatgtcggatattgatgtggaagggggagttggtagtggcaccccctccgcctcggacctggcttcttctgataccggctctggagctgggtaatagagcgcagactttgggtctggaaagcgattgtggttatcgttacgacaagtatgctaggtcaaaactgtttttgtatgtagttggttcacagatgccaagggccgatttatttgtttgtttgttgctcatgttgatgttctgagcataccatttttcagatgtttatatttcatatctgataaagtttataagtttattgtcgtcattaagatgggttaagaaggatgcctgctgtgttttaggatgaggctccatttggaagtcaatagtgcaacactgctcattccaatgatatacccccactacaaacagacacttggtcataattggctttcgcacattcatattcaatgtctcaaacttgttattacgattctgcggatggtctgacaaaaccctgggcatagtgtgattattgacactaatattagttccaaagcatttcattgagtaaaaagaaataatcattctcaatatgtccagactcgcagaactataggatatcacagaacagttcttgaggtacttattgcagcctaatagtacatggagcgatattcagatatgagaccaaaggcagaagtttcatatctcggaaggggttccagattctcttctagaaatcaaagttcagaagagaggactaaccatagcagcgataaaccgggaagcagcacaagattcaatcctacgaaagcgagaattggcggtaatcaagggaggccaagatatgtatgcgattcatttaaatctccaagctcaaaggtgtcgcctgcaggctcttccaaatttccacttagcaagtttgaggagaggcgaagacagccttttgtgccagggtttgacattgctgaaagtagtagaagaaaggctgatgccaagcagctacagggtagtaagaaaattgctgcagagaacgacagttcagacaatctgcgaggtgaatcagaaggttttactactgaacaagtagtaaaaccagaaggctctcatgttgtcggtcattcaggtgtttctgcgtatacagtcgggtccctggtccaaactgcttcactaggttctaggacacacagacagaaacacaaagaagtgaatttgggtactccaggagcatcgtcttcaactctgactaacaggtctactatacctggaaattctaccatgggtgtgaggccagcttatggtcatgttaatggagggcagatacatggtcttaaaaaccttggttgttcttcggtacctgatgctcagccatcaggttgcccatctgagtctgttattagtaggaggaggtttgagttcatgagaaagagggcctttgaccaggaaagctcttccagatcagtgaacttaagcttaggtcattcaactcctacagatattcgcagaatcagaatgaatgaacaatcactttgtcaacaaataccacgaagcagcagcagaagccatcaggaatcggcaggttcagttaggacaagacgaccttctcctcatgccactaggatgagtgttcctgatggaagagcagatggcgtgctttctctgcacgagtcatccacaaaggatgtacagccagctcaggaacatctttcattggaagaagtctccactgagagttcaataaggccattctttgtggaatttgataataacattttctcgtctagtcatcttcgtcgctcgagtactcgagctgaaaggggaagaccaagctccctttttgaagaaagtcctcgacaaatgttccatagtctcatgggggagagggacagacatagacacataaccatggaaggaattacagaggttttggctgcattggagaggattgaacagcaagcagagctgacctatgatcaattgctaatgctggaggctaatctattttttggcgcctttgcctcctatgatcggcatagagacatgcggatggatattgatgatatgtcctatgaggaattattggccctggaggagagaataggctctgtgagcacagctctttcagaggagcagttcacaaaatgcctcaaaagaagcatatatagtcaggtcgctctagaagtgaacaaatcaaccgttgatgacatgaaatgcatcatctgtcaggaagagtacgcggagggcgaagaggttgggaggctgccatgcgagcaccggtaccatgtgtgctgcataggccagtggcttgggcagaagaactggtgtccagtatgcaaagcgtctgccgtgccttccaagggctgaagcattggggatgctggaaaccccgttccggattacaaaccatccttgcttttgtctacgtacattgttcttttccctatatgcattagatatagatcatgtctagatgtatgacgctagaacagcttgcgatttgggaggaagctaagagagtaatagttagctggttaataatagttcatagctaatatttgctagataactattacttggctacctattagctgtgcctttcacattgtggtacaggacaaatgcttgtcagatcgtgaacaaccttataacttgatgaatggcctaagtcaaagaggaatatgttgtgccaatctcaaccctatgctctcttcgtgtagtctgggtgtgtttggttgcgggacagtcaagaaagggacgttccctgacgttctctctcgtctttctgattttgagggataactggggataacactgtaatagttctgtttcaacccttgatcttgaactaaacaaccttatttgagggatcatctcatcttatctcgtcctgtcattacaaccaatcttgttagaaaataaaaaatgcggtagagatggtatcatagtagttgtacataagacagttcaatctattgtatagatttttgattaggc

SEQ ID NO: 25935 - DNA, 2507 bp, Zea Mays
caccaaaccgcggagaaatttagatgcacaccgcccccgagttgtagttgtagccgactataaatagttgggggctgggagggcgagctcctcactgccaaccacacgttcccaagccagccattggttggtagcaagccaagctaatcaagctagctttagatacccgctcccgctcttcttccctccgacgaagtcagctgacgatatatacagcaggctagcttcggagttcggggcactcagcgatggccattgccggcgctcttctcctcctgctcggactcctcgcgcgggaggccgctgccggcgggtggcagagcgcgcacgccacgttctacggcggcggggacgcgtccggcacaatgggcggcgcctgcgggtacggcaacctgtacagcacggggtacggcacgagcacggcggcgctgagcacggcgctgttcaacgacggcgcggcgtgcgggtcctgctacgagctgcggtgcgacaacgacgggcggtggtgcctgccgggcaccatcaccgtcacggccaccaacttctgcccgcccaactacggcctccccagcgacgacggcggctggtgcaacccgccgcgcccgcacttcgacatggccgagccggccttcctccgcatcgcgcagtaccgcgccggcatcgtgcccgtcgcgttcaggaggtacttcagttgctcttcacatgctgtgctgcctgcgactcggcggtggtcacgcacactgcactgcactgcacacgtgacacatgcacgccggcccccagctgctacgacggctcgcaccaccaccacctacgtcctggctcgatcaattcgatttcaaaacgacccaaacgcgtcggacgtcggttcgaaggttggtgggcccggagcctaagttcggcccattagtttagtgggccaccctgcagatttgatacgggcgtggggataggctagtctgtggctgcagctgcagctgcagctgcaggcggcgcgcatgtgccctcagccctgccactgctgccagtgtcgcacctcgctcccataccaactctcggccgtcccaacccagtaaaacctcagtcacgcacgcacgtacgtagtgaccgttatttgcatgtgacgcgctgacctacgtagacagtaccagcaccgacgatttacttaatgttgttatatagctaacgtcgtataacttgccaacgctcgatcccattagctaacgtcgttcttaacccgacattaattaatctacatgtctatggcgcagagtgccgtgcgtgaagaagggcggcatccggttcaccatcaacgggcactcctacttcaacctggtgctggtgaccaacgtggcgggcgccggcgacgtgcgctccgtctccatccggggctcccgcacggggtggcagcccatgtcccggaactggggccagaactggcagagcaactcgtacctggacaggcaggcgctctcgttccaggtcaccgccagcgacggccgcaccgtcaccagcaacggcgccgtccccgctggctggcagttcggccagaccttcgagggcggccagttctgaggatgaacagctagcgcgcgcgcggctagctattggataattagttacggtactgtcgatttgtttgtttttttttttttttttgcgcgtgatgatcgagtgcatgcaagagaaagagacgacgaggagaacgacgaagacgaagacgaagcctctctccgggtatattgaaggaaggagaaggctttgcgcgcgctatgctgaggctgctaatctagcacccgcctagacgtttcccttttctcttctctggtggattacggactggatcggaccaaagatcgatccagctcctagtactaataatatagttgtacttgagaaaaatgaaataattgtaatttattgtttttttggggacctttgatattattgtactcgcgcgcgccggccttgcgtggaaattgaagttcgcaataaggccggccgccggcttttattcagcgtgccctctcgtcccttcagtagcttctggtgtgtagcagcgcggtggtgacttttggtgtttgctagggtgtaagtaacgccaccacgtacgtatcttcgcacatgggtggggcaagcatgtcctgtgtgctgacttgaattcccgcggccgcgaccggtgtcggctgcgtctgccggtgtggaatgcagccgtcgtgcactagcactactggtcctcttcagtagcctctattgacttattgagaagctagcttgtgtgcatcatccgtagatttgcttacccacggttcattacccctttctctgcgctgctgggcctgcctgtctgatgtgatgcatctctcgggcgacgcgcttactttgatcgacgttctgttcaggcttctctgtctctaactctctctatgtatatactccttccgtccctcaaatatcaatgtatgtgttatatatctatatatgtctatatttattctcatttattt

SEQ ID NO: 25936 - DNA, 1261 bp, Zea Mays
atgatgggatggaatggaacacagcggtgtaccaccataaccaccagtcaacggaatgtgtgcgggggtgcttttcattgcccttgctccctccagatgcggccggtgacccgcagcttgagctcctgcctgccgccgcccgagaagaagagcgccatgttcctgtggatgatgagcccgtcgaagctgtcccgcaccttccggtggctgtccctgacgctccgcggcgtgccctgccacgtcagcttccgcccgcccccgcccacctccaggctgtacccgaacccctgcgcctcgctctcctcgcccatgaaccgcaggaacgccatgtacaccggcgccatccccagcacgaacgcctcgaagtgcaggcagaagtgctgcccgaaacacttgaaaacctgcatgtatcaaacacaagtcacaagtgtgtgatcacattcagaaaaaaacaagacgtctcagaagtaagtttattagttaggaagatcgctatgcaggtcactttagtcaaatgcatatatctaccatacagatataatccagatcaaataaccagcaaaattccccatgtatctaaacctaagcacgaacagaactcgtcattctacttacagtgagcatccacgtggcattctccacctcgtacgggttgggcttcacgtaccggtggttgaacgtgcagccctcgtgcaagtccaccttatggtcgttgatgagatgggacaccaggaacgggacgtcgcctgcgatcaggcactcggaacctgcgtacgggcagctgtacggcctgaacctgcagagctcctcgtgcttcagtttgctcttgtatgggtggatctcggtgcatcccgtgctctggtacttgcacggaagctggagttgctctgccaccttctcgagagctaggcacctgatgtttcccagttcctggcgacaggttgggcaatggttctctaccctgtgcttgcaactagagcagatcgtgtggccatttgggcactggagtataggtgggcgcatcgagttggtacacactgggcattcgagcaaatcattcaagccacacagcgacgacaatgcaacattggctagcgatgccgatgtagaccacggtttacttgcagagtctacgtcaagcatgatacccccaagtgattcagaaagcccatcgtcatctccacagtccgactcggggactacagtcacaatgctgcttcccggtgccattgtaaaaagctcctttcaggtccggaagtag

SEQ ID NO: 25937 - DNA, 1712 bp, Zea Mays
gatttaacagaacatcccatttctcgtgcggccaaggcccagtccgatgactctggccaaggcccagtccgatgactctggccctataactctgagccccatcggagactcggagtcgggggcgccagcgtctcgcctcgccgtcagcagcagcagcagctgcacctccattccacggcttccgtcgtgcgcttcgtctgcacccacaaaggcgacggcgacggcagggggaggagatgaagctgaagcagctggagggcctcttgggtggcctgacccagttctccgaccccaagctggagctggagcagtatgcgacgggccctcacatcgcgtcgcggatgctctacatggcagagaatagtttcaatgacataactggcaaagtggtagctgacttcggctgtggctgtggcactctggctgtggcgagtgctttactggatgctgagtgagtatgtttaacttggtagttttaagtaaccatgttctttcctgtgacaatccctctattgcgtaatgtctacttcaatattttaaaacaaaaaaacttcctgtttagtgcttatgtttgtaattttgcacagtttgtttgctgattgatctaacaaaaagtggcttcctctgcaattgtgtcctggtagattgtgtctattcttttttgttagtatttttttagggaatcaggaggggctgacccctattataaatttatataaagaacagaacaagctccaaatgagttttaggaaacaaaaaaggtaacaaacatagtaattgtacacatgtcttgcaggtgaagctaaaataaagagtagaattccatgtcataaaatgattttagatagtgcgtaattcttttaaatgctcattgatatatatgtaaccataaattaatgggtatcaccagtttggtggctagtttccttatcatccatttataatgtgaattgctatggttgtgattcacagacatgttcttggtattgatattgacccgactatcacttgaacttgctcaagaaaatgctgctgatctggagctggacatcgatttagtttggtctgacataaagaacttaaatctgaaaggcgtccatgttgatactgttgtcatgaatcctccctttggtacacgaaggaatggagcagacatggagttcctctctatggccttgcaggttgcttctcaagctgtctattctctacacaagacttccactagagaacatatcaagaaggcagccttgcgtggcttcaatgccatcagtgcggaggttctatgcgagctgcgttacaatctaccgcggacgtacaagttgcacaagaaaaaagagatcgacattgcagtcgatctgtggcgctttgttcctaacgcccaacgccgcagctagcgcgctcgctatgggccgaggggcacaggtgatggaatggaactgaacatgaatggaaaatgatcaaatggatatgtgtctcaaaaggctggacttgatcgaagagatcccaagcgtcacgcttgctgtgcttatcgtcttcttggtgccagtaagggtagctcagaatttgacgaactgtgtagagttttgtgggcacagatgatgctcccagtagtgtgcacaatgaatgctttgtatgtattgtgctctattgcctgtgctaacgctacagaataatatttacaattaatttggtgatcagtcagtggcgccgca

SEQ ID NO: 25938 - DNA, 1485 bp, Zea Mays
gttttggtgtgcatatgaagtaggctagttgggatttcaaccctcaatgcttcaaattgtttcataaaaaaactcgatatatgggggtacgacagcctccgagcattgcattaagaagaagaccttacacaggttaagaaaacccctaagctcctgctctatccatacccaacaacactgtagcccatatgagaacaaccacgtctggggccaaaccttaaacttgtgctttgatgcgagacaagcgaggggatttttctaattctaacatgaaaattcgctcccacaggaagtcaaacacaggtggacctgaggtgtgttactaaggccgtctaaacaactcaactagaggctctttcacatttggatcctcaaatttactccgctgatttgattggatgtaccacatttcatatatgcttcatgagttcatagtaacatattatgcttatctccttagggcagaaaaatttctagtgaagagaccattccctagaattctgtgatgactgatgtgctgttcttttttcatccttcatgtcctatgtgtagtgtaggtgacaatgtgatattataactagatcaaaatgggtttacctgggggcaaggcgacaacattttcaggatgaagatgaactaattgataagtttttacgtgaatgttaattaagattaatacttccaattataatttcaggagagagagattccagtgctggtattttctgcaggacttgcagacataattgaagaggtcttccggcagaaattacacaaaacattcaagaacatcaaggttgtctccaacaggatggtgtttaatgaagaaggccgcctcatagcatttaaagggaaaacaattcacgttctaaacaaaaatgagcatgccttggacatggctgctccagtgcatggcaatccgggggatccaaacggatctatggatgactattcattggtgaagaaaaggaccaatgtgctgctacttggcgatcacattggggacttggggatgtctgatggtttaaactatgacaacaggatcgctgttggattcctgaacgccaacatcgagaaatctttgaaggattactctagcgcgtttgacattgtatatctgaacgatgctccgatgcacggagttgtgcaacttgtgtctgaattatgtccataatccagtgatcttcgaatcgcccctcagaaaaaaagtatatcttcccatcaactttgcagctaccgaagttcgctcacctggaaatgtaaggattccactcttgctaactagggcttgcttcatgagcagctgttctataggctcatttcagggctaaagagcccttggaacaatgttttttagcactagtgcattcaaacacccactgtagatattttctcctcctcttccaattcgaaagatccgtgaatgtttttttctgggctgtggagtgaatctggtctttgctgcgttctggcgctagacccaag

SEQ ID NO: 25939 - DNA, 1210 bp, Zea Mays
ccgatggggaagtacatgaggaagcgcaagcgcaacgtggggaggacgacgccggccgcggagcacggcgtgaggacgcgtgcccaatccgacgccgtcgcgagcacagcttctgcggcggcggcggcggcgcccaagaggccgaggaagcagacgacggcggcagtgactgggaacaccagcggggcagcggcgccagggtcctgctacctgcacctgcggaccaggaggctgcagttcctgcccgggggtgagggcgaggtgcagcgtccggtgccgccgttgcctgcggcggcggcacagcggtcgtcgtctgtagcttccggggagccggtggagggtgccgggagctcgaggtgctccagcacggcgtcgtcttcggtggacgtcgtcgtcctggcggtggcaccggctagcgagaggggcggcggtgaagcggaggaggcacgcaacgacgacgacgactactgcggcgacgtcgagagcgtcgtcagcgactcggccgagtgctgccgccgcgacaggaggagggagacgacgccgtcgagccaggcacgggtagatcgtccctgcagcgacgaggagtgcagccaggccgcagacggcccaacgcgccaccgtcggcgacggaaggctttggcggccaccgcgacagccgcggtcgcttgcagagcgagggcgacgccaccggcagaagagatcgagcagttcttcgcggccgcggagaaggcccaggccgagcgcttcgcagccaagtacaatttcgacgtcgcacgcgggctgccgctcggcgccggccggtacgaatggaccccggtagccagcggttggtgacgacgcacgtgcgcgtgcgcgccggccggaaagctagcggcggtggcgcagaagaatgagtagctaggaggaaggagacgccactgggaaagtgggacgagcgtacagacgataaaaggactgaaggagagcagagacagagcattttcacagcagtagctgtagctccccccctgttttgttcagaattctgctggtgagtgtaactcctgcttctgcacagccggcattcaatatgtccagtacagttccacatcagctgacgccgccacgacagttttaccacaccgtcaccttgtttttgctgacaacgcctcggtacctcgcagtctttttgttgctttcctaccaactctctgtctctcaagcaaacgaa

SEQ ID NO: 25940 - DNA, 2901 bp, Zea Mays
cagaatcccaaatttctcccagggatcagaaaaaaaaaactgccggcaaaaacaaattgtacaatctcctcgcggcggacgatgctaggtggtcgatgctgcgctcgcggtgtgtccgactgcccgagccaatgccggagccccagtcctctgtggcgtcaagcggaagcgtagatcgcctccgcaacgccttcggcggagtgctgtgcatcttcaccctccttctcatcggcgtcctcgccttctccatccgactattctccgtgatcaaatacgaaagcgtcatccacgagttcgatccctacttcaattaccgcgttacccagttcttgtcaaagaatggcatatatgaattctggaactggtttgatgaccgaacatggtatcctcttgggcgtgttattggtggcactgtctatcctggtttgacacttactgctggtacaatatggtggttgttgaattcccttaacatcccattgtcggtggagactgtctgtgtattcactgctccagttttctcagtcaatgcgtcctgggcaacttacctattaaccaaggaaacaaagggccccggtgctggtttgatggcagcaactattctagcaatggtcccatcatacatctcaagatctgttgctggcagctacgataatgaagctgtagctatatttgctttaatattcacattttatctatatgtaaagacactaaacactggatcactcttttatgcggcacttaattctctctcgtacttctacatggtttgttcttggggaggctacacattcatcatcaatcttatcccaatgcatgttctcttgtgtattgtgactggtcgttactcttcacgactttatattgcttatgctccccttgttgtgcttggaacacttctggcagcatcggtacctgttgttggttttaatgcagtaatgacgtcagagcactttgcatcatttctggtgtttataatcctccatgtggttgctcttgtttattacatcaaaggacttttaactccccgactgttcaaagtggccatgacatttgttataaccgttggattggctgtttgttttgctgctgcagcaatactcattgcattgattgcatctagcccaacaaaaggctggagtggtcgcagtttgagtctgctggatccaacctatgcaagcaagtacatccctataattgctagtgtgagcgaacaccaaccaccaacctggccttcttattttatggatatcaatgtgcttgcctttttagttcctgctgggatcgtatcatgcttcttaccattatctgatgcaagctcatttttggtcctgtacttggtaacctcagtgtatttctctggagtaatggtccgacttatgctggtccttgctcctgctgcatgcattttgtctgggattgctctgtctgaagcttttggtgtccttacaagatcaatgaaatttcagcgtccaacactggatgatggctcttttacagccggggatgggagttctgatactcctacgaactctgaaatgggtttgaaggaaaaaacatccaagaaaaatcggaagaaagacaaagagtcagagggaagttcacctgttgatcatagaaccgaagaaaagcttttagtactgccttgtgggccatctgctgtgggcataatgctgctgaccatactttctggtttttacgtgatccattgtgtgtgggctgctgcagaagcatattcagcaccttcaattgtgctaacatctcgttcacatgatgggtttcatgtttttgatgatttccgcgaagcttatggatggctgcgccataacacagatgcagatgacaaggttgcatcttggtgggactatggttatcagacaactgcaatggcaaacagaactgttattgtggacaataatacatggaataacacgcacattgcaacagttgggactgcaatggcatctccagaaaaagtagcatgggagatcttcaattctttagatgtcaaatatgtgcttgttatctttggagggcttattggctacccaagtgatgatattaataagttcctctggatggttcgaatcggaggtggtgtattccctcaaataaaggaagcagattaccttaaggatggcaactaccgtgttgatgctcatagtaccccaaccatgttgaattccctcatgtacaagctttgctattacagattcgtcgaaactgatggtaagggctttgatagagtgagaagatatgaaatagggaagaaacattttaaacttacgcattttgaggaggttttcacaactcaccattggctggttcggatttacaaactgaaacctcagaagaacagagtcagagggaaactgaaatttaaatctagtttaaaagcaagttttatgcgtaaaactggtggaaagaagagcccatggaaatagagactacaaaggcagggtgctggagtcactagtcagcacagttactatcctgagaaaaccatgaattcatcaaaaggagttagattaaaagcatagcattggtgtgttctttgttattgtcatggagcagattataggggtgcttcatgttttttttggcatttgatctccttaatggcattataggggtctgatgaaatttgtggtaggttctcgagtgaggttttatccccattttaaacaaaatggactttgtttataggaacctgactgagcgcctggccgtttggaaacatctttaaaggttgtttggtttgaagaaatggtggcctatcttttcttttaggctaccttttggaaggaaggattttttcccctatttcctgcattttttctgtaaaaatgaaatgattgtgaaatgtcaaatacgattctgtggaagttctgctttccaaga

SEQ ID NO: 25941 - DNA, 2551 bp, Zea Mays
actgcagttgctctaagaggcgctggcgcggatacagtcacaccttgtctcctcggctcctggctcctgttggacgccactcgccaccccactttccaaaccagaccacagccgaaaacccccgatcatgccgccgccggtcgaaccctacatcccttcgttcaccgccggcttgtccgcgcacgaggccgccgatgccgacaaagactacctctacttcctccgccacgtccgcctcgacggagacgcctacacggtcgtgattccgtccaaggacggcgcctcctgtcctccccagatcatcaggtacgaacaaccgcactccgatcacaatgccggggcccccgtcgcgggctctgaatgcgggagacaaagggcccatcccccgtcggaggagaactcttgggctacgggtgaggccgccccacacggcgtgaagcgcaaggttccaggcgcgagccccgccggcgaggtccgaagcggtgctgtccgtatggaagaggacaccccgacattggtggcgaagtccgcgtggtatgacttgcaacccgacatcgacgatgactaccgcttcttcctccagaatgctcgcgtggtgaatgacaaattggtgttcaagacggggaactgttcaataactatcggggaccatagtgatgctgaggagcacgacgacaccgaggaggaagagaaagaggaggaaggggaaggggaagaggatgatgaagaagaagcagacgaccttcctgcgtcagggcagtcgggggaggacggtatcggtatggaggaggccggtcctgtgtcagagacagaggacggtgttgactcggatttgccaattccaaaggtctttgagctagtttagcaaaaaatcgtgctatttccgtttcttgtgaagttcgttctaaactcctgataccaaccctttctttgccttgtgacttttgtaaaggaaatttagatctataccattaaaagattacaactttagatgtatatcattgatatctcacttacacgtgggatccacataagtcaatgacatgtggatatctaaagttgtaatcttttaatggtatagatccaattattcctttttgtaacacgtcttgcttataaagggagaaaattggatttctgccattatgaagcttaggattcgctcaaatgccactatgtgaacacgcttcgctaaaaaaccattatgaatcatatgcttacagacaaaatgccatttagggggttatctgaaacataaacttcttttactaaactgactggatgcttgtgcccctggcgacataatcgctgtcgctcatggatcggtccggttccagctgccaggttttcttcaggctctgctctatgcggttgggttagggaaaggagcgatacccactgctgctgcggtgaattgggtgctgaaagatggcctcgggtaccttagcaagatcatgttgtccaaattcggacgccattttgatgttaaccccaaagggtggcgactgtttgctgattttctggagattctgactccagtgttccctcacctgtttgttccagttggggtggctgctggtgctggccgctcagcagcttctttgatacaggctaagacttactttagtattgattatcaatattctatagtctgcatttatggaaatctatgctcattatagcgcaacataggtgttctgccttgtgtatctcggtatcctcataattggtagccatatgaacatgagacttatgatatggccactagaagatgtatgactatctgaagattttcatagcatgtttatactttatactcacctgagcgacggcgattatggccaggggcacaagcgtccagtcagtttagtaaaagaagtttatgtttcaaataaccctctaaatggtattttgtctgtaagcatatgattgataatggtctcttagcgaagcgtgttcacataatgacatttgagcgaatcctaagtttcataatggcagaaatccaattttcttttgtaaaggtgaaggatgaagtggtgagcaaaaatgaagaggatgatgtggggcctggatcagatttgcatattactaacgatcaggtgtattgtgagacggagaaggtgaaagaaggaggagggaatacgttgaatgatctagccaggagaacaacagatttggatcctttggacaagaaggaagcaagctcaagcaagggacatctggccatgcctctcaatccttcggaattacaaggcgttatatggcccccacatatcaatgagaggccaaattcagtttttaaagagaagttgattgagtttctcatcaaaccatttacacaggaagaatatgataggtattttgctctggctagtgatcgcattccaatggtcaaagaacgaaggacccgtaatacggtggcatactatcactggacgcatgagatgagcaagtcatactttgataggtacccaggagctctgccttgcagaagcaagaaacagaaggctctgcccttggatgccatatgaagagacaatgctgagag

SEQ ID NO: 25942 - DNA, 2003 bp, Zea Mays
gaccaattatgctggctcatttgttggatgttttgacaagtcgattctagcttccttatgatctatgttagatttgatcaatgaataaaaggattattcatatcaatgtccatgcaccttctcagaaaatccttttgtgatgttggtgttggtttcctggacctgtactagtacatatgctaagtcatccacaaatctgacccagaattgtaccgttctttttatagccatgtttggtacttgtttgagtgctccatagttcgcaagtttgttttgttatgatgtattttgacatttgaatctcatacatgcttaggaactactgatttgaatttatgggctaacagttccagcatttcaaatagaaagtatgctatatcaaataagttgatgatacttttggtactggagaatgaagctagactgcatttgatattagaagtctgtttgtctgattgtagttgattataaagaagctagagctgatattagaagtctgatattagaagtatgtttgtctgattgcagttgattataaagaagctagagcttccagtcaagtttgatattagaagtcttcttttgcttttacattttgtttttttatgatcttgatcttagaagcagggttttggtaccagcttaactaattttctgaagttttatgttcttactttaattataactagatgattgcaataagatatcatgaggcgcgccgaggagaacagggacctcctctccgcctcctccttcgacaggcagctgctgcggaaggaggtggtgaggagggtcaaggccgcggtggcgggacgtgagtgaagtgagctttgtcgagcctatatgtggaggtcggtcgtgaagctgggactaggacaagggcgagctgaaggctagaagctgtaaatgcacccttcaagagtcttcataggccaagtctctacgtaggtgttgacaaaaaggaaaattcatgacaatgcgtttatatgagattgtccaatatcgaaaccaagaatacatgggggacaactgtattcgatttttgtttctctttcgtggagtattactgaaatatatgcttccaatgttgaagtttccaaattaaatgttatctctgtacaaagtgtgcaggctcggttataggaattttataaagcaaatgacaaatatacatgtacgaacttcaaatatttcctggtactaacctctctgctctgagatgacatgttcttttgttgttatgaaatcaaatatttcttcatgatctcttataatctgtcaaatgatgtttgcccagtggcaatagaaaacccttatattaaagagataatcgatgatgatgcgaacagacctaaagattagaaggaaacagtgggcgatgaaagcaaggaatttgggaggtacatgcgacagagagaagagcaagagaagcaggaagcggagttgttcactcgggctcttgtaaccaaacatgataagcagatcgagaagcgcataaggagacaacttcatgggctaggaggcttaactgacggttttggccttgggatgaacatgctgttgggaggagacaaggaagatgatggcggttcaagaaagtcgcatggcaaaagcggaaactgaaagaagcacgtgaagaacagcaagaagaggatgaggcattagccctagacccacactgttgtagcacttcaatatactgatagagcctagaagatggttcaagcaagccacacgaaaagttgaagccggagaaaataccaagaaaccaagtagagaaaaaaagttttggttcctataggcgtattatttctgaaacacaaaacttgatctgagcgactgatcgtgagctaatgtaacagtatgaattatatggcttgaacatggtaggtgtaaaatgttttgttcatcggtagagtattccagatgtgatcggcttaacagtatgaattatatagaactatgtgagccaatgtaacagtatgaattatataagttatcaa

SEQ ID NO: 25943 - DNA, 1412 bp, Zea Mays
ggtgtctgacaccgatatgccgttgactttcagtatcttttggattaaggttgcaatttcaaggggcttgaacggcattggtctagctctcgtcataccagcagtccagtcgctggtagccgactccactgacgacgacaaccgcggcacagcattcggatggctgcaactgaccagcagcatcggctccgtattcgggggattctttgccttactgctggcccagactacagtcttggggatcgaaggatggcgtattgccttccacctcgtcgcgatcgtcagcgtcatcgtcggcaccctcgtgtggttcttcgccgtggatccccatttccccacaaacgatgccgcaccaccatccagcaaaaagtccgcgcttgatgaagcaagggaactgatcatggaggccaggtccatagtccagatcccgacgttccaggtcttcgttgcccagggcgtcagcggctcgttcccgtggtcagcgctgtcgttcttgtccatgtggctggagctcgtcgggttcagccacgaggacaccgccgtcctcacgaccaccttcgctgtcgccacctccgtcggcggccttcttggcgggaagatgggggattcgctcgctcggcggtatccgaacgctgggaggatcgtgctgtctcagataagcgccggctctgctgttcctttggccgctgttcttctgctgggcttgcctgataatccgtccacgtccagtggtgttgcccatggacttgttctgttcgtcatgggactcatcatctcttggaacggagctgctacaaactgcccgatttttgcggagatcgtgcccgagaagcaaaggacgagcatctacgctctggacagaaccttcgagtccattctggcgtcgtttgcgcctccggtcgttggcctgttgtcgcagcaagtctacggcttcaaacaggacgacggcagagggagcagccctgggcaagaccgggagaacgcggcgtcgctggccaaggcgctgtacacggccatctccataccgatggtcatctgcacctccatatacacgttcatgtaccgcacctaccctcgagacagggagcgtgcgcgcatgcagtcggtgattcagtcagagttggaccagattgagctgctgggcggtccgagtttaggaggcggcggcgacggcgacggtgataaacctgacgaggttgatggcagttatggttctgaaagatctgctgaggccgatgccggcactgaaaaactactaggaaggaaaccatgagttgtgacgaacagaagaacctactaggaggaccattcatgttgaagaggatgatagatgttcctgccgattttaggaacttgtaattgtaacacgacgatcaatatgattcactaaagtgaccgttcttttttcttcc

SEQ ID NO: 25944 - DNA, 1588 bp, Zea Mays
tttgctttggaataccaaatgtgcgatacgtcatgtcctgcttgctggccgttgtctcattgtctggccgccggaccaaatccgaaaacccaccgagtaactgacaatctcgatccccgcagtcatcgcgggatcggcccgtcctcgccggcgactcattcccgcaactcacctgctctcaaccgcgaactcggcgccctgcacggcctccaagtcgcacgatgcggcggcgcccacatcatacgtggctgcgtctccgcctccgctttcgccgcgccgacgtgtcagcttcccgtccactacagagtccacattgtcctcctattacttgctccgccggcaactattagcccctccccagtcgccactaaatccgctgccgtttcttctcgagtgtgaccatggcggctcagggatccctcgtcatgtggagggcggtcttcgcagcgctgggcttgctcatggtggccacgctggtgtacaccttggccaccgacggctcgccgttccgccttgagctgtttacgccgtggatggtggcaacactggctgatttttatgttaatgttattgcaatctcggcttgggttatctacaaggaagcaaactgggttagttctgctgtgtgggtggttctgttgttttgctttggcagtgctgtcacttgcgcttatattgttaagaaacttcttgaagtaacatctgcagggtcatcccaagatcctcttgaccttctatttatcaggcaaggtaatctatcccaaagaaagtgctcttatgttgtaattggaagggttattttcagcattttggggatattcatggctgcggttgtcacatatactgtcatcactgatggactaccttttaggaaggaattgttgacaccgtggatggcggcaaccttaattgatttctacataaatgtctttgcgatatcggtctgggttgctcacaaggaatcatcatggatatcaactaccatttggattgtcttgctgatatgctttggaagcatcacaacatgcggctacattgtcatccaacttttcaaagtatcatatcaagatccaatctaccacgtgctattgaactcccacagcaaaagatcgagtgatggtttaattttgaatgacggactagaagtcagcagctcagtctcagcattcagttgggcagattagctcagggccaagccctttgagaatggaccgaggccaagcctctttcagttgggcagatttagcaatgatcagatcagcaacaggaggatcaggaggtgagagccccctccagggggcaggaaaggaaacaaaaggttgttctgcctcgaacaaaaattcaagaaaccaaagatctctagagaaactcgtatggcactacaagcagtaatacgaacaccgagaacatgaggggtacatatgtattttcagtgaagaggagccacagtttactctgcagcagccccaaatccagtctaccctctaacagtctggttgtatgcactctcaccagcttgaggtgactaggtaaggagggatgtttggcaacaatgtttttcaaaattatagttttacaatactttgtc

SEQ ID NO: 25945 - DNA, 150 bp, Zea Mays
cgggaagcctacggcactggaccaaagaagaatgaaggtggtagagatagggggagctcaggaactgcttaatgtattggaaggtgctaaagatgataaaacacgaaaagaaactctaaaagctcttgctgcgctttcaaaatctggtga

SEQ ID NO: 25946 - DNA, 2035 bp, Zea Mays
atgactcatgagacgacggcagtctccgtctcccgctgttattggacggcgctttcggcattgacgagcaccgatgccctaatccgcatgctgggcccggccgtcgcttttcccaaggccgccgatcccgacgacgacccaacaaagtggcagccagaaaactcggcagagcatctcgcttgcgaaacaaaggacggcgcgccagaggaggggaaaggaaaacaaccaccacgaccccgtccattccgttccacttccacccgagctcagcgatcgcggcggcggatgcggatgcggatggggaaggggccgtcgtcgcgggcggggtcgcggcaccggcagttccgcgcccgagccatgacccgcgtcgacgacctccaggaggtcttctcgggcctgcagtccgcgcgcaaggactcacgctccgcggacgccgccgtcctcgaggcgcagctccagcagatgctgcgggagtggcgctccgagctcagcgatccctcccccgcctcctccctgcagggcaacgccagggaactgtcggatccgccttccgatactcttcgtctgctgcagttggtggtggccgaggaggaggatgacgccacgagcaagatggtcgagcagcagcagcagcagcccccacctccgctcccagctaaccggagccaggggcacgcgcatgttgtgtgccagggcatgaagccggagccgcgcgaggaagcagttgacgtcgctgtggaccagccgcagctgctgagtcagggggttctgcctaatggtgctgctaccgcgtctgcgatgttccatgatcagctgtactatgtgaaccaggagctcacggtcgaggattttctttatgatgatgattacaagatagatctttctgggtctaatctggatgtcattaataacctagaagggattgttcagctggaatatccagatcacaatttgccgcaagggttagcccctaatgcataccttgacatgaatagttgtgggcagagtgccggggctgttttcctgcacatgccagatttgctcacaacaatgacttcagcaccttctgcattcctgaagccaaaatgcgctctctgggactgccccaggcctgctattggatcagaaagatggcataattattgcagcatgtatcatgctgatttggctgtgcaggaagagggccctccaggcacaatgcctgtgatccgtccaagaggcattgatctgaaagatggccccctgtttgctgctcttagtgcaaaagtccaaggaaaaaacgttggggtccctatctgtgaaggagctgccactgcaaagtctccatggaatgcacctgaacttttcgatctttacatatttgaaggtgaatctatcagagaatggttgttttttgacaaaccaaggagggcatttgatagtggaaatcggaagcagcggtccttgccagactacaacggccgtggttggcatgaatctaggaagcaggtgatgaaggactttgggggtctgaagaggtcctattacatggatccacaaccatccaacggctatgaatggcacctatatgaatatgagatcaatgactgtgatgcttttgccttatatcggcttgaattcaagtcttcagatgcaaagaaaattgcaaaatccaaattaggttgtaatccactgaatgaaattcagcagcaaatggatagactcagtgcagacagtcctgtcgacaccaaacggacggcccggagccggacagagcctaacccgatagatgtcaatactaacatctattcagttccaaacaccacagttcaaactgatgttccaaatgcttatcagccagggtcacaagtggaccagatgacatatttgaacggtagtgtcgtttatgggcctcatctgccgtacggttactcgactgaaagaagtgacttctattggaactcaaatgatgggacatgagaagatataaacacatgttcgatttatggcatatttggccttcaagttctaacaattccctcaaaaaaaaaaaaaa

SEQ ID NO: 25947 - DNA, 6709 bp, Zea Mays
ttcctcctgaaccagtcacaaaaatcttctttcagtactccctgctcccgtgacacttatatctcgacgcctaaaacacaaatcagtaccggaataagcttacaggcaaacagcaacaaggcttctaacacaacaaacaaatcaatcgagccgtgtggcctcgctaggcatgtacaactccatttaatacggggtctcttgaggggtctccaagtggtaattgaaaaaaaaatacaagaggcaggctcttcgcgaacagactgtctctacacgactctttatatatattgtatcttaattgtatttatgatctaaaagcttagggatgtagcacgtattatacttggaaaacccgttccaaagtctctgggttgtacatgccctaagtcctagaggaagctcaggccctcacaacaatagttttcatcacttatttcaaagacgtagtaattgaactactgaaggcataagactaaacaaggactgataaccgactcctagataatcttctcccttttatctagctaaaccgactcctagatctactatgtgtcgtctcacccccagtcccccaccctccactccctctccggcctctcagccccacgccggtgtctgctccaagcccggcggccacccaccttccttccctggcgccggggaccactccatccccttctctggctactagtcgatccaaagcccagcgatggagggacgactaccctgcttcctccattgatggttgtcctgtccagcgggatttcttcaaagacgctttgttatctaccaagtctcctgtcttttgccccaacaaaaaagaggatggcgacggttgggtgaaggtggaaagcgaaaaagctcggcggcgacgctctcgtccctcgaagccacctcccagggttgttcctggtgatcttcacggaaggtgtttcaactgcttttctaccaccgtgcggcagcgtgtcgacgacaggtgcgctgcttcatctggtggctgctggggcaccgtgctcacgtgtgcccacgccagcggatggtgtcgccccacccgcggcgtgttttggtgtggcgccttgtcaatccatcactctctgctcccgttcctgcccctgccgtgatgaaggagggtgacaatggagacagtgcactggatatggaggtggcaggagaaggcgcactcgtcgtggtcagaggaggtgaggagctcacgtcgcgacctcaacaacaatgatgatgacaatggtgtgcctcccatggggccaccggctgaaactcccgccatctctatggagcctgatcgaccaaggcgggtcatcagtcgctcgacaaagatcgtgcaagttgaggaggatcttcgacgtgctctgatcatgtctgtcattggacgtgaagcagctggtagcgctgcagaggtttctgatgcgctcgcattgaggtttgccctcgacgctgatgcgctcgacctcaaacgtgctgcgccaaataccttcatcgccttgctcccatctgaagcgctggctggctgtgtttacaatgaacgcagaccgtttgtcgtgccccctctccggttgcacattcaacgttggtctagacaagccatggccaccggcagaagtgatctaccgttccttgtcactgtcaaactctgtggtgtcctggcacacctctggggattgagacggctgcacgcagacacggaagggggcgttaatttgggcgaattcaagctggatgcatggtgcgcaaggccggagcttcttccttcttccatggacctccacgttgtcgagctagcagttgaggggatgttgattcctcgtaccctggtttatccaatccttgtggtggtttcagattcgaagcaatcaacgccgaatcctccatcttgtcctccactgccggccaattccgacgatgacagcgctcgcaagcggaggcgatgacaacgctcccctccctcgacgtccacgcgtgggctggtacacgcgcgcttgggtccacgtgacaacatcaattcgacgtctgatggaccaattgaggtgtgggattcctcatctgcggcacgaactatgcaaaatctagcggctgccccttcgtgcgcctctcggccgccatcggcccgcgcgcccgctccttcgggtcgcgcctccccactggttttcaatgcacagaccccttcattctctgtggtgttggcattaaagagcattactccctcgagctctgccccgctggccgcggttatggcgcctatcccagaagatgtcgcgcggttggagtttctttcggaaaaggttgtctcggcaaatgtttcaatcagcccgcaggcaatggacttcaaccctgggaacgagatctcccttcggatcattgaatctgcacagctggaggggacaacttttgaacttgttaattgtgttcctgcacctgttacattgactaccgctcttccttccattgaagatgatgcctgcattgatcatgttttaaggatttggtcctacactgtaaggattgagggactcatctcaaccgtggttgatggcagtttggtttctttaccacctcctgcgctgataacagatatacagaggaattctaatgtgggatcttctgcatggagaatgatgtttcaagggtgatgactatcatgtctgtaagggctaccagaagcatttcagaggccagtgaaggacaattgaaggtttattctagacggtgtcatggggaaaatcaggatgagtctttgtctaaacacaacgcccctgtatgctcccctttcttcgaagaaggaagtgctctgataaataaaatcatcaggcctgttgatggattgctccagcctccatgtgtaccaaagcaaaaaaaatgagtaaaccccttgtttcttaccaaggcgtagtaggagagtggcgggggcggacccatgtcctcctgggcttgttgcttctgaggcccaaaggagagtgatcaaaagtttgggtttcatgttcccgaggaaagggttgagccatctgtccaagatgcatatagcaaattgttccttgaccccatatcagattctcagcttgcagccttatcggtgttgtttggatggacagtgggtgaggggatggagtacatctccctagaaggcatcttagcagcccccggtttggtggttcttatgcagtttctcttatgaatccatcaactattttgatctggaatgcccgcgggctcaatatgaagggtcggcgggatgttgttcgggaggtaattttctcatctagagcggatattgtgtcttcaagaaaccaagttggctaccatggaccattttttgttttgctcagcttttgggtctgttttcgataagtttgtcttactgccggctgatggcactagaggagggctgatcattgcttggaagacttccatcattcaagctttaggttctcgagtagacattttttcagcctcagttcactttgttgaagaacaaggtcgtaattggaggttcactggtgtatatggcccccaaaatgatggtgataaaatttctttccttcaagaactccgggatgtcagaactatgtgccctggaccttgggtcattgcgggagattttaaccgtatctatcaagctgctgataagagcaatagcaatctgaaccgcgcaatgatgggtcgcttcaggcgtgttctagatgatctggaacttaaagagattcctaaattcacgtggtctaatgagagggaaaatcccactcttgtccggttggaccgtgccttttgcacaacggattgggaagaagttttccctgatgctgttcttcagagtgctactgctggagtgtctgaccactgcccattaattttgggactcaaggttagaaatactggcaaacaaagattacattttgagagtttctggtcgaagttggatggttttcatgaatcagttcagcaaaactgggaagacccagtgtcttcttcttgcctggttgagatcctgtttctcaaactgaagaggcttagtaggggactgcagaaatggagccatcgcaaggttgggaatgtcaagctacaactttctatggcaaaagaagtgctacaccgattggagattgttagggattctcgttctctatcacagggggaggattggttgcgaagaaaactcaagatgcattgtttgggcttgacttctttggaacacaccattgcccgtttgcattctagggtgctgtttttacaggaaggagatgcaaatacaaattttttccatcagcacactcggtttagaaagaagaaaaattttattgctaagctacaggtggaagacagaatctatgttactcaagaggagaaacaagaagtagtggatgatttttatgaacatctgcgaagttctggtgatctgagaaattactccttcaacttggcagacttccacccattattccagcaggacttatctcatttagatgctcctttcactgctgaagaggtatgggcatcagtaaaagatctacctatggacaaggctcccggccctgatggcttcaccgggaggttctacaaaacttgttggggcattattggcagtgacattcttgcagccttgaatgcaatttataaaggacatgtcttcaaacttcagctgctgaattctgcttatgtttccttgctgcttaagaagacagatgctagttcggtgaaagactttcgacctataagtctcatcatagctttgaaaagttggtaaccataatccttgccaaccggctagcacctttaatacccagcctagtttccaacaatcagagtgctttttgtgaggggcagatgcatacatgataatttcttactttgtgcaacatcttgtcagaacacttcacacaagcaaggaaccacacatccttctgaagctggatatctcgaaggcttttttatacaatttcttggccttttctgatagaagtaatgcgttacttggggtttggccagcagtggtgcaaccttatttgtcagatcttgtccactgcaagctctcaagtcctattgaatggaattcctgggagatctatctctcatcttcgtgggcttcggcagggagaccctctctcccccttactgttcatattgattatggatgtccttaattccctaattcaaatggcttccaggaataatttgttgcagcctatgtctgggcagcaacaatggtctcggatttctttatatgctgacaatgtggttatatttttgagacccaacagaaggatctttgtgtggtacgagacctgttaaggtgttttggagaagtttctggtctgaagactaatttgattaaaagttcagccataccaatccaatgctccgatgaagatattgggagaacatcggcaattctttcttgttccattggaagcttaccttgttcatatttgggtattcccctttctattcataaaccttcaaaggctgttctaacacctctgattgacaagattgccaataaattgccaggatggaaagcccccctcctaagcaaggttggcaggttggttgttgtcaaatctgtaatgtcagcaacacccattcaccaaatgctcgtcttgaatctgcccaaatggttctttaaggctgttcataaaaggagaaggggattcctttggaaagggcaagaacaggccaagggaggaaattgtttagtctcatgggccaaggtgcaaagaccttacatgtttggcagtcttggagtacattatctggaaaggatgagttgggcattgtgtatccgctggttatggtttatgaaaactgatccctcaaaactatggtttggtcttcttgttaataatcctaagcaagcccaagcattcttccaaatggccgtaactgtaaatattgggaatgttatttcttccaaattctggacagacaattggttgcaaggaaagagtgtggctgaccttgctccaaatctgatcctagcaatcccaaagagagtaattaagaagcgtacagtgagccaggcattatccaacagaggctgggtggttgatgtcaagggcgctctaacagttcaggttttcatagaattcctcaaagtttgggagcttgttgagggtatagttctacatcctaatgtcccagatcatttttcttggaagttttcatcttcaggtcagtatagcagaaaatctgcatacaatatgatgttcattggctccatcaaattcctagcttggaggaggatctggaaaacttgggaccctgcaaactgcaagttcttcatttggttggccattaataatcaatgttggactcactggtcaaacgtggactaccgcatcaggccgcttgtgccctttgtgatcaagatgtggaaaccatcaaccacattctagtatcctgtgtgtttgctagggaggtatggagcttagttcttaacaggatcatccctggtagtgccgagcctctgcttctttgcctaaggaagagaggaaggggttcaattccttagtggtcctagttgcctcggagctttggaaacataggaatgcctgcgtttttcagggttctaggcctgctgtccaaagtgttgcacaagctgttatggatgaaggtcgtctttggtgtttagctggggctgctgtccttcggggtttggtccttaggactgaaccttctttggtcgtgaatggggccgttaccg

SEQ ID NO: 25948 - DNA, 786 bp, Zea Mays
gtcatccgcgcgcccccgctctcctccatctgccgcgtgaagctctcccgaaaacctcctccacatcagcgccccccgccatgcccctgtatctcgcctagcacacgccgcgcccacgcaggcagccgtggatctcgcccccaccgtcgagcttccatggtaggcatcctcttccatactaggcggccatggcatgaacccatcccctatccgcgcccccatcgcacgggccctaatcctagaatggtgccttcctccttctctgtcgcctctgccctactcagaccttcgagacttccactggcgatacacacccactagggaattcttagaccaacatgaggaggaagaaatgcctcatgttattagtgttacaccagacgtacaagaggccattggacgggaatgaggagctatctgcaaactatcttcttgagcaagctggtgaggaagattaagccagagtagttttcgtatgggtacaaacatagctttgcgtcaatcgatgccaggcaaatgtagaacgcttggtagccggtcagcgctatgtgtagaacacatactccagagatgaacatggatcacgagaactggaataattgctgtcagctgcattgaaacaggcagatcctattaacaactccgcattggctctctgccccagccatggacccatgacatcggtggtttcgcgcacctcaaagacatgggtggggaggcatcgcggctgctgcacgccctctagagaatgcttatcgatcatcagaagaaccagtgaccgaggat

SEQ ID NO: 25949 - DNA, 2158 bp, Zea Mays
cagatgtttacaggagaaattccaattggtcacaagagtgcattcgaagcattggttgaaatgaggacgcaacttggtgacaaacgtggtgtccttagtgattggaaggataatcaaatgagcccctgctactgggccaatgttaattgccaagataacaaagtcacaacaataattttgagctcgtcagggttaacaggatccttatcacccagcattgcaaagctaacaactttacagcagctgatactggataacaacaacattactggagggattcctccggagtttggaaacctatcaggtttgacaattctaaaccttggaagaaataatttaaatgggtcaataccggactcccttggacaactttctaaactccaaaatctggatctaagccataattatttgaccggaaatatcccaagctctttctcaaatcttctgtcattgagtgatattaatctggcatataataatataagaggtgcaatcccacaacatctacttcaggtggcccaatacaactatgcaggcaaccacttgaattgtggccaaaatttatctgcatgtgaacgaggcagcacattgacaggtggatccaaaaatttcaagctaaacgtggttattggaagcattgctggagcagtcacattttctgtaactgtagttctagttttgctatggtggcaaagaatgcgttaccggcctgaaatcttcattgacgtgtcaggtcagaatgatcatatgcttgagtttgggcaaataaagcggttctcatggcgggagcttcagattgcaaccagcaatttcagtgaacagaatgttcttggcaagggtggttttggtaaggtgtataaaggagttcttccaggtccaaacagtataaagattgcagtgaaacgactactgaacgtggacagtcgtgatggggaaatggctttcctcagagaagttgaattgataagcattgctgtacacaagaacatattaaggttgataggattctgtacaacaccaacagagaggcttttggtctaccctttcatggagaatcttagtgttgcttcccgtttaagagatataaaactaaacgaaccagcattagattggtctacaagaatgcgaattgctcttggcgctgcctgtggtttggagtaccttcatgagcactgcaatcccaagatcatccaccgtgatgtcaaggctgcaaatgtcctgcttgatgggaactttgaagcagtggtaggagattttgggctggcgaagatggtagacatagggaggaatacagtaacaacaggggttcgtggaactatgggccacgtagctcctgagtacataaagacaggaaggccatcagtgaagacagatatctttggttatggtgtcatgctgttagagattgtgacaggagagcgtgcaattgcattccatcctgaccgtatagaagaagcaggcgagatcctgctcactgatcagtcaagctatggatggaagaagggcgactactcgacctagtggatcgcaatctaggtggcgtctacaaccttgaagagctggagaaggttacccagatagcacttctctgcactcacatggatcctgaacaacgccctacaatgtctgaggtggtgcagatgctggaaggagagattgtcccagcagagcggtgggaggagtggcagctggctgagctccaacgacgacaacagcatgagatgaggcaacagggcaaactattcaacttcagtgaagagtctcaaaacatccaggaagccattgagttgtcagctggcagatgagctgtcataagaaagtgacatgattttcacttgttccttaaatagaaaggctataagagaaatattgactattaggaatagtctataaggtcctggactcctggtgtaatatcttgcacaagtaactccgtccatatgctgttaatacaacgataggaccacacctagctcagaccatgtgtatatcaagaatagactgttctacattttaattgcattctgtattactggataactctgaaattctctgttgtgtgtgtgtagaacttgaagccttgaattcaaactttagcttaaaagccaaaaatttcggcagtaatataatgagaactttactcacggcatgctgtgtt

SEQ ID NO: 25950 - DNA, 2566 bp, Zea Mays
gccgagaccaattcccaccacaacacacaaggaagcctgcgcaccgccaccaccattcaccgccgccgaagcccgattcccagagacgcctctccttgcccccgtccccaaccccaaccaaagccaccgccgaatcgccttaatctggctggagcgcgccttggagccgtccggacctcagagctcacggggaatctttaatggcgtcggagtcgcatcgccagccataggagcctgattgacagaggcgccgattgccgactgccgactggcaactggcgaggcgatcacttgtcaatcctgtgctatccttttctcggcgcattgtcttgctttgttgatgcatacggcaccgccgatgaatggccgatctcggaggccggcagcggcgcgcggcgcgaaagcggcccccaagagcgacagcagagtgatggagaaggatccgaggaaggccgcgacaccggcgaagggaccggccaacgcgggcacccgggtcaccatgaacagaatccagtcgagagagcgcaagctcgcgctgcagcaagatgtggataagctcaagaagaagctgcgccacgaggagaacgtccaccgcgctctggagcgggcgttcacgcggccgctcggcgccctgcctcgcctgccgccgtatctgccgtctcagacgctagctcttctcgcggaggtggcggtgcttgaggaggaggtcgtccggctggaggagcaagtggtgagtttccggcaagggatctaccaggaggcgatcatcttctcctccaccaagaacgcccagctccccgacggccaagttcccgtgccggcgcagctcgtaccgtcgtacccggtgctgaattccgaggtctcaccggcgacagtgagccaaggtcctccagaccatcctcccggcgctcgtccgtcgccgcacagcggcgtggccaacggcaagcaaacgccacggaaccccgttgctacctcgccgagccaggatgaccggtccggggcagggaaagagaaccagtcgtgcagcaacacgccgagcacgagcagccgccagtcgccgtcgcagcagaagacgcccaagtgcagggcgacgccgcctgacaggcgcagggttactcctgctcagacaagccctgctgttgcgcctgaccgtaaacggcctgccgacgctgctgctggcactggcagcaactctgacaacgtgacgacgtcccacgacgacgcgagctcgagcgtgccgaacaaagtatcggaggagctgctccggtgcctgctggccatcttctcgcagatggggggctcggctgctggcggcggccgaggactaggagacgaggaccagcaggcgctgtccccgtcggtctccggctccagcgagagctcggcgtcgtcggaggcggacgcgtacccgcaggacccctacggcatcctggagctgggcgccagggacatcggcgcctacaagcggttccacgtggtcgacgccgcgtccttcgacggcaacggcgacacgcctctcgttcgtcggagactcaaggccttgctgcggaggctgtcgtcggttgacctggcggggctctcccatcagcagaagctggccttctggatcaacgtctacaattcctgcatgatgaacgcgttcctggagcatgggatacctaccaccccgcaaatgctcgtggcgatgatgcccaaggccaccgtgagcgttggtgggcgcacgcacagcgccatgtccatcgagcatttcatcctgaggctgccctacagcgccaagcaggtgaaggtgagccgggaaggggccaagtgcgacgacggcgacgtgacggcggcgcgcggcgcgttcgggctggagtggcccgagcccctcgtcaccttcgcgctctcctgcggcagctggtcgtcccccgcggtgagggtgtacacggcggcgcgcgtggaggaggagctggaggcggcgaagcgggagtacctacaggcggccgcgggcgtgtgggcggcggggaggctggcggtcccgaagctcctgcactggtacctgctggacttcgccaaggacgtggacgcgctcatggactgggtctgcctgcagctgccgccggagctgcggcaggaggcggtgcgggccgtggaggtcggccgccgcgccggcgccggcggccgcgtccgggtcctcccgtacgagttcaggttcaggtacctgttggcctcctgacgacgcgtgcgtactacggtagggagtagtgtagtgccgtgcgtactggaggtagtagtagtaatgtagtagttcgtgcgcaggtctttgcaataataaaacggagatgggattgactatgcagtttttattactagcgttttgtgctgtatgtgtggattcggtagcggtgtaatggtggtttgtgcgcgcgaggaacgtttctactgtgccgtgcggctgtgctccatccacacagcctgcatttttttttttttgcgagcagggttggttggttggttgtcagctggtttcggaaagcacaaaggacactgccactgcagtgcagtgcagtgcacgctgtctctgtca

SEQ ID NO: 25951 - DNA, 1442 bp, Zea Mays
gcgaagaaagaagtatgaataaaacaaaatttgaagacgcctaacagcccgactgcttcgtttccacgcgcacgaaaccctagactagataaaaagttcccatttccctcaattccccaacttccctcgccgcaatctctcgccgcctccagtccagagccaccgtgagatctgcccgattccgccgcccggacccggggactccctcccctcctcgatccgttcgggcggccggccggcctagcttcaagtgcggggatggtgttctacttcaaggcgcggcccgaggccggcgactataccatcttcatgggtcttgacaagtacgagaacgaggacctcatcaaatacggcttccccgaggacatctggttccatgtagataagatgtcctctgcacatgtgtatgtgagattgaataaaggtcaatcaatggatgacatgagtgagggtttgctggaagactgtgcgcagcttgtcaaagctaattccattcaaggtaataaagtcaataacattgatgtagtttatactccatggtacaatttgaagaagaccccttcaatggatgtaggccaagttggttttcacaaccctaaattgctgcagaaggacgagcttgagttgcagtgcaccaccatgctgctccctgtgcacaaccatagctcctgtgcgctgccaggagtacaagccctggctatcgttctcctacttgtacaacctatgcaatcgcggttcgcactattaaagtggaaaagaggatcaatgagattgtgaaccgcttgaataagacaaaggtggaacggaaacctgatttaaaggctgaaagagaggctattagtgctgctgaaaaggcagaaagaaaggcacagcttagagacaagaaacgtagggaagagatggagaggcttgagaaagagaagcaggctgatatcaggagctacaagggtctaatggtccaagagaagatgacttccaacaagcaaatcgcttctggcagcaagaccctgcaggaacttgaagaagactttatgtgagaggcggacattataaatgccatgctgaagatttccttgaactgcttctgtcgaagacagaaggggtaccacaggcttgtgagatactggatgactcatgggcaggccatggtctgttattatctcctcttgctgttgtggtctatgtaaaccttgtttacttgctgaaaaaacaacggtgcatgctctaactgtggttgatgtaatggtctgttgcccatcaagttgaaatggtaatggaattatggtttcctggatttttttcaaacaataaagacatggcagcagataacttacatattccattctttgcatggagaacggctcaggaacttctttgtttgtgtaagagtgttatagaaatgaaccacacttagcttacatttggagattctttaattgaag

SEQ ID NO: 25952 - DNA, 1886 bp, Zea Mays
cgcaactcgatttgtgccctcttcttttgcaggcaacttttgtgcagccgcccccgctttcccccccgcgaaaacccagcagccgccgccgctgccgccgccgccgccgccacatccagtcctgccccggggccctgaaccctagccatggcgtcctccatactctccgactgctcctcggcccgcctcctccctctccgccgctcgctcctcccgccgcgggcgccccgcctccgctcctgccccgctctagctacccccaggcgcctactcgtcgccgccaggccccagctgcttccgcgcccgcgccacatggactcggtccccgcagccaccgcctcttccgccgactcagccgatgcgcctgccaaactgattgacgggaagctcgtggcgaagcaagtgagagaagaaatagctgtccaagtcaccaggatgaaggatgtgatcggcattgtgcccggcctggctgtcatccttgttgggtcgaggaaggattctcagacttacgtgcggaacaagaagaaggcgtgcgaagcggtcggtataaagtcgtacgaggtcaacttgcctgaggacagctctgaggaggaggttatcaagcacatagcgagtttcaacagtgacccgtccgtgcatggcatcttggttcagttgcccttaccaaggcatatgaatgatgagaacattctgaatgcggtcagtattgaaaaggatgttgatggctttcatccgctgaacatcggacggcttgcaatgcaaggccgagatccgttctttgtaccttgcaccccgaaaggatgcatggagttgctacaccgacacggagttgaaattaaagggaagagagctgttgtgatcggacgaagcaatattgttggaacgcctgctgcattgttgttgcaaaaagcaaatgcaactgtcagcattgttcattcacaaaccaagaaccctgagcaaataacgagacaggcagatatagtcatcgcagctgttggagtcgccaacttggtcagaggggattggataaagcctggagctactattattgatgttggcatcaatccagttgatgacccagagagcccccgcgggtacaggctcgtcggggacgtctgctacgaggaagcctccaaggtcgccggagccatcacgccggtcccaggcggcgtcgggccgatgacgatcgcgatgcttctgtcgaacacgctcgagtcggctagacggatccacggattcaagtagccgccgcacccaccgtccgtccagcagagagaagcgaaggcgttggccctgccagccaagccagactagtgcaggggtcgtagggaaaaaataaataaataattaaataaattttgacgcagatgagatgggaaatcccagcttgacactttgttagggtattgtgcttgataaaaatatggcaccaggtgaatctgaggtgccagtaaatcttggatgaattctgccgcacgcatccgaccggatcagcagaaacttgtctccatgccatgatcagggtacctgtgttgtgagtgactgtggctgtgactggtgggtgccgttgtcgacgtgggataatgcctgatctgtccagttggatccccgatttcattagctgtctgtctgtctgtctgcccccgtttttttttttgtgtgtgtggtacactgcactgcacacgcatgctggtgtatttggtggccacctaaacgcagtagcagttggttgagcgagtatgtgtttggtttgaggttaaagtgtgatgagacgggtgtgacactgtctcttcgatttttttggattacgtcgctattaaaaactacttcggtatttaacttgttcctatgtgaatctcatctaaacactatagaaattatagtcg

SEQ ID NO: 25953 - DNA, 2835 bp, Zea Mays
ccccaagcccccaacccgatctctctcatcagctcgctctttcctgtcccctctccgccacctcaccgccggctcgctcaaaaatcctcgcgccggacgccggccctgcctccgcctccgcctccgctgcgccatgcccgtcggcgcctgattcatgtctcagtcctacgccgccgccgcctcgaagcgccccttctcgtcccccaccacatctccgtccccgacgtcatcccctgcgacgccgcttatgaagaaggccaagcatcccgccgccgcctcctcctcttccgtggggaccgtagagaagaacggcatccagcttgataccgttgccgccgccatgggtgggggccgaacgaatggcgaggaggatgcggacatggtgctcgtcaaccaggacaagctccccgcgcccagcgtgccggcctctgctggcgttgccgccaacctctttcgaaagaaggccacgctcccgcagccgtcgacctccgcccgcaagccgctccgcatcaaaataggtcaaccaaaactgccaaaaaacttcgaagaggatacatggtcgattttgaaggatgctatcacagctatttttctcaagcagaaactttcttgtgatgttgagaaactctatcaggctgctggtgatctttgtttacacaagctaggggcaaacctatacgaccgaatcaagaaagaatgtggaatacatatagctgaaaaaatatcagcattagtgggtcaaagcccagatctggttgtattcttgtctctggtccaaagaacatggcaagatttttgtgatcagatgttgattattcgtggtattgctttacttcttgatgtaaaatatgtcaagaatgtggcaaatatctgttcagtgtgggatatggggctgcaactgttccgcaagcatctatcactatccacggagattgaacacaaaactgtaactggccttctcagattgatcgagagtgagaggcttggtgaagcaatagataggacattacttagtcatcttctgaagatgcttactgctcttggaatgtattctgagagttttgaaaaaccctttcttgaatgtacttctgaattttatgctacggaaggtgttagatatatgcaacaatctgatattccagattacctgaagcatgtggagtcgaggttgcaagaagaacacgaaaggtgtattctatatttggaagctaacacgaggaagccactgattgcaactactgaaaagcaattgctagaacgtcatacatctgccattattgagaaggggttcactatgctcatggatgccaatcgtataaatgacctctcgaggatgtacaaccttttccagagggtgaatgctgttgagctgctaaaactagcgcttagttcatatatccgggctacaggccagggcattattatggatgaagaaaaggacagagaattggttccatttcttcttgattttaaggcatccctcgacaaaatattggaagaaagttttgccaagaacgaggctttctccaataccataaaagattcatttgagcaccttatcaatctacgacagaaccgacctgcggaattgattgcaaagtttcttgatgagaaacttcgagctggcaataaagggacatcggaagaagagctggagggtatacttgataaagttctggtcctgtttcggtttatacaaggtaaagatgtatttgaggcattctacaagaaggatctagctaagaggttgctgcttgggaagagtgcatcaatagatgctgaaaaatcgatgatcacaaaactcaaaactgagtgtggaagtcagtttaccaacaagctggagggaatgttcaaggacattgaattatccaaagaaataaatgattcattcagacaatcatctcaagctaggacaaagcttccctctggcattgaaatgagtgtccatgtgcttacaacaggctattggcctacatatccgccaatggacgtgaaactcccacacgaactgaatgtgtatcaggatatatttaaagagttctatttaagcaagtacagtggaaggcgtttaatgtggcagaattctttgggacactgtgtcttgaaagcagactttcccaaaggcaaaaaggaacttgcagtatcattgttccagagcgtggttttgatgttgttcaatgacgcacaaaagttaagcttcattgacatcaaagattccactggtatcgaggataaagaattgagacgaacattgcaatctcttgcatgtggtaaagttcgggttctccaaaaataccaaaagggagagatgtagaagataaggatgaatttgtattcaatgaagattttagtgctcctctctaccgcataaaggtaaatgcaattcaaatgaaagagacggtagaagaaaacacgagcaccactgagagagtgttccaggatcggcagtatcaggttgacgcggccatagttcgaataatgaagacgcggaaggtcctcagccacacccttctaataactgagctttaccagcagctcaagttccctgttaagccagctgatatcaagaaaagaatagagagcttgatcgaccgggagtacctggagcgcgacaggagtaacccccagatctacaactatctggcttgacaacgttttggtggatcgttcccatttcattactatcagaaaaaggcactgtaaattaatttattttccggtttcttgttctttcatgcttttcttctctgggaggaagttgtagttgtagctgctgcaacgtgtttatatagaacaattttttcggcatcagtataaaatcaggttccttaaagc

SEQ ID NO: 25954 - DNA, 6576 bp, Zea Mays
ctcaccccaaggagagtcgcagcgacccagccttctccctccctctctctcctctctctctcttcttgcgccgcttttccttcgctgctccgcgcggctccggcgggcggtgcgggaggaagaggagggggcggaggggccggaagttttccggccgaggagcccagcgggaggatcgaagaggaggcactggtccggggctgtccactgcatcgggttcttcgaagttggggggaccacgggactcgaagggagcgcccgatctgctccgccggcgaggtgaagtcagctgatatgatgtacctcatttggataacaatttgactggcaccagattttacagaaatatgcaggaggggctagggcaaaggatgcatgtacctcatggtatcaatctgtgtatcgcaacttcttccatgccctttcaggcgcaatctttcattgagcccagtaccggacaagtgaaccctcctgtaacatctgaaaacttatctgctaactcacaagctgttaatgatgctggagcagttgaaggtactgacatgaacgaaaaatcggttcaaaaacctaagaggaaaaaacataggccaaaggtcattaaagaaggacaatcagcaaagctgcagaagcctaaaactcccaagcctcccaaggaaaatgggaatcagcctactggaaaaagaaagtatgtcaggaggaagggactaagtgcaccagctgaacaaattccactatgtgctgatacacacactagagctaaaccaggagtagtccaaagatgtttggactttgatgtggaggaccagcatggacatttggatctggtaccgcaaacccaggaaacagagatacagactggtcctgcggacacacaaccatcaatatctggagttgaaagaagtaatgttcaaatatcataccattggggtggtacaagcagttctattagttcagttgacccaatagctggtatacacggattacaggcagactgcaattctaaaagagtcagttttgatctgaacaattctatagtaagtcagctgccaaccaattattctagtccaatggacagctctgaacaatttttcaattttgatttaagagaagaagttcgaacaaaccagttattgcctcatctaaccagctcggtagatcacacacgacacccctcggtcaattttgaccaatacataagcacatctcaagattgtccagaaaaatcacccagacattatcagatggtcagtagttatagaattctagaaaatatgacaacagcttctcagtataccgaaagggtgtctatggggggcaatttcaaccctgaagcttgtatgggcgaagatgcaataatcaaacaaatggcccaaagctatagacctctagaaagtccatttgtacctcccaatcataatgaaagggatatgatgaacggaaatctgaacgagtttcctgtgaagaatgattacttgaagttttctaccaatagtaactaccaaactggagcaggttttgatcattgttctccagactattcagatgttcttgcaatgggtacaaaaagagaacatgatgctatcagtggccatcagatttctcttggcattgactttattaactcaaatagaacaaggaagttctgtagtgatgaccccctttccactagctctcaaacatcttactgtcctcaatcatgcaaaaggatgaggccagaggatcatagcaatcagctccatggaactatgggtaagctttcttccgcatcagcattttctgatggtttgaacacaaataaagtttcagctatgaaccctagaattggtaccttggctgacgtacaattgttgatggcccttgagaaatcaaaagcttcacaacaaatgtttgagtttgactatgttacgtcacaaaataacatgatccatgaacgtactgggcttgctctgcaaaatattgctgacaaaggatttattgctctacctaataaacagttcccaagcttcgctgcacagaacatacctttgcctggcagtactgtgaaccaattgggagaaagtaataccttgaggaatggagtgcatcaaattcaaccttgggaaattacatataggctacatgactctagagacaatttttctttaccagggaacacacagttctcgaatggcacagtgaatccatcctcagaaaactatattcagagtaatgctattcatgaacatcaatgcttagaaaacgttgtggctaaggtgccagttttgtctgaaacacaaaatacttccactcaagagggccataaccactgcactgctgctactactgatgagcatatcagaactacaagtgatgaagttgttagatccctcacccgacgtgcaagccaaccaactacaaatgggaactacaatattaaatcttctagagtaactgcagaagcaaactgcactgagaagccaagaaaaaggggtcgtccaagaaaagtagtaaaccccaatggggagccaaaagaaagaggtactaaagggaaacaaaatgttggtcatgcagaacttatatcaccaaaaggttcatgtgctgactttttaaaaactaatggtattacttatgcttctgaatcttccactggaattactcctaggatgtcaactgtggagttgaaaagttctgaccaagataaggagattcatggaggtgccatgcctcaagctacagcagcatcagttgatcctttagatggcataattgaaaagattaagctcttaaccataaacggaccagacaagggtgtgtcagaggtacctaaaaatgctcttgttccttatgaaggtgaatttagtgcactgattgcatttgaggggaaggcaaagaaaagccgtcctcgggccaaagtgaacatcgatccagtcaccactatgatgtggaacttattaatggggccagatatgggtgatgatgccgaagggttagacaaggataaagagaagtggcttgatgaagaaagaagagtgttcagaggacgggttgattcattcattgctcgtatgcatctagttcagggggataggcgtttctctcgatggaaaggatcagtcgtggattcagtcgtgggtgtatttcttacccagaatgtttcagatcatctttctagttctgctttcatggcggttgctgccaaatttcctgttaagatagaggtccctaaaaaacctgtggctgagatgtctcatactcctgaacagaaggatagttgttctggactgtttggtgattctatcaaattgcagggcaatatatacattgaagagataagtgacattaaatcgttaattactacagaagataatgaagaaagtaataataacgaattgattggaaactctgctgggaatggagtaaactgtgcaactggaggatgccatgtctcttatagtaagtcactaactggatcccatggaaatgggctatcaggatctgtttttccaactaccggcttttcaggtgtggtagaaactgaagatggatcactggaggatgttatttcttctcaaaattctgctgtttcttcccagaattccccagattatgttgttcgtagaaccgatccaataggttctagttcgttacaaaatttcactgaagagggctgtattatgagaaatatgtccaatgggactggcatctctactgactatacattgtttctgccaattcaagatccaaaaggcatgctcggattatcagaatattgtggacttaatcctcttccagtttcaggtgtgaacaaggacatgttgcttgatctaaacagatcatatcagccattacatacttatatgccctatgatcagaatagtgagtctgatttcacaggtgtgtcatgtttgaaccatatgggtaaatcattccacacaggccctgataaagtgaatctttccagtgttacacagtctgaggctagtctttaccctattgatcctttagaacaaggcgacttttcaccactaattaaacaaaacttccaaccattacatagttcagacgaagtgccatttttcaaggagcactcttcatgtaatgattttttgaggaacaaaactgaagctcattttctggaaccacttgtctgttcaaatcctcaagaggtgtacacaacctcaacagatcaaatgggtgctgaacaatctcaatcaggatgtggccaaaagtacaatgatgccagagttcagacagcatcacatgaaaggcatcagtcttcaaccttgtgtgataaccagaactcttgttcggtggtgttgcaaggagttgcttcagactcaacacagaagttcgttgatactcaaaaggggccgtcaaaagctcgacaaaatggatcaaaagctaaggtacggggccgacctaaaaagaaaactgatgactgggacagtttacggaaaaaagtgctttctaatggtggggacaaacaaagaagtcatgatgcaagggatactgttgattgggaggcagttaggcaagcagaagtacgggaaatatctgaaaccatcagagagagaggaatgaataatatgctagcagaacggataaaggaattcttgaaccgattggtgacagaccatggaagcattgatcttgaatggctaagagatgttcaaccagacaaagcaaaggacttccttctaagcattagagggcttggactcaaaagtgttgagtgtgttcgcctcttgacactacatcatatggcttttccagtggacacaaatgttggtcggatatgtgtgaggcttggatgggtgccacttcaaccactgccagagtctcttcagttgcacctcttggaaatgtatcccatgctggagcacatacagaagtacctctggcctcgactatgcaaactagatcaacgtacattgttttctgcacaaaaagtaagcctaattgcaattcatgtccaatgagagctgaatgtaagcactttgctagtgcatttgcaagtgctaggcttgctcttcctgcacctgaagaaaaatgtttggttacattggaagatccaaatgttgtagagttttctcaccaaacatacataaactcagggagtgttggccaacttgagtggagtgcaaattatcctaaacatgctgtttctggtaatcatcagccaatcatcgaggaaccactgagcccagaatgtgaaactgaaaatatagaggcacatgagggtgcaattgaggatttcttttgtgaagaatctgatgaaattcctaccattaatcttaatatcgaggagttcacacaaaacttgaaggactatatgcaagcaaacaatgttgagattgaatatgctgacatgtcaaaggcattggttgccatcacgcctgatgctgcttccattccaactccaaagctcaagaatgtcaatcgtctgaggacagaacaccaagtttatgaactgccagattcacaccctcttctggaaggattcgaacagagagaaccagatgatccctgtccatatcttctttccatatggaccccaggtgaaactgcacaatcgatcgatgcccccaagacattctgtgattcaggggagacgggtagactatgtggaagttcaacatgctttagttgcaacaatatacgagaaatgcaggctcagaaagtcagaggaacacttttgataccatgccgaacagcaatgagaggaagcttcccacttaatgggacgtattttcaagttaatgaggtatttgctgaccattgctcaagtcaaaatccaattgatgtcccacgaagttggatttgggacctcccaagacgaactgtttactttggaacctcagttcctacaatattcagaggtttaacgactgaagagatacaacgatgcttttggagaggatttgtttgcgtgaggggctttgataggacagtgagggcaccaaggcccctttatgcaaggttgcattttcctgtcagcaaggttgttagaggcaaaaagcctggagcagcaagagcagaagaataatagtacattgaagaaatataggggtgctaaccagacgaggatggatagcccgaaatgagatgctgacccaataggtcgccaaatcacctccaaattctaacccaatgacttccatctgtaatgaatggcaataccttgaaaacctgtgatggagatgttttgtggcgacatgatctcttaaattagattccgtctttggtaacagcctagctgttcttgttgagtcgcatattctttattctgaagatcaatatagcaaatgggagaaaaaacatagtgcacagtcgagctgttctaattgtacctcttgtgagtggaatcagttgttgtacaacaggaagatggacctatctgtacaatggtcgtacatgttctttgatcatagtataaacaatgtaagcctcatcagccgttatttgattgtttcaaaacaaaggaaaagcattttcaattcatctgttcaaagactatttccttttccccccttctatcttgagatggaaactgactaattttttacttgtggggatctgacagtgaatatatcaaaa

SEQ ID NO: 25955 - DNA, 200 bp, Zea Mays
tggttcgtcaagatttttcagtcaaggagagattccaagagtatgtggagaaacaagccctaggtcgatgccccaagtgctcggcgaaaggcctgaacaaggatcatcgtcgtttattcggactgctagtcgatatggtacgctagttgatcgcgcgatgtggaagacgagccaagtcgaccccaagcgcgggctactcc

SEQ ID NO: 25956 - DNA, 1117 bp, Zea Mays
cttagggtagggaccagggcatgtgttcgtctagttgctttcgctccgactgccatatctgctcaccagctgacgtgcatatgcttgctctgcgtgcatatagatagttggttggcgttccaattctaaatggcaacaccagtactgtgcattgacacaatgacaggaaagccagttggcgaggcaatccattcaaatctgagggcagctgattatggctggagagtgcaaactggtgggctcggcaagttgctgccactgcagggaaatcgtgtggaaggtaatggagcaagtaaaggcagaatctgatcaatggactgagatgcaagaaatgttggagcaggtgaggttggagatgcaagagctgcaggcttccagagatgcatggcagcatcgggctatggcttctgacatcagtctacgctccttgaattcccaagtactggagtggaaaaaccgggcacaagcgtccgaacagcgtgtagaagagctgcatagggagattttagagctcgaaagcaagctacacactttcaaagcccacttaccagctccagctgctattcctaaccaaaagcaatggtcggatgcgtgcaagatggagtacccgagagcaaagcctcagcacccgcggtcccaggaatccggcaaggaggagatcaagaagcacgtcctcatctgccgcgtgaagcgctcacccagcagcgtgctctcgaagcggtcgccgttccaggagataggcaacatcagcttgccgcggcattagtgaggaccgaggagcatgggtggcgatgttgctctgtgacctgtgtgtgagtgatggggatactgcagcgaaaccgcgaagggttcagccgtaagcgggagagagagtagcatcgtgatcgatcagcatctacgtaataaataatttatgtatgacccactgatgagtaacaaggcctgacttctcgtcagatcggtagtaataattataagtagtcagtgactgagttgagagcctgagatggagttaatctgcccggagtacagtgccggtgaataggtcagatatgtatgtaacgataacgcctctttttgctaatatatatgtgcaattttgttcctcctgcattcc

SEQ ID NO: 25957 - DNA, 149 bp, Zea Mays
agaatcgaaacgtagctaacgtaaataaacccaccacaggcagctgactgggggaggtcgctagcctaatcctcgaactcgtcgacgtcgtggaactaccagagatccgcctcgacatcgttctccttcttctttacctgagcatagat

SEQ ID NO: 25958 - DNA, 947 bp, Zea Mays
catgattgatagcaagcacacaagcagagatataaaatgtgccaatatcctagttgatgcaagcggactggtcaaattggcagattttggacttgcaaaggagatgtcaattttgagccaggcaaaatctagcaagggaactgtctactggatggcccctgaggttgctaaggctaagccacatggacctccagcggacatatggagtcttggctgcacagttttggagatgctgacaggcgaagtgccgtatcctgatatggaatggacgcaggctttgctcaaaattggtaggggaataccaccagaaattcctaatacattatcagaagatgcgcgtgatttcataaagaagtgtgtccaagcaaatccaaatgaccggccatgtgctgctcagttattcgagcacccatttgtgcagcggccactgcaacaatatggcgtgtgatgttctccttggctgctaacacatttgattgtacataagctgatttaacttacatgcctaagctgttgatattatgagaatgatcccttggcccgagttccgagagtgaaccctcaatctgaaggcatccgttgctcaatgttccattttcatgctttgtagtttaggtttaggggtaggtcatcccttgctcactgtaccattttcatgatttgtagtttatggggtctaaaattgctttcaatctggtaagcacacccagacacttagaagcaacaatgtttgctttgatgtgggatgacttgtataagtggttcttttcgagcttgtccactttttacaccatgctctaacgactgtctcagcatgatatgcataatgataaacaagggaaatggtttaaaatgatgtttattggcgccttttgaaataccacatgtttaaaacgatgactattggcaccttttgaaataccatatgtcaacagagtggctcttat

SEQ ID NO: 25959 - DNA, 873 bp, Zea Mays
ctcagccctatcccagttccgtccgtccgttctgacctcggctcgtcgggcagcggcgcccggcgcaccacacaggctttctccaactctccgccctcgccatggccatgaccgtggcagccgcctggcttccgtcgaccgcctctcgccggagaatcttatcctctccgctccctccgttcgcggcccctatctccatccacatgccacggcgggcgccgcctcccagtcccatccatccaaagccgcgcctcttcgtcgcctacgcgcagctcgatttctccagagctgttcaaacagcatggagggtcggtaacgatgctgtggaggcaggaagtaatcttgtcccaggttcagttccacgaccaattgccaggataggtgttgcctttgctgctgtgtcagtcgcctttttccttgtcaaatccattgtgtccactgcattatttgttctggtaagcagtcacgacatttgcggcaatgatgggccttatatatctcagcttcctggctatgaacccaaaggaggcatccggctctaggctggatgaagcaatgggcaacccatcggaggaccctgttgaagaggcccgtaggataatggacaaatacaagtaattaacctgtgcaaaggtgctgtactctcagaggtatgatttgtctgtagagcttccttgcgtgacgtgaggggtgatggatgggtggatctgattttagcatactacactacactcagtgttttgatatatgtaaatatagttgcacggttgatgaccaaatgaattccgcaaatcaacaagaggttaccaatttccgggtcacaaaaaaaaaagaggtcgagtttggactaacacggtccaacaaaatcacgac

SEQ ID NO: 25960 - DNA, 4144 bp, Zea Mays
ctagccttcgggactcgccatctcccagccgcacgctcttctcgcccacgcacacacgattccttctcgcgctctcgagattcttcccacacgcacacggaagattcccgcctcctcccctctgtcgccgctgctgccaacgctagcaccgatgccacctcttggttcccaggttgtgtcttgcctctttccatccaccgtcatcgccgctacctatggcttccccgtcgggtcgtctcttgcctcattctgttccccgccgctgctctcgccacccactatcggaggcattgtgtccagaaacatggttaagagggtatgctgtctgagcgccagggagatccgaacggtgatgccctctactcgcttcccattgtcctagagtcaggcaaatggaggaacatgagtcagtggggctgccatagttggagaatgcggcgtaagcaggccgacgacggcgagttcctcaacatgtactccggtgaaattttggtggtggttccgtgacctgacatctttccaatatcgaagatgagaaataccgaggctgttatagatctcttctttttttaggagttttctattttacaaaatagctaaactatggaatttggctaataactttagattagctctcggagttgctcttcatgcgccacatccgtagtcgcacgcacctaccatgtgcacccaacgagcatgtactattattattttcctaatctttcttggccccttacacagctgcttcgtcatttccagccatatgcgtgatgacagctcctccgtcattaccatttgttttatggtaccaagcaattagcaagagaaacacaaggtcgaggtggtgaggtatggagctcgccttgggggccatgaccagcttggcccttaagctaggcgacctgctcatggaggagtatgtcgtgcagaagggcctcaagcccgacatcgagtctctctccagggagcttgtgatgatgaacgccgctctcatcgacgcgtcccgggttccacctgaccagctcaccgaggtggaaaagctttgggcacgcaaggtccgggacctgtcgtatgacatggaggacgccgtcgacgatttcatcctgcgtgtggctggtggtgacgactctgccgccgactcaaaattcttcaagaagacccttgccatggtcaaggacgtgatgtcgatgaagaagttcaaggatcggcgccagatctccgacaaggtcaaagacatcaagaaactctccaacgagttagctgaacttcgtgccaagtacacggtaaggggtgtgggcgctgatctcgccgcgagcaccggcatcgaccctcgtgtcatcaatctgtacaagaaagagacagatctcgttggcatcaagaagtcaaggaacaaagtcattaggatgctgtctatggagaccaaagatgatgatgcacttgagtcccatcaggctctaaagatagtgtctatagtcggggttggaggactaggtacttgatcgttgttgatgacatatgggatgttgactcatgggaagcaatcagatatgccttgaaggacaataattgtggaagtagaataatcatgactactcgtaattttgggattgtcacgaaattagaagaggtttatagattaaaacctctttctaatgcaaactccaagaaattgttctacaaaagaatagagagtcaggaaggagaaagccttgatggtgaactctctagtaaaatcatacataaatgtggcggcataccattggctatcattgcaatagctagtttgttggttgaaagatcacgtgaggagtggtcagaagtgtacgacaagattggtcttgggaatgaagacaatacaacaaagataatgtcatacagctactatgatctgcctccttatctcaagccatgtctgctgcaactaagcatatatccagaagactgtatcattgatacaaactctaccatatggaagtggataggtgaaggtctagttcatcttgagaaagaagagggtagcctatttaaggttggagaaagatacttcaaggagcttgtgaatagaagcatgatccagccgacagaggacaaaaatgatcggtttgtagaagggttccgtattcacgacattgtgtttgatctcatctgtaagttgtccaaggatgaagacttcattaccattagcgggcaacattcatctcgggatagtttaagaagagagaagaaaacatgtgtgcctcgctcagactgcaagctacgtcggctggccgtccgaaatcaacgtgtgcagcgcttccctgaagaaaccatcgacatgccagaggtgttgagatcacttagcattatagattgtaatattgaggttatggccccaattgatagcttcagggtttgccgtgtgctgcatctggggaagagctacgtacccatcagcctaaagcatctggggaagctgttgcatctcaagttcctagagatagtatacacgcctattgatgagctccctaaggaaattgggcatctgaggtctcttcagacactgatattagaccgtactggactagacgagctgccaccggttgtttgctcgcttacacggttgatgtgcctgatagcccaggggttcgaaaggttgccagctgacaggatggggaacctaacgtccctggaggagctacgactacgtagggtagttggccggagtgccacccaagccctagtggcagagcttggcaagctgacgaggttgagggtggtcgacatcaccttttcagagcagctagaggagagcttgcaagaagcattggtgcaatctctgtccaatctgcggggactccaggaactaacgcttttgtttaaaatgacacggtggggaagcgatatgtggggagactgggagccaccaaggcagctccggcgcctgattattgaaggcatcatcgtcttctcacgacagcctcgatggatcaaccgctcctgtctgccacgcctctgctacttatctctgatggtgcacactcttgaagcacaggacctagataatctagcgaggttgccagagctccagtacctcacgctagatggtctcagctggcctccaaggtatactgttggcccagacgacttcaggaatctgaggttctgcaaagtgggcacaacgttcgagtttcgtaagggcgccatgccaaggctcgaagtgctgcaatttagagtttttgcagggtactattgttgggcatacaatggtgtgccgttcgagcagttcccaacgaaggatcttgacttggacctggataacgtccttttacttcagcaagtaatagtcaaagtcaactgcgtaggtgctactgtcacacaagtggaggaggtggaggccgtggtcatgcgtgccgtggaaaatcatgccaaccgtccaaccataaaaatgaatcgagcatatgaaatagctatcctatccgacgaagggcgggaggctctgcttcggcgacacattgaaaaggattgctgcgtgcgcacgatgaaggataaatctgatgctttcttcatcagccagctgcggaggtatcgacatcttcagaaagccattattttcatcgactgttcgggtgccagcatgtgtgaggtgcagaaagtggaagcagcttttagacatgcagccgaggttcatcctaaccatccaagtattgaacttatcagaacaaacaccgacggaatggcctcctcctcatctgaccatcccaacacagagcccaggaattgatggctcggtttgtcagatccttccaacccaggagcaggtaaatgtgagttgcttaagtaccaaagagagaggtcctgttcagcaagatgattagaagcattggcaattggcatggcttgttaattagattcgtggttcttagtctaaaatcacattgaagagggagacggacccaagtgatgcagttcatgtgttatctgtatcagtctctgtttttataagctgtcatatattttctcgaaactatcttgtgttgattttgtgtgaagtgtacttttaatggcacgggccattgtgtatttgcttgaaagataaggatggtattatctttgtatttgaactctaaatgcttaaatgaagtgatcattctggatggagata

SEQ ID NO: 25961 - DNA, 3011 bp, Zea Mays
cccatgtcagctgaggtctgctcacctgtgtgagagagagtgtgtgagtgtgaccgtgggtggggtggggaggaagacgagcccgtcgagctgtgccgattttgcccccgaatccgtcgttacccctgctttggagggatctgaaggtgctggtggcctgctgctgcctgcctgtctgccaggagcccagaggccagaggtgagtgactggcccgatgaattccgcaatcttgtggagctgtggtgctggcgtggcgctgccgtgctgctggcagagactgtggtggtggtgatggcggctgtgcagcggaaaggcttctcgtcgtggtactagtggaggaggcgtgaaatttcatccataaaggctgtcgcggtggccggtgggtggagatcgcgctcaattcccgccgaaaccgcctccggggtagcgtggccgcgggaagtgggagtgggagatgattactttcgtggactcggcggccatggagctggagagggagagcggcaggtgcctggtggacccgcagctgtggcacgcctgcgccggcggcatggtccagatgccgccggtgcactccagggtgtactacttcccgcagggccacgccgagcacgcgcagggccacgcccacgccgacctccccgccggccgggtcccggccctcgtcctctgccgcgtcgacgccgtccggttcctggccgatccggacaccgacgaggtgctcgccagggtccgcctcgcccccgtccggcccaacgagccggaccacgccgacgccgcggcgccgggcgcgcgggaggacaagcccgcgtccttcgccaagacgctcacgcagtccgacgccaacaacggcgggggcttctccgtgccgcggtactgcgccgagaccatcttcccgcggctggactactccgccgacccgcccgtccagaccgtgctcgccaaggacgtgcacggcgtcgtctggaagttccgccacatctaccgcggcacgccccggcgccacctgctcaccaccgggtggagcgccttcgtgaaccagaagaggctcgtcgcgggggactccatcgtgttcatgaggacggggaacggggacctctgcgtcggcatccggcgcgccaaaaagggcggcatcggaggagggccggagttcccgcaccaccagccgccagacggcggcgggtacgggtacgggtacgccggcttctccacgttcctgagaggagaagaggacgacgcggccgcgaggggcaaggtcagggtgctggtgcggccggaggaggtcgtcgaggccgccaacctcgcggcgagcgggcagccgttcgaggtggtctactacccgagggcgagcacgccggagttctgcgtcaaggcgggggcggtccgcgcggccatgcgcacccagtggtgcgccgggatgaggttcaagatggccttcgagacggaggactcgtccaggatcagctggttcatgggcactgtcgccgccgtgcaggtcgctgaccccatccgatggcccaattcaccctggaggcttcttcaggtcgcttgggatgaaccggacttgttacagaacgtgaagagagtgagcccatggctggtcgagcttgtctcaagcacgccggccatccaccacctcacgccgttctcgccgccaagcaggaagaagctgtgtatcccattgtacccggagggccaccagctcccggcgccgatgttccacggaagccctctggtgggccgtggtgttggcccgatgcgctacttcccggacggcggcactcctcctgcaggcatacagggagccaggcatgcgcaattcggcatatctttaccagatctccaccacctcaccaggctgcagtcgagtctatcgccgcacgcgcacgggcttcgccaccagctcgaccacggcgcgcggccgaggatcgccggcggcctcatcgtcggccacccggcagctcgggacgacatctcgtgcttgctcaccattggcaccgccccgcacaagaaaccatcagacgtcaagtcggccgcggcggcgccggcgccgcagctgatgctgtttgggaaaccgattctcaccgagcagcagatatctctaggctttcggccgctgccggcgccgaagaagagcccgtccgacgacgctgctgagactgagaggacggtgagcaacaactcggatgcctcgagcccagctgggactgcgagtgggagcacgccgtccatcagtggaggcgccccgtcgtcgtgccaggacaacaaggcggcggcgacggcgacggcgactgatgacgacgatctcctcgggcactgcaaggtgttcatgcagtcggaggacgtcgggcgcacgctcgacctctcggctgtcgcgtcgtacgaggagctctaccagaggctggccgacatgttcggcgtcgacagggccgagctgacgagccatgtcttctaccgcgacggcgcttctggagcgctcaagcacgccggcgacgagcctttcagtgagttcaccaagaccgctcggaggctgaccatacaaacggacgcgaggtagaagaaggcggcagacaatgaagctctcgtcgcctgtacaaccggggggagctagcgagccgcggcggcgatctcgaaggacgatcgccacttgcagagtgctggtgcagactgcagagagggcggtgctgctgtcgtgtcggtcgtttcttatcagctcttttgttgcctgcaaaatgaatttaaagaatgtgctctgtcacgctgccacgtcagtcagtcagcacgcagtcgacaccgcccaccggtactgttccactgctatgtggccgtgttgcgtccatgccctgtcgttgttcctgttgccgggtataagtgtacattcgggccgcccggctcggcccggcccaagcctgaaaaggctcgtattgtttgaatttcgggccggtccggtccgtttgaatttcgggccgtgccgggccggcccatgggcctagctctcggcccacggccc

SEQ ID NO: 25962 - DNA, 1586 bp, Zea Mays
tcttcatcgactacagtccacagccatcgcagaagtcggaggagtggacagcagagaggatgagccagctaaaggagaaaatagctgggctattcggagcctgcacgacgacagccgagcaactcaacctagtggacacgctccagcatctaagcatagaccaccatttcagcacccagatcctctccgtcctcactagcgcccacgccgcggaagaactcaacagcggcggcgcctgtctccacgacgtcgcccttcggttccgcctgctgcggcagcaagggttctgggtgtctccagaggtattcgaccggttcagagacgaaaacgggagctttgacgtcggcgtggcagacgacgacgcgagggggctgctgagcctatacaacgcggcttaccttctcacccatggagaggcagagctcgaggaggctgcattgttcgccaggcagcgtcttgagtccatgtccatgagaggtagccttgagtacccgctggcccagcaggtgagccgagcgctccacctgccactgccgcggacggtcagaagagtcgagactctgcattatgtctcggagtacggaggagacccgacgcatgagcatgagcatgacccctccgttctggagttcgcccggctggatttcgagctcttgcaacgtctccacgtgaaggagctcaaggctctttctaggtggtggaaagatctctacaacgaagctggagtgacctactcgcgggaccgcgtggtggagtgctacctgtggtcttacacggcgtactacgaggaagaacacgcgagggcgaggatgatcctcgctaagatgatcgcgctgataatcttgacggacgacacctacgacgtccgcgctactctggaggagtgtcgaaggttcgatgaagctatacagagatgggacgagagcgctgtttctctcctgccggactacctgaagaagttctacctcaagctgatgaacatctttgaggagtttgaggacgagctggaaccacatgagaagtgcagggtcgcttttagcagaaaagcgtttcaaacattatcgagtaattatctccaagaagcggaatggtttcatggccgttacaagccaagattcgaagatcaggtaaaggtatccactgtgtgctcaggcgctccattcgcagctgttgggttactagttggcatgggaggtgatgtagcaacccaggaggcacttgagtgggcaatgggttgcacggatgctgtcaaggctttcgcagaggtcacacgcttcatgaatgaccttgcttcgtataagcgtggaaagaacaaaaacgacgtggacagctcggtcgaatgctacatcagtgagcatggcgtcacagctgaggttgcctttgcacagataagctccctgattgaagatgcatggaaaactataaacggagcacgctttgagaacagcaaactacttccagcagtgcagcgagttgccgacataaccgccagcatgccgttgatgtacggtgacaacaaggacgcgttcacgttcagcgacggtctaaaggggctcatcgaacgcctgtttctcaacaggccataa

SEQ ID NO: 25963 - DNA, 3087 bp, Zea Mays
cggcacgccccaggggcatgcgccgccgcgccacgcgcgcgcgcggccctttcgggagcaggagcgggacctcgccgcttcctacgcgcgcgagattggctcctgcgtccgcgtgcggcgctggggcgcagcgtgcgaggcgtttgcgtcaatgctcaccgcgggagccgccccagacaggttcctcctcccgcaggtgctccgcgcttgcgccggccttggtgcgccccgccttgcatccgccgcgcatgcgctcgccgccaagggcggggccgagctagcgggggaccccgttgtcgggaacgcgatcgtcgccatgtatgcggcgctgggggacgtggcctccgcccgcgccgcgttcgcgtcgctgcccgaccgcgacgtcgtggcgtggaccgcgctcatcagcgcgcacgccgacgctggggagctggaagaggccttcgacctgtttgaagagatgcaagagagcggcgttcgcccggacgtgatctcatggaacacgctggtgtctggatttgcaagaagtggtgacctcgttgctgctctgcatctgtttgacgagatgcggcaaagaggtgtcgacccgggagtcaattcttggaattgcatcatctcgggctgtgtgcagaatgcactgtatgaagaggctttggaggtttttctggagatgtgtgagagtgagaggcctgatgcggtgactgtggctagtattctccctgcttgtgctggcttgcaggcactaggcattggaaagcagctgcattcttatgttttgcggtgtggaatcaagatcaatgtgtatgttggagcatctttgattagcttgtactctgagtgcggagaatttgatgatgcgagagttgtcttttccaccattcaggagaagaatgtcaatgtgtggaatgagttagttcaatcatataccagagaggggaggatggacaaagcttgggatgtttttgacttgatgcaggaggatggattgaagcctgacattgtcacctataacactttaattgctgcatatgctaaagtgggtcagaatgaacaaacatatgaactgttttcacgcatggctgacgtcggcttaaagcctaatgtggtctcaatgaatgcattgatttgtggtttgcatcaacatggcctttacacagatgcacttgaagctttcagatacatgcagcgttccagtgatggaaaagcaaagggttggacatttcttgataatcgtggcccaattcaaccaactggcacaaccattactggtctcctctcattattggcagacctcaagttagatcgtcttgggaaggaagtacactgctatgctttaaagaatggtttggcatcaaacatctacgtttcaagcaaactagttgacttctatggtaagactgacgacatgacgtctgctgctaatgtcttccagaaaatcaggaataagaatgttgtcacatggaacagtctgctggcagcctacaagcataataggaagccagaagcaacactgaggctgctcgctgaaatgctcgagtctaattttgatcccaatttggtaacaatacacatagctcttatgtcgtgtggtatgacaatggcattgggatatggtagagaactgcacagctacatcataaaatgctggcctggtggttacccagctactcttgcaagtgctttgatagatatgtatggtaaatgtggtaatattgaggatgctaggttggtcttcaagtccatggttccaaaggacgtagcagtatggaacgcaatgatgagttgctatttgcttcataggatgcctaaggatattatagatttgttcaattatctggaacagtcaggtattcaaccggatcacattactttcattttacttctttcagcttgtaagcaagaaggtctgttggaggaagctcagagctatttctacaatatggaagatgtatatggcataaaaccatctttaaagcactatacttgcttggttgatatcatgggatcagccgggctactggcggagtcactaacacttatccaaaagatgccgcttaaaccggatgcgtgcctgtggtcgactgtgcttaaagcttgtaagctgtactcaaatctagagattggggaaaaggcggcaaaagctcttttcgagcttgaaccaaataatacttcaaactacatggtgctttcgaacatatatgcagacacaggcctgtgggattccaccaaggctgtgagggatgccatgacagagcaagggttacatgttgagagacaatgcagctggttatacaatggtacaactgtgcaccctttcgaggctggaaacttgtcacatcccgcaattgatacaattttgagtacatgggaagacttagctaccaggatggagcaatctgggtactcccctcaagatattggcccctattacaatgtagaagttgacccactgtcatgccaccacacagagaagatcgcagtgtgttacgggcttatctccacatctggtcaacagccaatacgcatctcaaagaattttaggatgtgcatggagtgccattcatccatcaagttcatttcaagggataagggccgggagataatcgtttcagacggtcgcacctatcaccattttaaggatggaacacaaatatcggcctggcaacatttgcgcacacacttgcactgtcagttatggctagtatcaacaatctatgccaccatcttgaagcattcaacacttctaagtatatccagtttgctctcgcgggccaggcgggacccaaggcaacaaatttggccagcttcatgtgtgaatctaaagctttttactgtaaagggacaagctacaatgaataccttagtgattgggtgcaaggttgggtatgctcctgtggcgtcctcagttgatgccaattcaggaagtcttaaaagtttcacaggcttccataaaaagaaaagccatgggcattcatcttaccaactacgagtggtccatgctgtagatactcatgacagtcgcactgttcagctgttcatctacagacgcagattcaccctatctacatacttttatggaaaagcaaa

SEQ ID NO: 25964 - DNA, 2477 bp, Zea Mays
tcttggcttgctgtatcttagtttcacggtgagaggacatttggtgtgttgacaaagcttgatttaatggacaagggaacaaatgcacttgacgttcttgaaggaagagcttacagactgcagcatccctgggttggaattgtgaaccgttcacaagcagatatcaacaagaatgttgacatgattattgctaggcgaaaagagcaggagttcttcgattctagtcctgaatattctcatcttgccagcaggatgggttcagaatatcttgctaaacttctttcacagcatctagaggccgcgatcagatcacgcattccgagcataacctctctgataaacaaaactattgatgagcttgaatctgagatggatcacctcggtagacctattgcttctgatgctggggctcagttgtacctcatcttggagctttgccgtgcatttgacaaaatatttaaagaacatcttgatggcggccgacctggcggtgatagaatttatggggtctttgataaccaactcccttctgctctgcggaagctcccatttgatcgtcatctctccgtgcaaaatgtgaagcgggttgtttcacaggcagatggttatcagcctcatttaattgctcctgagcaagggtaccgtcggctgattgaatcttctctcaattattttagaggaccagcggaagcctctgtagatgctgtgcattctgttttgaaagagctggtgaggatatccattggggagacacaggagttaaaacgatttccatctctacaaacggagctagctgctgcatgctataaggcccttgagagattccgcgaagatggcaggaaaactactctacggctggttgatatggagtctgcatatttgactgtggagttcttccgcaagctcccacaggaagttgataagactggaactggaaatcccagaaatgccaatcctcctgctccttcggatgatcgttacgctgatgcacatttcaggaggattgcttctaacgtgtcctcatacattggcatggtatctgaaacgctgaagaatactatccccaagtctgttgttcactgtcaggtccgcgaagctaagcggtccctgcttaaccatttctatactcaagtgggcgggaaagatgctaagcaacttgcagtactccttgacgaggatcctgccctcatggaacgcaggctgcaatgctttaagaggcttgagctgtacaagtctgctcgggacgagattgatgccgtgtcgtggacaagatgaaggtaacgcatgccatgcttgttaatatattcgctttctccattagacacattgtaattctactagtgcagaattagcagctagccattgtgcacactgattgtcaagtatagcagaccgagcacctgtctcgtatcttagcctgttaatatcagtagttgtgtgcttgactgcttgtgttgtatctatgtctcaactcccaactgttatcaggtgcaaatttctgtccttagtaacccatgtgcaaacttgtatgcacgaacgatacctggattctgtaggatgcacatgccgatcttcttcccatgctgtagttaggtgtagactgcagaactgggacttctaatgtgaaaataatgttttatgcaacttgtcattagtcaatcacattatcacactgtagaataattttttgttggctgcgagcattaccatgcgatttgggggtggtccacactaacatgtacgcattgcatgagaccctttcaataaacaatactggcactgcgtctgaacattcttggcctgctggacctgcaagacacgtctgccatctatcttagttcaatttgttagcgttattgcttgacattttccacatccgggatgaatgacgcgtgctgcgtgcggtgcagaatccgaaacaggtcagtcaactcccgcatgatccttggtcaatttcacgatacttatttgccctgctcgcgttcttttctggtcagttgcgcgctctgttgatgtgacccttttggtccgtccgggaaatcgtcgcctgctggccatggattcacgctttctagaggacgtgtgttgcccgccgtgcgcccttccatgagttccccgcatagaacaggtcgtcttctggaacagaaaggcgaagcgcgtggcgagctgtcctgattttgacgagtccatgcatcttcagcagattggactggtcgccataagaacacgaaactgtgattaggaggcatacacgtcatctgctagtgtttccggtgaagtcagttgccaccatgacctgctaggcagaaataaatatgcccctattaatcgggccttgatctgtcgtcctcattgctgaaaacctcacccaaattgcatcttatagcacattcgtcgccatggatatggtcattggctgtgccggctgtgagctgtcaacattttgtacagtactacatttccaaaatctaaaccgg

SEQ ID NO: 25965 - DNA, 1137 bp, Zea Mays
cgaaagtgaagtgaggagaaggttacactcaacaattgcttggccctccaaaaaggtcttggttaagtttgaagatgtcgtgcttggcatgctgtggcggcgaagatactcaaagaacacctgataatggaggtccataccctggtggctacccaccaagtatccatggtgtcaaggcttaagcatggcaatgtcgtagagttgcttggttactgtgttgatggaaacacccgcatccttgcatatgaatttgctactatgggttctcttcacgatatgcttcatggacgcaaaggtgtgaaaggagctcagcctggtccagtcctgtcctggacacaacgagtgaagattgctgttggagcagcaaaaggccttgagtatcttcatgagaaagcgcagcctcatattatacacagggacatcaagtccagtaatgttcttctatttgatgacgacgtatctaaaatagctgattttgatttgtcaaaccaagctccggatatggcagctcgacttcattcgaccagagttcttggaacatttggctatcatgcacctgagtatgcaatgactggacaacttagctctaagagtgacgtttacagttttggagttgttcttctggagctcctgactggaagaaagcctgtggatcatacattaccaagaggacagcaaagtcttgtgacatgggcaactccacggctttgtgaagataaagttaggcaatgcgttgattcaagacttggagtagaatatcctcctaaatccgttgcaaagtttgcagctgttgctgcactgtgtgtgcaatatgaagctgactttcgacccaacatgagcatcgtggtgaaggcgcttcagcccctgctgaatgcacgtgcatccaacaaccctggatgaatgaatgaatgactgccgttgcttttccctgacgagagtatctgaatcagacaacatgtagcattgaattcagataaatatagtgtttggcttaatacacttggccctagatgttcatcaggagataacctcttgcagtttctggatgttacctagtctttgtatccctaaactgtaacctattgttcggttgcgttccatctggtgttgtttacatccaccatccatgaagtcaag

SEQ ID NO: 25966 - DNA, 3275 bp, Zea Mays
cagaaggccaccaagttgatgatcacaagctttgtccacggttcagacggcctgggaaaccaggatttccctccatcagctaccaagcctgtagatcaatcggctgctgccttcctggttgagcaaccaaatctataccctggacaagttaccattgtcgccctcagtccactaaccaaccttgctctgacagtcgagcttgaccctttgttctcgaagaatatatggcagattatttttcttggcggtgtgtattcaattaatggtaatgtgaactatgcagctgaggcaaatgtagatattgtgttcacccgcggtgctgatattttggctatggtactaattgtaacacatcaagtagttttaacccgtaattctgccatatttaagggtcacattatttctgctcaggatgtatgcttcatatactgagataatgcttcttttataacctacttctcattagtcaatggcaatctctactactctataagggtccagtgtgggcgtccacactggtaccgtgcccccgcccccaaaattctcgccccgcctcgctctccgtcgcgccattccagggaccctccatcgccgcccccgccatcatcgcgtcagcgcccgcgctccgtcgatggaaggcgccattccagggacccaccccaaccctgcgatcctcacccttccaaggatgccccgcacccatctcgtccaatccctcctcccgcctcacccgctcacaaggtcgacgacgacgaatctaaggacgccaacgccacccctctctgagctccctatggccactgcgggtgagtgcctctgggtagccggtcacccctctcttgcagcctccgagcttcggcgaacgcagaactggcagggcgcgacggccgacgcaatgtacgtgggtagccggcgtccaatgtcggccgccgctggcgagcgcccccggcgcggctgcccaaccaagctctgtccagatctgaccgtctagggcgaggtgaccccctcctggcggcgagcgagacagcccccactccaccccacctcgcaacagccaccgatcagtggagcgcactcaaaactgttggatttattttggaacttaggtgaaggaggaatgggtggagggacgagcaagatggcaacgttctattgaaacaaactgcctcgattattaggctatcattactaaacaaactacctttatcgtcaacctactaacttccatattcttcacattcagctttgcaaaatttacttgactggattttttagcttaacatataactcagggagacatgcgattttgggacgatcaaactgttggtaagtaaatacttgttggcctgttgctcttcttttagctatagctgaccataatttttcttggttgaggaaactgtagttagtgatagctcaatattttgtgtgtagaaacctgtataaagtattggacatgtatttcatagtttttgtaacttataaggctatgtaagtcacagattaactcttcaaagaattatacaacaaagaaattagcgctcagaaatgggatctttgcatttttagtcttgctcattttttattattcatgtatgactcatggttttctagagaaaaatattggaccgttacaataatgctaatatggtgttaatctaggattgctcattttgagtattcttgtacgactcatggttttctagagaaaagatcttggactgtagcactacctccacttgtgagatctggacttctgtagttatatgccatagcaacactgaaagtgacaatgtttgaatggtatagttcttttccttggtcggtgatatatattcacttgatggtatagctctgccaaaagcacaacagctcgtgcttgatccacaaaaaataggatgctcatgtgattgtattttgattttttagttttatttttgttgcatgtataatccaatcgccgagatcgacctctaccgtctcgagccataggacctcccctccctcttcaacatccgcagtcacaacgccaaggggtagttcttcgcccgtgcggtcgaggcggtcccagcaacaggaccaaccacgcacacgccgatggggtactggagatccggacggagtagcattcttgctggcccagggtcagcccacttcttgcgcaagtttgttgttgggaaccaatggaatccgactattcatttttcttgcggatggtcgtgtcggtggggtcaagaaaattctctggaatttggcactgataagatagaaatgcatgttggggctgtacaggccaacgatcgagctcttgtagtcgatgatcttattgccacccgtgtgcagctgtcaaacttatcggagatggacgatgaagcgttggatcaaggagatggaggttggatcaaggagatggaggaggtggccgccacggccaccacttccaggtcgattatgccctttagggccatccagaagggcaagccgttgtcggtgtccttggcatcgagaagaagtccacccctaagctctagaactccaggtgctcgccgtggccacaagcgtgtagtcccccgacgcagagaagaggaagggcatgtggcgtagttagagggatctgaaccctagcggtcgtccgcccgtccagatctgtgacccgcccttctcgacgcttcggtgacatgagtgcctggaaatctagggaggcgaaaagagttcagtcatgtcatgcttgatttgagttctgtgccagatcaaagcaagtagtagtacgtgagaagttaaccatgaacagacaccctttttctctttgtgtatcacagattttgaaacttgctgagagggaaaaacaaatttatggggaaaaaatgtgacactgaaagccatttgcttccagcagcttaagaattgttgcggtagatgcaactgaagagggtcttcaagtaagtaaatcaactactacaatggctcactaaaaatggtcgacaggacagtttcggaaccttattgttgttcttcagagagaacatcgacaaaggaacttgaagctccgtaggcgaaaggatctctagaaacgactaactaaattctcctaggtactactctagggaggatgctgaagatgctgtcaaatacattagtggaacaatgcttgacgatcgtccaatccgtgttgatttcgatcggggctttgaagaaggcagacagtggggccgtggacgaagtggtgtacaagctttacaaaccatgatatgtccgtgcgttgtagtaatgcatag

SEQ ID NO: 25967 - DNA, 635 bp, Zea Mays
aaaatatgacgcgggacgacgcttcttgcgcctctagccggcaggtcctcggcctagccgaactgtcttacgtgacacgcttcgattcctctcgacacaatcgagtggtatgtatttctagtagattgaatctgctgctctcattgaggatcgaagaagagaatttcggactgtgattaacaaagagaaaaaaatccaaccgaccaccgcgtgccagcagcacgctcgagccggggccgcactgcgcgccggagggttgtgcttcaccgtcagttgcgcccacgctggaagccgcgtcgcgcccacgtcggggccatgttgccgctagtggcacgcctgcgcctcgtcaggacctcgcctgcaccgcgctgtggatgctacaatgctgcaccagcgatcgcctgccgagcgcgatggtctcgtccttcttcctggcttggagtcatggactcgtggccgagaggagctcctgatccatttttcaggggcataaagagagcacgtcatggactcgtggccgagaggagctcctggtccattttttcaattgaaaaaaacgctcccttccgtgtcacggttactagtgcgcatggatcctaggttttgcatgcctatctcaaaactcaatagtgctg

SEQ ID NO: 25968 - DNA, 1226 bp, Zea Mays
cgtttgtttcaggcccggcgagccctgcgcgcactacgtggcttggtgcgcctgcaggcgctggtgcgcggtcaccaggtgcggcggcaggtgcacctcaccatgcgctgcatgcaggccctcgtccgagcccaggcccgcgtccgcgcgcgccgcctcacccaacacccgctcctcctcctcccgccgccgacacctccagccagcagtcccaccctgctgttgggagcggggcgtccattatgcgtcgagctggcattgcagggcgaccacgacgtcggtgacgacggcgaggtggccgatctgttgctccagcagagaagcaggagcagaggcaggtttggaagaggcgacgataacggcggcgcgaggagcccttccggggcctgggacagcagtagccgcaccctggaggacgccagggcggagggcgcgcgccggcacgacgccgccgcacgccgggagcgggcgctcgcctacgcctacgcctaccagcagtggcagcggcaggaggacgagaaggccggcctgggcttccactggctagagcgctggatggctgcgacgacgcaggcgcagcagcaggagcacgcgcccgaccacgccaagacgcaccagagcacccccaccaggacgacgtcatcctacgtgacggcggccgctgctttcgcgaacggcatgtcggagaagacggtggagacggagacgacgtcccggagcccactgaaccaggcctccgcggctgctcacgggcgtccgcccgcgatcccgggctacatggctgcgacaaggtcggctcgagccaaggcgcgccccgcgccgccatcggctacacccacgcatgccaggagccggtcgggtggcgggctcgccggggacacgtcgagctcgggccagaacggcagtgcggtcgccgggtacagcccggactcgagctgcacaggggactggaccccgccgcggctcggtgtcagcacgcgcaccagcagggtggcctatacttgagcttgacttgagcatggcgacaacatcagtttcatcatcatgaatgtgcgcttgagagttgagactcatttttgaatgttcttgtttgttcaaaatttatgtatagcttgctctgtcagatgagatgacacgcctgatgccgctgtaaacgctctgaatactcaaaatgattgcgaataaaacactcgagaattctaaatgtgttattgctcaaccgagaa

SEQ ID NO: 25969 - DNA, 1955 bp, Zea Mays
ccgaaaatgcccccgcctactctgcacgccggttcatacaaaaggggcctcacgtcacggcacacagcacgcagcacatcgctcactccgtcactcgctcctcctccactcctcgccttcctcggtcgcatcaagaacacgagcaggaaggagaagaggaggagtcctatcagagccagacagccaatcagtatctgtaccattaccgttcgggcaccagattaccaaaatcctgcagaggggaatggcgccgagcagctacgagatggcggcttccaccctgctgtgcggcgaggacagcagcagcatcctggacctcgaagcggggggccaggaggaggaggaggaggtgctgctggcgcggagcaggacgcgcggggagcccagcgtggtcttccccgtgccgtccgaggaatgcgtcgccggtttcgtggaggcggaggcggcgcacatgccgcgggaggactacgccgagaggctgcgcggcgggggcacggatctccgcgtccggacggacgccatcgactggatttggaaggttcacgcgtactacggtttcggccctctcaccgcctgcttggccgtcaactacctggaccgcttcctctcgctctaccagcttccggaaggcaagtcttggacgacgcagctgctgtccgtggcgtgcttgtccctggctgccaagatggaggagacctacgttcctccgtctctggacctgcaggtcggggacgcgcggtacgtgttcgaggcgaagacggtgcagaggatggagctgctggtcctcagcacgctcagatggaggatgcgagcggtcacccccttctcgtacatcgactacttcctccaccggctcaaagacggcggtgcgccgagcagacgcgccgtcctccgatccgcggagctcatcctgcgcgtcgcgagaggagagggtgtcgcgatgcctcgaagcgatccaggccaccgtggccctgctggcgcctgcacagccgctgaaagctgaaggcccgagcagcggccgcagcagagcctcttcctcctctgccaccgtgccgcggagcccgaccggggtgctggacgctggctgcctcagctacaggagcgacgacgcggctgcggctgcggctgcctcgcacgcgagctccgcctggcgcgacgaggacggcgactgctccccggctgtttgcagcaagaggaggaagactagcagatgatgattagtacacaccagtgatggagatggaaggatcgatcgaaaagcccattccgcgcgctgatcagtgatcgtcgatctccttgacagaaagtcaagtggttttgatcgcactgaccgaagagtctggtctgctctgggagcttttgactccggtttgaatcgaagtgcctgtaagccaggcaaaggaggcgcaagcgcaaccaaaagcaggacattttggacatggcggtccagcaaagatcacgctcctctgaatgcagggtgctagtagaaatgtaccaaaggaaggggaaaaaaaggagcaaaggttttgaaggttgacaaagctgagacgggacgggacgaccaaactaaaggcagctcgacgatgacggggacgaggcgatgctggtgacatcaggcatgcgaagtagctatagccgcgtagtttgctttgttctgtaatttcccgaccattttccatttgtaaaagagagagagagagagagagagagagagaatgcaaaaaagagaggaaaagaacaattcaattcttgcgtgacaaattgaaaatagcggttaaccaactggaatcccaagaagcaggagaacagcaacatgacgacaggacccagaagacctggaaatgggtttctttgaggggttacgaactatcagcatcagcagttgctatgaaacatgaacccgctgggtcgctgccaccaaacatttgtttgactgcttgtctgcaaagaccatg

SEQ ID NO: 25970 - DNA, 1572 bp, Zea Mays
gaaatcctctcgtccgactatgcgccaaagcatggtgtaaggcccagcccacattcttatgggcaatgtggccaccgtgtaagcatggatatagaaaatattattttgtattgtacacagcactatttacagagtgtaagaaaggaggttcgaggtttttcttgatctatgtgaaaggtttttatcaggcaatgcctgttggttgttttaccctgcaggtcaagtttttttatcttatcagtcaccaccgcatgtataagtggatggaagtcagaagagtttgcaatcatgaaattgccagcacggcaacgacagaatgacaggatccacacagttgcttcaccagacagggagtgccctggtagaggtaacaacaacaacggagttccacagacctatccggatgacaagaaaggctcttcatcagggagtgaggggtccatctggccgaagtttgaaatcaccctgtcaaacagggaaaaggaagaggatttcctggtgttcaaaggatccaagctgcctcaaagacccaagaaaagagctaaggtcatccagagaaccgtcaattttgtatgcccaggaacgtggctatgtgacttgactcttgaaagatatgaagtccgggagaagaaggtttccaagaagcgccccaggggattgaaagctatgcacgacatggacagtgactcggaataaataaaagaagatcactgaacatgagaagctgaatattagaaagaaggccaggacagatcctgcagatggaggccgacgagaaaacgtcctgatggaatgaatggccgtatcaacgattcgccacttctcgtgattgctactggagatcagtttgttccaaaaggacttatggagatcggaggacggccgaaatgtcaggaagctgcatggaagaacagaagagagccgcaggagctggaattcctggacattactattcagttccctctgtaaagcagcaacgctgttttgcaagcctcccatgctaatttcgcgctgccaaatattagcgtgatcgcgaagctagccagtcctggcgcgtctagtttgccgggttgtctgacaacaaaagttagtatgaatatgaaagggccttccttaatgttttttcccacttggtgctgtataaaggttcagtgtatattccattcaggagaatgagaaaaagttcaacactccagtgtgggtggattcaaaacaggcgacttttaattttgaaagtttcagtagatttgttagtttatagtttatattttgaaagtttcagtagtgtccaatggaactcgatgtgtaattcaaaacaggcagacttttaattttgaaagtttcagtagttttattagtttatattttatacagacctactattttcgtctaaaaaagagagaaattcatattagacactagaaaacttttttcctatttaacacttcggttatttcagaccaataacggtgttatgttctagttttacccctattttttttctaaccatgatatttccttttgctagctaaagaaaatatgatagttggaaataaaaaacatcaatagcca

SEQ ID NO: 25971 - DNA, 1227 bp, Zea Mays
cttgagtgtgtgagagagagagagtgggcgcgcgcgaggaagaagttaggttagaaggactctccaaaagcgccgcttgagtaaaaaagatctcgccccaaggggtacgacgactacgatcacacaatataagcatctctctgctgctcaaagcaacccaggccggactcccgagggagcttttttagagcaagagaggacggagaggtagagagagaagggggacggaacaagcagctagctagcagggaagatgggtcgcggcaaggtggagctgaagcggatcgagaacaagatcagccggcaggtgacgttcgccaagcgcaggaacgggctgctcaagaaggcgtacgagctgtcgctgctgtgcgacgccgaggtcgcgctcatcatattctccggccgcggccgcctcttcgagttctccagctcctcatgcatgtacaaaacactcgagagataccgcagctccaactacagcacacaggaagtaaaagctccactggagagtgaaattaactaccaggactacttgaagttgaggaccagagttgattttctccagactacacaaagaaacatccttggcgaagatctgggcccactcagcatgaaggagctcgagcagctggagaaccagatagaggtatccctgaagcatatcaggtcaagaaagaatcagatgctactcgaccagctctttgatctcaaaagcaaggaacaagagttgcaggatctcaacaaagacctaaggaaaaagctgcaagaaacaagtccgcagaatgtgatccacgacgtctcctgggaggaaggcgggcacagtgggagtagtgttcttggtccgttccagggactccttcagcaccatggcaatgatccttccctgcagacacggcctacatggaccagctgaacgaggacatggcggaccctgacgagcacggtcggtctggatggatatgagatgctccggtccgatgccccccaaataatgtcgatgcatgcatatagtttcctgcggtatgcggaactatatatgtgttgaaactgcaccaacgattagctgcctgattgtaatggttaccttaagaactccagtgtattgtattgttgtgtgctgtgctgtgttgtcagaagcttgcaactttgtatatgtacatgtatggtattctgttagtttcttggagctgcgcaaaaccgtcttcatttctgggcttcatttctata

SEQ ID NO: 25972 - DNA, 3060 bp, Zea Mays
ggccggaccgtccgcacctcattttggtgctcaacaaacgtacgaacatatacatagtatagtagatagatataagacatttacttgagggaacctggtgaattgatgaagaggctgttgttagagtccgggtcgaggaggaggagctggctggcgacggcgtccgcgagtaagtccacgatctcgttgccgaggaagactatgcgctcccggaagaggaggcccataacgtcgccggcgccggcgccggcaccaccgcccgcggcatccgactccgctcgtcacagcggtgcgtgcggtgtcagtgaggcgcaaggcttgaggctgagtgccccttgctgcgcccactgggagggagcccaagcgcgagcgcatggccgcttgacacgcagagcggctgctcttcccgccgcgacggagagggacgcggtggcactggaacttccggccgccatatatgtaccgaatgggactgagccgaactgctctgcagtagcggccggcggcggtgttccccaccagagagaagggagcagagccgaggagaggaaatggataacacacaacatacctttcagagttttgatgagttttcccttgagacagcatgactgcaggcgggaaagaggaccttgcgttgcgtgggcctggtcttatgtggactgggccgtcattctctttgggcctaaaaatatagtcttggactcttggtccacttaagcgcgagcagatatgttagcacttagcagcattctttggtccaacaagtcgagagaagcgggccgtacgccaccacggcaacggagaagaggactttcagctgcggcggctggccggcgcggcgacggggatgggggatgggcgcacaggcggcgccaaccgtccggcgtggctgcagcagtacgaactgattggcaagattggggaggggacctatggcctcgtcttcctcgcgcgccttaagccgccccacccggcacctggccgacgcggcccccctatcgccataaagaagtttaagcagtcaaaggagggggacggagtatcacccaccgcaattagagagatcatgctcctgcgcgagatcaaccacgagaatgtcgtcaagctcgtcaatgtgcacatcaaccacgctgacatgtccctatacctcgcattcgattacgcagagcacgacctctatgagattatcaggcatcacagggagaagctgagttcctccattaacccatacactgtcaaatccttgctgtggcaactgctcaacggcctcaactatcttcacagtaactggattatacatcgagatctaaagccttccaacatactggtcatgggagaaggagatgaacatggaattataaagatagccgattttggacttgctaggatatatcaagctccactgaaaccattatgtgataatggggttgttgtaactatctggtatcgtgctcctgagctgttacttggggggaaacactacaccagtgctgtcgatatgtgggcagttggttgcatttttgctgaactgcttacactgaaacctctattccaaggtgtggaagcaaaaaatcctccgaacccattccagcttgatcaactcgacaagatttttaaggtcttaggccaccctacagttgaaaagtggcctacccttgccaatcttccatggtggcaaaacgaccaccaacacattcaaggacataagtatgagaacccaggtttccataacattgttcatttaccaccaaagagtcctgcatttgatcttctctcaaaaatgcttgagtatgatccccgaaagcgtataacagctgcacaagctttggagcatgagtaataacttcacatattcattctcatttatttctttgtggcctggttgtatattttgatctttttccaaaatgcttttagttagcccattattgatctttttcattgtatcctgaatctagttagcaatgttacaagagacagcactgcagtaatatgctgaagccatcttatggaccattgtgacctgttcttgtcaatctaagaatcatgtgttagctttcatttacacccagtagactttatgtagtcactatgcaatgaattagcgatacttatttttgatgcattgcctgaagttatttccgttttgaattataggtttatttgtttttttcaattattcaggaccttagtaaccaggttcccggatcgatgggatcgaggaacgggaacgtggtacgcgatactttcggatggacccactacctggacgaaacgcgcttttaccatcccagccaggggagaaaattgtacagtatcctattcgtccagtagatactacaacagattttgaaggaacaacaagccttcaaccaactcaaccgccatcagggaacgctcctcctggaggtcaatctgtagcaagacccatgccacgacaaatgccgcagcaacctatggttggggggattccaagagtggcaggtggagtaaccatggctgccttcaacgctgcctcacaggctggcatggctgggctaaatcctggtaacatgcctatgcagagaggcgcaggtggtcagtctcatccgcaccagttgagaaggaaggcggatcaagggatggggatgcagaaccctgggtatcctcagcagaagagacgattctgacgctatcaagatggagccatctgctgtatatcaggtgtttgaaacacgttgcctgtgtaagctgctgtagttttgttatcagcatccgaatgccaatgctggcacctgtaaaacacattaatcagtcgagagtccagataccagttgtccttatgggttatgatctaagctgctcgaatttggctgatttggtttgcaacagaaaggtcttgcttttgctcatggcccagtggaattatccacatgcgtaggaaatttagcatctatttggcttgagaaaagattttcattaaattctagtggcagtaaatatttttatggccacaaactacacagaattgagcagttgagcttgtgttgattttgatttttgatagggacatgcaaa

SEQ ID NO: 25973 - DNA, 1776 bp, Zea Mays
ctagatattgcaaaagctactggttgatccatgtcacaatgtttcctattcccattaactacccaccaatgccaatcattgctctgtaccactcagaacttaaggcgttggagaaacacaatgggcgatttgattttagccactggaatatgttacagatacatactgtacatggttctgttctgctgacaccgacatagtacaatccgtgccactgtcctgaatcctgatatgatcttttggagccacctcatcctctccatgtatcatgtctaacatatgagggcaatattattcaatgccttctcttttccttatttgcaggttaaattatagtattcttagataggatattttgttttccatattactctacaaaatctttgcattatctatgtcctatcattgccacctaaaaccgtttttttacacaaaagaagttttaagggctatcttttatccttggagccgtaaggtaatactcatcttaggaagttgtacttgtgttcaatgaaacagcaacagggttttggtttttgtgctgtacaagaaagaagctgcacgagtggaaacaatgcttcagagaaggggatggaaggctgtttcagtccatggcgacaaggctcagcatgatagaacaaaagctttatctttatttaaagaagggaaatgcccattaatgattgctacagatgtcgcttcacgtggacttgatattcctgatgttgaagtagtgattaactatagttatcctttgaccactgaggactacgtccacaggataggaaggactggtcgtgctggcaagaaaggtgttgcacatacctttttcactcaagcgaacaaggcacttgctggtgaacttgtgaatgttctgcgggaggctgatcaggttgttcctccagcccttatgaaatttggcacacatgtcaagaaaaaggaatctaagatatacggatctcatttcaaggaacttacagcagatgctcctaaatccacgaagatcacatttggcgattctgatgaggactgatgtgatgacagcttaggccttgttcgtttctatcggattggtaggccggaacgattcctatccggattgcttctctaatttatataaactttgattagctggaacgattccgggtgcaatccgacggaaacgaacaaggccttactgatttttcatccctgctgacggaagcttgatttctccgttggtgatgctatggatgtgatcagatcagccatttgcaagctgattgcagccacggatgagtattgtggcagtgggcaatcccaaaatatagctctcttgttataggttagtttattatgagtagcattcggcttatgtttttctggaccgtccccattatgcattagcttgggctgcttggctgtatgtaataataagcaacattctgcttattatgatttgcattctcttggaggcttagtttggaaacttaaatcgtctccggtatttccagggattgagtgggaaaataagctattttcccactcaatcttcagggaaaccggaggggatttaagttttcaaactagcccagagtgtagttaaattcagtgcgtccttagtacaagcagcccggttatggtaatgataggatagtgaaaggtgtacttctatcctggttagagtaaaaaaagaatatggttttccgtgttatagtaaaaaaaagaggatggttttgcagttggattttgattgggttccatgtgtttgaatcaactttgtgtttccacaacttg

SEQ ID NO: 25974 - DNA, 3760 bp, Zea Mays
ccggaaattaattcattttgagcagagaagagatagatgatccctggccgattagggagacgtacgctgcgcgcgcctctgtcgatccgacaagtaggcctaatgaaaaggcgttgtgcaccggccacatctgctagcagctagctcacttctcggggacctgcctcgttcttctcccctataaatacctcctagaagagcgaacaaacaagcaagcaagcaagagactgagagaggcaggtaatacatacctgcgactgcgacgagtgagtaaagcttcatcttcttcctccttcctccggcctcttcctgagtgctgcacgcagtgcgtaggaaggaactcgcgtacgtacgtgtgctagctagctagctcgaccacgcgcagcacgcaggcgcgtagtagctcgatcgatcgaccgccggccggaaatgtcgaccaactcgaggtccaactccagggccaacttcaacaacgagatccatgacatcggcacggcgcagaactccagcatgccccccacgtactacgaccggtcgctggcggacatcttccctccgcacctcctcaagaaggtggtctcggaggtggtgtccacgttcctgctggtgttcgtcacgtgcggggcggcggggatctacggcagcgacaaggaccgcatctcgcagctggggcagtcggtcgccggcgggctcatcgtcaccgtcatgatctacgccgtcggacacatctcgggcgcgcacatgaaccccgccgtcacgctcgcgttcgccgtgttccgccatttcccctggatccaggtacgcgcccgtccgttcgtcttcttgcatcgaaactctgagccatagttgaattggttgggcatacgtactaacgtacgatcggtgcattcgttgacatatatatacgtacagacctaagctcctcagtggcgtataacaacgcacaccaccagagcgattcatttttgctttgttgctcacctattattctcccccttggacgacattcttatttcacttcttttttagtagtcgtgctgcacacgtttgtcatggcgtgatcatggcccaaattattcaccttttttaaggcatgccaaactatcaagtctagctttgtatcgtcatcgaaaaggaagttaaaaaaaatcaacgtttagtatatgctcaaaaaaatgtaacttcttgtccgggccaatcaatcatgtacttacttcctcgatcgagtttaaagctgtagacacttaaactacgacaaatatttattcagattcacggccaaagcgtcaactattgtaggatttcttaacccaaacaatgttcacgcggaattataaaaaatatatattgtagcagtgaccttagccggcccccgttcattcccctcacacgtcgctttccttggccagttcggtcgcctcgcctagctgaagcctggagccaagcaacaagtagcattagcttagctgacacgaataacacagagtgctagtacttgtatatatacacgcatagtaatatagtatgatacgttgggcttggcacggcatgtgaaagacctgccggttccagctgacatgaagcgaaacggccaggcagaaaagctcgtgtatgtagccgcgcgccgtgccaaggccaaaacgcaagcctttgagctaggacggccaagaagccagagccccgcatggccatccacgtcgctctcgtgggcacgatccatctccgcgttctcacggccggagataagtgttccctcccgtcccgtcccgtcccgtcccgtccctttttagcagaaagaaaagctgccagggttaattaggggaccgcacctgatgactactttggtaaatcctcttcggggtcgaagtggattaggtgaaaatcagctaattttctctccaatcaccttcaatctcgaagatgatttgagttttcaaactcttgctcgagaggtgtggtggcccatcgtgccgtggcatgtgcacatgtattcctcgggggcatggatgcgccgaaaacgccggcgcggcgggcctctggttcggcaccctattccggctccggcaagctggctggcccaggtgccgggctgcgagccctgtttgcacgacgtgtgaggctgacccgaaccgattcgatgtgccgtgagcaccgcagccggccggccggtacggtgcacgtccctgtgcagaggtcctgcagggtttgcttaattaagtatggttataaagatcgatagtactacatgtttttatatctctgtacgtgacgcgatgcttgccgtttcttttttctttctttttttcctccctggtcttgtgggggatgctgctgctgacgagctagcgcgttgcatgtatgtggctgcgtggctgcaggtcccgttctactgggcggcgcagttcaccggcagcatctgcgcgtcgttcgtgctcaaggccgtgctgcaccccatcgccgtgctgggcaccaccacgccgacggggccgcactggcactcgctcgtcatcgagatcatcgtcaccttcaacatgatgttcgtcaccctcgccgtcgccacggacacgagagcggtgggtgagttggcggggttggcagttggttccgcggtttgcattacgtccatcttcgcagggtaaacaaatacataaatacgcacgcacgccggccgggctattcaattcgtaggatacttaatccaagttagaaaaatagtttagttgagagggctacgtcgatttcagtactagactactagtagtaaacaagagcaaagatccaaagcatgattagccgacagtaacaattctttaattcagctagctagcaagcatgtactactaactaaaccctgagtgagtagctagcacgccagcactcctgagcccctgacctggctcgcaacgtgaatctgacccggtcccggacggccacgctgacatagtgacaatagatcgatgaactgagcactgagacgcgagggaaaaccgagtggtgattgcagggcagtgtcgggcggatcgatgaacccggcgaggacgctggggccggcgctggcgagcaacctctacaccggcctctggatctacttcctgggccccgtcctcggcacgctctccggggcctggacctacacctacatccgcttcgaggaggcgcccagccacaaggacatgtcgcagaagctctcctccttcaagctccgccgcctgcagagccagtccgtcgcggtcgacgacgacgagctcgaccacatccaagtgtgattcatgctccatcgatcagagagtgcgcacttgtttactcctcagtcctctcactctatgtatcggcaacactccctaggatatactagtggtccgtagtcatggtctatgtctatgtgtcgctcttctctcgatccatgcacgtccgtggcgcggtgtggatgggctcgctctgtcaaatgtgccaatgagctggagcttaattttgggacgaacactgtgccgtgtgctgtgtgcagccagtcgtactcgtacctctcctgctatcacttgttccaaaagctcttggtgcttacataaagatcatctgtgccttgcacgataaaaatctctattcttgcactccagttacctcgtacaaaaattccaagccttgactttgagttatatgacaaataatgaaataagtagaataattaggtaaaacaaagaaaaaaaactggacaaatagataaatttaatcgagagcatcatggatgcgcgcctttactggc

SEQ ID NO: 25975 - DNA, 4301 bp, Zea Mays
agagtcaaagcatcaaatggagatatgggggaaatccagacaccctaatgttgagttgagagcattttgctcaaagcattctgcagttggttacaccagttctgtagagaacagtaaccttgcttccgaactgaatcctagaaaatctggcccagacaataccaccctcaattctggaaaaattccaatactaaggttcacgcgcaaaaacaaggataaattcaccaattgtggaaccagtacctctagttctggtaacctgatcagagtcaagactatagagcaaggtgctttagctaacacagttagaaatgcaaatactcaacctattcaaatctgggaaagaggtactggtcatccctctgttggtggggatcatatgggaagttctggtgatattgctgtagtgcttagaaagctaattgacagcggaaaaattagtgttagtgatatagcatctgaagtcggcatttcttcggaatccttggaagctgctctcgtgggtgaaactaccactttttcccatggtttgacgctgaaaattatgaagtggctccaaaattatgtgcaaatgcatagtgctcaaggagatgtttgtaaagggagctcagaggtggtgcaagagagcaaatcagacagattggtcaccacagatactgtcgatgtgaaaaatccattggtcctagatgatgacaagggtgtaggtgtacttgttgatttgctggattcctctgtaactgaacctgcacaaacaagatctgaaagcaatagtaagattttgaatgaaaatagtgcaacatgtgcaactggtgtgactattttgcaaaatggcaaaaagaacatggttaaagaaggttataatcctgagtgttctgctaaagaatttgcaaacgaatctactcaggacttctccccaatcagcaacaagtatgttttaaaggatgaacatggaatattgcattatcaactctaccaattttttgaacttgtcgcgctccaatttatcttgcgtgagatactgaacgccacctctggaaacaaagaatttggtacttccacagagataccaaatgaaaaccaaggtgcattacgtggaagaaaaattaatgacttaactgatgttgaactgggcccatgcttggagaaaggagtatcttcacatgatcattgttttgttcggggtgataatggtagagatagggtagattcagttgaaaatagcttcaatgctcgtgattgtgattcaaattgctctcatggacaaccttttttcaactttgatgattcacattcttatattcatccattcattcagaaaaagatatctcatcattgggacattactttcaatcagaataaggaagctctgaatcactatatacaagagtcatcatatccttcccttgagaaagtaccaactgattcctcggtagaagtagagggtacagccgatacaactgcaacaggtcaagttttgaaagcaaggtctttaaaaattcttgagcattcacctgatgatgaagtagaaggagagatggtatacttacaatctaggctgcttgacaatgctgttgttctgaagcacagatatgaaaaattgatagcaatggttgtccaaaatctctctcgcgagctggatgccctcagtaaaagaaaatgggatcttatttttgtgaatcagttccttcgtgatgtcagagaagctaagaaacgtgggagaaaagaaaagagacataaggaagcccaagctgtactagctgcagctgcagctgctattgcatcctcctcacggaactcaaccgtgagaaaagatgcaaaggaggatgcaccaaagagttctcccaaacttgctgctggatcttcaagggttgggcaacggacttcattgccacaggctaatgattcatcaaagtcatccaacagcaaaatatcatcggataaaaaatctggaagttttcttctgccaatctcctctaaagaaaatgggttatattgtgatgtatgcatgcgaactgaaacattgctgaaccgaatatttgtctgctacagatgcaaggctgctgtgcacataaattgctacagaaatttggagaattctattgggccctggaactgtgaactttgtgaagatcaagacatttcatcagaagctgcaaccgttagcgataaatcacattgtaatggcaagaaattaccctttgcacagtgtggcatgtgccatggcacatcaggtgcatttagaaagactgtagatgggaagtgggttcatgctttctgtgctgagtggttgttggacaccaagtatgtaaggggacaagataaacctgtagaaggaacggaaagccttgtagagggaaaggacacttgttgtgtctgcctccacaatgttggcgtgtgcttaaggtgtagcagtggggattgcaacattacatttcatcctacttgcgctagaagttgtggtttttacatgaacacaaaagggtttggtactacaccacagcacaaagcatactgtggcaaacacagcgtacaacagaaagaggctgatgcacagcaatatggacctgaggagctcacgagcatgaaacgaatgagggttgaattggaaaaactacgcctgttgtgtgagaggataattaagagagagaaggtgaagagagagacggttttgtgtgatcatgaaatacttgccaaaactaaggacacagttattttctcctaccttgcatgcggagcaagctcagaatctgcaactacttcagttaataacaggtcgtacagtggagcagcacaaagatctgatgatgtcacagtagatagtactatttctgggaagaaaaccataaggttttctctgaataacagaggtgctgatagaaacacagctgacagctcgaggacattgctatcattcaaacgcaagttgagtgagaggggaccacgagctggtaagcaacttccgcagaggccaactattgctgcagagaaattagaagatgaagacaagaagacaactgataagaagataactatgcaacagagagaaatgtttcaaaaggagctcattatgacatctgatcaagcttctacacagaacctacgccttcctaaaggatatgcttatgttcctcgggactctttatctaaagagaagctatggaaacaaaatacacagccccataatccacaggagcctggtggataggatcagttgaaatcaagccggttcatttctatcgaggaaggccataaaaaacttgtgcaagcttgttctttgcaactgaaaactacaagcggcaagcagggcaggccagcgctattgccacaagggtaacagcgaatccgtgatcttttttggaccgaagttgcataatggtgcagactgtgctatttgtgtgaacgtatggtgtggcaccataacaagaaggctgcctcccacccacccacacaccaggtaccttgaatatgaccagcaatatgggtgaattgacctacctgtgctataccaaagagagcgtgccaactgtatatatgagtttaatttgtgcgcagattttgtaaatttgccctgtacattcttttcctttgcatatgctagtttagttgtgcaggaaaaagggaattatgaatccttttaggttggataagaaaaggaattagcttggttctttatcatggttcagaagaaaatgcggtggtgcttgcggacaacattgggcaggagtgttggtttgatacatgtactctgtagggatggtgaaggtgccaaaaataaggtcatgccactgctttaacgcaactatttgttgttggttactgggaagtggtatcgtacaggctgagaaacaatgttttactgttttagataattgtcgccggtggctttccatgtccccttatgttattgggaaacactagtccctttagggctcgtttgatggacatgaaaatggagatcattgcctcattgggaagggatccccttgctattcaattttgaataacaaggggatctccttcatttcactgtccaccaaactaacccgaactggtttcgagatgtcaagatagcaacaatgttgaaataggcctgtaagttctttggtcgagaaggtatggtagctgacattattttttaatttatacatggggtatattgtatctgggacgggctgttttctgcttgccgtccagattatagccttggttaggcgtatttagtaatttgctcataatttagtggttcatgttttgaattcttttgctcgaaatctggaaaggtcgtgtctggtaaatataaa

SEQ ID NO: 25976 - DNA, 1856 bp, Zea Mays
attcaagaattgttcggttacattttgcctgtttgctgtttttttcgtcggttcgcctcgtcttctccgcctggcccgagactcacactcaattcggtcgttttctgcattaacggagtcaggcccaggcctaacctcagtacatcagagcagccgaacacgcccgcggcaaccgccgccattctaccccaggtcggacggacccttgccggagacgagcacacgccacagcagagcagcgcgaagcgagagatccaatggcggcggcggaggggcagtgggtgctcatggcaacggggcggacgccgaccaacattgcggtgatcaagtactgggggaagcgggacgaggcgctcatcctccccatcaacgacagcatcagcgtaacgctcgaccccgaccatctctccgccaccaccactgtcgccgtcagcccctcattcccttccgaccgcatgtggctcaatggcaaggagatctcgctattaggaggaaggtttcagagctgcctcagagaaatcagaaagcgtgctcgtgactttgaggacaaggagaagggcgtcaagatcaagaaagaggactgggacaagttgcatgttcacatagcctcgtacaacaacttccccactgctgctggtttggcctcttcagctgctggccttgcctgtttcgttttcacccttggaaagctgatgaatgcgaaagaagattatggagaactttcttcaatagcaaggcagggatctgggagtgcatgccgcagtatatatggtggttttgtgaaatggtgcatgggagaaaaagatgatggaagtgacagtattgccgtgcagcttgctgacgaaacacactggaatgatcttgtaattattattgcagtggtcagttcaaagcagaaggaaaccagtagcaccagtgggatgcgagatagtgttgaaacaagtcctctcttgcagtacagggcccagacagtggtgccaggtcgggtgttgaaaatggaagaagctatcaagaaccgtgactttgaatcctttgccaaattaacttgtgcggatagcaaccagtttcatgctgtatgcttagacacgagccctcctatcttctatatgaatgacacgtcacaccgaataattagccttgtggaaaaatggaaccactcagaaggaaccccacaggtcgcttacaccttcgatgctgggccaaacgctgttctaatcgcacaaaaccgtaaaactgcagcacatctcctccagaagctcctatactatttccctccacaggataatgatttgagcagctatctggttggcgataaatcgattctaggtgtcgccggattgcattccatgaaagacgtcgaggctcttccagcacctccagagacgaagataccggatcagaaattcaagggcgatgttagctacttcatctgcagcaggcttggcgctggtccaaaggttgtttctgacgaaggtcaagcattgatcgattcagtcaccggacttccaaaaggcgtgtagttctagatttaggttggaataatggtttaagctggggattaaagacaatggtatcatacaagcaacctgggccgggaagatacattaggctcgtgtcacgttggtttcgtgctgattgacttgacggtgtattggtcatgtattatgcatttgcgctggtgttcgttgctgtccaataaagatagaacacgttctcgccttttgtttttctccctcgcctagtatgtggctcaaatatttgtttcactattttattgagcacttcagctgagacaaaagcggagaataactttgtatggctgcttgtcacagtggatgaaaaaatctcgacccccc

SEQ ID NO: 25977 - DNA, 3477 bp, Zea Mays
caagtacaaaccctgatggtatctgctacatagagacagcaaatcttgatggggaaacaaatctgaaaataaggaaggctttggagaaaacttgggactatgtaattcctgaaaaggcttctgagttcaaaggtgaagtgcagtgtgaacagccaaacaattccctttatacttttactggcaatcttatcatggacaagcaaactatacccctctcaccgaaccagttactcctaaggggatgcagtcttcgtaatacagaatacattgttggcgttgtcatattcactgggcacgagacaaaagttatgatgaattccatgaatgttccctcaaaaagaagtacattggaaaaaaagctagacaagcttatccttgctctttttgcaaccctctttacaatgtgtgttattggcgccattggaagtggcatatttattaatgaaaaatacttttatcttggattgcgtgggcatgtggaggatcagttcaatcctaaaaacagatttgtggtgaccattttaaccatgtttactctgataactctatactcaacgatcatccccatttccctttacgtgtccattgagtgcacacaattcattaataacgatcttcatatgtaccatgctgagagtaacacccctgctttggcacggacttctaatcttaatgaggagcttggacaggttgaatatatattttctgacaaaactggcacacttacaagaaatctgatggaattctttaaatgctcaattggtggagaaatgtatggaactggcatcacagagattgagaaaggaggagcagaacgggctggaattagaatcgatgatgatgagggcaaaagatctgctaacgcggtccatgaaaaaggattcaattttgatgacgctagaatcatgcgcggtgcatggagaaacgaacctaatcctgaggcttgcaaggaattctttagatgccttgcaatctgtcatacagttcttccagagggtgaggagactccggaaaagataagttaccaggctgcctcacctgatgaggctgcacttgtgtctgctgctaaaaattttggtttcttcttttataggcgtacacccacaactgttatggttcgtgagtcacatgttgaaaggatggggagtatacaagatgttccatatgaaattctgaatgttctagaattcaacagtacaagaaagcgacaatcggtggtttgccggttcacaaatggaagactagttctctattgcaagggtgctgataatgttgtatatgaacgattggctgatggaaatcatgatatgaaaaagatcagtagagagcatctagagcaatttggttctgctggcttacgtacactttgtcttgcctatcgggatcttagtagggagcaatacgaaagctggaacgagaagtttgtacaagcaaagtcatctttacgagatcgtgataagaagcttgatgaggtggctgaattgattgaaaaagaccttatattagttgggtgcacagctatagaggacaaactgcaagaaggggtgccaacctgcattgaaactctctctgcagcgggcataaaaatttgggtgttaactggagataagatggaaacagcgattaacattgcatatgcatgtagcttggtaaacaatgacaccaaacagttcatcattagttcagagacaggcgctattagggaggctgaagaccggggtgaccctgtggaaattgcacgtgttattaaagattcagtaaaacagaatctgaaaagatttcacgaggaagcccggcattctttaattagcacccctgaaaggaagttggctctcattattgatggtagatgcctaatgtacgcactggacccaactcttcgtgttgatcttcttggattgagtctaagttgccactctgttatatgctgccgagtttctccgctgcagaaggcacaggttacaagcttagttaggaagggtgctgagaaaataactctcagcattggtgacggtgctaatgatgtgagtatgattcaagctgctcatgttgggattggcatcagtggccaagaaggaatgcaagctgttatggctagtgactttgccattgcacagtttcgttttcttactgatttgcttcttgtacatggacgatggtcttacttgagactgtgcaaggttatcacatacttcttctacaagaatctgacatttacactaactcagttctggttcacttttcaaactggtttttctggccagcggttttatgatgactggtttcagtctctatataacgttatttttactgcgctacctgtaattatagttggattgtttgataaggatgttagcgcgtcactgtcaaaaaaatacccacagctttacaaggaaggcatcaggaattcattcttcaagtggagagtgattgcagtgtggggtttctttgccttctatcagtcaatagtgttcttctacttcactgcagctgcaagtcggcatggtcagggttcatctggcaagattcttggcctatgggatgttagcaccatggcatttacttgtgtcgtggtgactgtgaatctccgccttctcatggcatgcaactctataacgaggtggcattacataagtgtggcgggcagtatagtggcctggtttatgtttattttcatatactctgcaataatgacgtcatttgacagacaggaaaatgtgtattttgtgatttatgttctgatgagcacctttttcttctatctgacaatcgtacttgttccgatcatcgccctgtttggggatttcctatatctatcgatccaaaggtggctcttcccctacgactaccaaataatacaggagcaacacaaggatgagccacacgagtacagcagggtgccactaccagagaccagccacctaagcccagaggaagcgagaagctacatgatctcgatgctcccacgggagtcatcaaagcacactggctttgccttcgactccccaggatacgagtcgttcttcgcctcgcagcaaggcatcggcgtgccacacaagccgtgggatgtagcccggagagcgagcatgaaaccgcaacgagcaggaaaatcctagtcgggcgaacacctctccgctgtgtaaagtcttgtatatctggtttcttgaccacaggagtttttgtataggtagcagtactgtagcccttttttcgtgtttgtcacccatatgttgttttgggatgaaaagtaggcaacggtccgtttggctgttaaacaatcatgtagggatacttggtagataaaaccaaaggggtattggacatgcagttaggaattttagtttctggcgttcattgcgtgatgtagtcgagttgattggtcggcccgccatgcaacttaaatcatgttactattattggaggcctgtgcattgatcatatcccattttatttcaatataagaacacatcctactcc

SEQ ID NO: 25978 - DNA, 1370 bp, Zea Mays
cgaagcagcagaagggaacaggcgcaccacgggactgggagagagagagagagagagagagagaaagaaaaaaaaagcagcaggcaccagtgcatcgccaccgtaccggagggggcagcgcccaaaaaaggcaaacgggagggtgggcgagcctgctcttcctgtctgggagagagaccgaagaagaggagagagaggcgcagcgcagcgcagcgcaggcgcgcatctcccccctccccttgccggctggcccctgctgcagctctgctccggtcggctctgcccccccgctctgctgactgctctgccgctgctgctgtcgcaggcgcgccaccaacccgccgatgcgcgcgtagcggcgtaggttactgaagaaaacctggcagcactatttataaattgtggacaggttgtggactgtcgcatgtgtggagacccaaactcagtccttcggttcgccttcatagagttcactgatgaggagggtgcaagggctgctctgaatctgtcaggaactgtgctcggatattatcctgtcagggttctgccatcgaaaactgccattgcaccagtcaatccaacattcctacccaggtctgatgatgaacgggaaatgtgtgcgaggactatttactgcacaaacattgacaagaaggtcactcaggcagatctgaaattgttctttgagtctatatgtggagaggtctttcggctgaggttgcttggtgactaccatcattctactcgcatcgcttttgtggaatttgtgatggcagaaagtgctaccgctgccctgaactgcagtggcgtgatactgggatccttgccaataagggtgagcccctcgaagactcccgtgcgtccccgtgcgcctcgccagctgatgcactagaggtgtcctaggtacaggaggtgcggaaggcactgcttatatatcatcatcatatatatataatagagaatagacatatatgaaagaggggaggggaaaagtggcgtcacttgttctaagttatgggctcggcctttttgttttgggttcttgcttcaccaccgtgtgactgagtactaaagtgcctacgtacgccccgggtcgacgccggctggcagggcccttttgtttactaccttgcacatagaaggagaggagatggagagcttctcactagaaggatcggaagcgcgcgcgggggggtctgcctgatgctcttgtccttgatgcaacaacaggcggaaaactcctggacttttaccctgctgttcagttgtttgctgctgtgtcctggttgctactgaaacaaactggttaaaaaaaacttgggtattggagactatgtgccctgcctgttggtttggttgctactgtctgt

SEQ ID NO: 25979 - DNA, 2899 bp, Zea Mays
gctcatcatcattaaaaacaacgcaacccaaccgccgtgctctcgaaggaacccgcccgcggcccgcccgttgcttgcccgcaagaccgcagcagctcagttgagttgacctcgcgacctcccccggccggcgccgcagggatggaggagggtgcgtcctcgccgggcgacggcgggggcatgcagttccaggtcgcggtggccgtgcgcggggacggccgcgccagccgccgagccgcgcggtgggccgccgccagcctggtcccgcccggcggccgcgtcgcgctcgtccacgtcatcccgcccgtctccttcgtgccgtctccatccggggagagggtgccggtggacaagatggagccggaggtggtggagatgtacgcgcaggacaaccgcgcgctcgcgcaggagatcttcctccccttccgccgcctcgtcggccgcggcaaaagcgtggagacggtggttctggaaggggacagcgtcgccgaggcgctggtgaggtacgcggcggagtccggcgtccgcagcctcgtgctcggatccgcctccctcagctggttccggaggattttacgactccaagatgtgccttttacaattctgaaaaccgtaccaagttcgtgcaacatatttgtcgtgtcccggcgcaggttaacaataaaaattgcaaatcaggctcgaagtagcaagccgaacgcttctattcggattcagtcaataagtcataaagcatttgatcaaatacagagggactggctacaagacaaacaggctttgaataatctggctgatgatgagataccaaaatattctgaaaattctatttcaggctcattctctcaagtctgcagttctataagcacttcttccatcgccgttaaaagttcagaaagtcatagaagaggtttcttaggaagtttaggacgaaggacacctgggagagaaaggaacaaagattttgatgctatcggccaattgaaggaagttcattatgttgccttaagctcagttgaagagtaccaacatatagatgaagaagaaaaactgaggaaggagctgaaggatactttgatgatgtatgacagagcttgtggaaatctcgcccatgctagtaaaaagattcagttattttctagtgactgctgtgaagatgtgaataaggtgcaagacgcactacagagagaggaagtattgaaacagacggttccagatgagaaaaacaaacatttagaagcaattggagcagttgagatggcaaaaaatgcatttacacacgagacctattccaagcaccaggctgagaatgctaaggctgtggatgcccttttatcaacaggcaaaagttgcaggcggtactcgaaacatgaaatagagctcgccactgattacttttctgatgcaaagaagattggtgagggtggctatgggaatgtatacaggtgtacccttgaccacaccgaagtagctgttaaagttgttgaacaagattcgatcaacaagattgatgagttcttgagagaggtggagattctcggccaacttcaccatcccaacttggttttactgcttggcttttgtcctgaaattggatgccttgtgtatgaatacatggagaacgggagtttagaagatctacttatcaacgataaagggcagccactccattggtttcttcggttccaaattatctttgatgtggcttgtgggcttgctttcttgcatgggacgaaaccagagcccattgtccatcgtgacctaaagcctgggaacatcttgctggacaagaactacgtaagcaaaattggtgatgttggttttgcaaagcccatatcagatcttgtgccagaagggctcacagagtacagagacactgtcatcgctggcacactgtattacatggatcctgagtaccaattaactgggactgttcgaccaaaatcagatctttatgctttgggtattatcattcttcaactcctaactggcaaacgtccacctgggctggtaaatagtgtagaagaagggattaaaagggggatattatcagacatcctcgacaagtctcaacctgattggccaattgctgaggctgagatgttggcaaaacttgggttgtggtgtactgccttaaaatgcagggacagacctaaccttgagtcagtggtgcttccagagctcgaaaatatcctgagcagggttactgtttctctcaaactcgaaaatatccttgcaccaagccacttcttctgtccgatattgcaggaggtaatggaaaatccttacgttgctgcagatgggcacacctatgaacacagggcaatcaaagcttggctcgaaaaacacaagatatccccaatgacaaatcagaggcttccacatctatccataattcccaaccattccttgcatgcagcaatacagcaatggaagttacgagcatcttaaggcccgttcgttttaatcttaatctatatggattgaacgggattgagtgggtttaaatccataacgaatcaaaattctttctaatttcttccaatgtcatcttatcaacatggaatgagaataaccgaataaggcctaataaaggcatgaggtgactggtttattcgttgtatatagtttgattcattactgtctgtttgagttaagatgtaaataaagagcaatagttctataatgtagcagtgaaagaagatagtattgtaggaataagttgtgttactagtctagatttgttagagctggtttaggctactcagacaatttaagttacaacggaattaagttttgcaatgctgtatgattttgtagttatagcctacaaggcattatcttggagggtctgattacaattttcagtgtgatttctctgagatcatgtatcttggcgaag

SEQ ID NO: 25980 - DNA, 4180 bp, Zea Mays
tctacggctctacggagggataggtcgctcttcttcctcactgagagaccatgagacgggtcgagacgacagcggcggatgcaccccacgacctccagtgactctcccagtcccaggctcccagccccccttcctcccgcctccgcgagaccgcgatggcagtcttgctgtggcggtgcatatgcgggccccaacaatccttcagtaagaatcgaggcgcatccaccccttctcctcttgctggcaggagatccaaatactcgggacaatctgtgaaagcaatgcccatgcgtttgttaacggttggaaagaagaggtctcgggggacacaactccttgttgaagaatacaaggagaagctcggtcactattgcgagttcgaggacactcttatcaggtccaacccaaagcttacaagtgatgtaaaggtgcaagttgaagcagaagacacggctatgatgcagcaactcaagtctgacgattttgtagttgtgctggatgaaaacgggaaggatgtcatatccgagcagatagctgatctgattggggatgctggcaacacaggatcatcaaggctcacattctgtatcggtggaccatacggtctcgggttacaagtgcgagagcgtgcagatgcaacgattaggctgtcctcactagttttgaaccatcaagttgccttgatagtcctcatggagcagctctacagggcatggactataataaaaggacagaagtatcaccattaggcctaagtgctatcatcattcgctgctgtatgtaggacttgaaaaatggaagactgcattaataaatttgcagtttccagcacaacatggacacttgtaaataagaagaaattctgctgggtgctttactggttgctaggctgctacatgcttgaaaatggttgctatctgcagctgaggttctgcaaaagcgaatggcacacctgaacattcttcttttactgagatcaagcgtgtcataagatttattaaaaaataataattggtgtatctcactctgacattatttttctgctctgctagtactcttaagtataaagggagcatccttcttgacgcgactcacattattcaaggtttcagccccgaaaaaacgttcacatccttcatgtttcagacatcttacaacaggggctgattctgtattcaggtgtaggcatcccatatttcagaaactcaaatcatagctcatttgatggggtgccaggctactctttacatgtgagctgcaagtattgctggaagtatgataggattggttcaataagtctttgaacttgaaacaatataaacagaaagctttgagcagcttcatataattacttcccctatgtcaccataaccaaatcactgcacatagcttattccacagtgacaagatgaggcctagtcattgtgctgaaaaccaggaagaagcgatgcaacaaaccctacaacaaccagctggatctctttcaagacaccttccagccaattacgccgattgccttctacctctgcctcttgtggattctcgttaccagctgcagcatcttgttcacggttctctgcagcttggtcagggtttgcagggtcattgggctgctcattgccatcattctgggcaggcagagcagcacggttctcggcccgagcaggagcctgtggtggatgagcagctgcacctcccgcccgctgaagccatctaacaaaaggtataatagctccggtttgatatctgcaggatacagaagcatgaggttatctagcagcaccatatataggctatacaagtaatgaagaataaactgtgaaatagcattaagtattttggagacgatttgagcaaagtacttacaaagtaaatcgaatgatgcaaacagtatgagaagaaatagcctttgttttgagccttcctggctaagagaaacaccactgcagctagtaggaagatcagggtcaagtcaagctgaaaagcgaagtgaaacctcctcacaacaacttgtctttgaggtacattttgctgcctagcatcctgtacattctcttcaccagcaggagcaccaatgctttctcttcaagcacagaagagcagatataagcaagcaattggacagttcaaaacttcataatgcttcgcactggtcccaagtatccccatcccccaatgaccaaatcaccaaaccagaataaaaaggaatgtcatagcccatagtagcaattcttgcaacaaaagttttcttttttcaactgctcaaagtctgtaaccaagttttacaagttagctgtagttccattctatcttcaagcatggcagcatcagaaacagcgcttgggctccattcaaaaagttaaaggtgtttgtgttgtggtattctcaatcaaattagtcattacaaactagtcagttatagcaagtccctgctgtcataacgatgaaaattgtattatttcaggactgagtaaacatcattatatgttatgttctgccttactcctgttctacaagttacaatatccctagataaataagagagatggctgaagttattcatcttgattttgacccccacactacaacagtgtgataaggccagtcaatcggttttttcggtgtaatcagtttactggtgtaatcggtttgtttgttcagttttagagaacttcggtgttgcagaatgaagagtcgatcaatgtttggaacaaaaaccaacattttcgtttatctgttttttggctcggtgttcgctttttgccaaactacatcgaacactagcacagcaccctgaacggaggacagagacagcaatttagctatgtgaatgattaaaaaacggggataacagcaagctgttcaacacaaccacatgccgttcaacatcaatcaaagcacgggattcaggaagaccaaaaaatcaagaaaggaagtggagaactgaatttgaacaggagagacagacacatcccacaaggaacccactgacctgcaccgtcgcatcggctttcaaggtgctgatgcgccggcgcgccacgctcgtcgtggtatgcgtcatcgctaactcgcagcaccactgagcaggatgcaccatagctaagccctgcggcgggtgctgatgcgccgatgcgccacgcttgccgtgggatgcgccatcactaactcgcagcaccactgggcaggatgcaccatagctaagccacgctgcgggtgctgccatcgatttggtcactagggatagagtcagggcctcaagggtgcggtgcgggaatgctggctgggcgtcttggctggctgtgggccaccttggtgtgggcttcatgggctgactgttgatggaaagttggtttagctgctctagtgcttatggcagatacacttcggtatatacggtgagtcagtttggtcaggcctaagcactgacaccgaagccgatcactgaggtatcaagaaatcaaaaccgatcccatgccgaacaactaatagtttgggttagttcggtttcaggtcggtaattggtgtctgggaaaaatatgcccagccctaagtgggactgtgggagtttttttctgtaacatatctaattgctgagttaattagtaatgaatgttgcttcaagaacaaatgaggtgcatgtcaaataattcatggaaacagatacaatagtgaaagttgactcactgttttttcggttacccaagattgtcgccacctcataacagatcctaaacgaggtacgtataaagtataattcaaatgaagatctaaggatctcataatccttaaagtaagattatattgtatactgctgctgctgagcatgcttttaatcataaaatttctaccaagggccaacggaaaaagtacctaaatctcaacatatctactatgaacccctcatcacactagttcgatacagccacccaaatgtgtccaaggttttcaacagtacaattttatgactgcatatattacttgcataagctgacttacaatgactactgcaatggcacgcgagcagatctcaccaattcattgattgtacaaaataggcagacgtagcatattgttcagtaccaaagggtaacaacttacgttgggatattgtaagtgaggggaatgagtgtggttggagcatagcaacccattcccatcgccgctgctaactggttctgtt

SEQ ID NO: 25981 - DNA, 1257 bp, Zea Mays
tctcctatttagttatagaagatgtagcattgcaggatatgttatgtaggctctttgggtgataaacctaagcgcactatggtggaaattaaaggccgcttctcagtgacatctgagaatgtggatcttgcaaaggttcaagaaattccagggagcagtgcctcacgtaaattgcaagaggggccttcactgagaaaatcagccagtgttggtgattggtcagcgaatgataagacaacgtctactaatcatcaaaggaaggaactctgcaatagctctgtatctacatcaattctgattccgcatcttcaaaaccttgtgaagcaaactgcattccagcaagatctgattacgaacctactaagtagcttgcaacaaaatgagagagtcgatgctcagtcaagagtccagagcacgacgagtgatacagtggttgaagctgctactgctgagagagaacactcgttacttgttaaaatttttgagttacaatctaggatgatttctttgactgacgaattaattgcggcaaagctgaaacatgttcagctgcaagaagagctaaatgtactctactgccaagaagaaatcctggatatgagagaggacgagagcgaagaagcatgatgcggtggagcctgcccccctttttttactactactactgagggggactaaaagccacatgctctaagcccgtgcaattgaggcttggctaactggctgcatacaatacaaggactcgaaggatcattggccaactccgggtgcaatcgaagaacctgcaatgagtttgatggagcggggtttatgatcgttggcctcggatttgaactgttatgtatattcagtcgacccgttcgatttctgactcgggtttggtttgttcagtgagcttttaaggcgtcttgcgatgcgcatctacttgatcattaagatggctatgacgccagcctctaatatatactactagtggtagtaataggtatagcgtccgtatagtaccattgtacttgtacctcagaagtcagcaagactgcgacaataattgcatcgcgtctgtagacagcggaatgcatgagtagctactgtagtacaatggagtgtccccgcatccaggctttgggctgggaaccctgcctgtgctgctgtgagcagtcatgttgtcacctgcgcccattacccgtacatgcgcaatcataaacaaatcagctagctcatcaataatgcactcacggacgggagggaatccacctt

SEQ ID NO: 25982 - DNA, 3063 bp, Zea Mays
tcgccgccgcccatcgcaccctgccttagacgcccatgctcgccatggccggctggccgcattcctcagggcctcggcctccgcggtggccgaagcgggcggcgacccggccgttctccacgcggtcctcatcaagaccgcatcgtcctctcgcaccgcctacaacctcctcttctcccgctaccatccatccctctcgctgcacctcctctcccgcctcccgttccacttccgccccactgccgcctcactcacctcctcgctctcttccctctccgcttcctccccggcctccgtgctcccgctcctccgccgcgtcctcggcatgtcgcctgctctcctcgccgacggcccgctctcctcactcctccgctccatgccgccgtccattgcaccccacgtgcacgccctcgccttcaagctcgccctatcgtcgtccccctactccgcctcttgccttattaccctcacccgcatccgcccgctcacccgcatccgcccgctcacccgcatccgcccgccacctgttcgatgaaatccctgttgcaaaccgggaccccgtttgctactcctctacgattgttgggcttgcacagaacgggtggtacgaagaatctctcagtgtcttcgctggcatgcgtgtaaatgctgttgattctaccatgtatgcactctccggtgctctccgggctgctgcagggcttgctgtgctggagcagacttgtgggattcacgcgcatgcggtggtggttgggcttgatgggaatgtgtgtgttgggactgccctggtggatgcttatggtaaggctggaggtgtggatgatgcagccagggtttttaaggggttgggtgctgaccggaacctgattacatggaacacggtgctgtctgctcatgctcagcagggagatgtgcaagcggtcattggactgtttaaccagatgatggagctgggttttgctcctgatgggctaacattccttgctgttctcacggcatgtagtaatgccggagcagccactgaagctgagttttggttggaaacaatgcagtcaaagtacagtgtgaagcctggccttgagcattatacttgcgtggtgggtgcaatggcacggatggggcgtctagaggatgcagagagtgttgcttgtacaatgccatgcaaaccggatgcagcagtgtggcggacgcttctaatgggctgtgtggttcaccgcaaggttgacctggcagaatccatgggacagaggcttctggagattaatcccaaggatgactcggcttatgtcctgcttgccaacgtctactcagctgctgggaaaaagaacgaggaggctgaggcatggactgcaatgagggaccatggagtcaggaaggaaggtggcaggagttggattgaggttagagggctggtacatgtgttcgttgcaaacgaaagaagacatgaacagctgctagaaatatatgacaaactgactgaattgattctagaggtagagaagttagggtacaaggagacagatgaggggtttgggcatcatagtgaaagattggcccttgcatatgggttgatcagtggtgctgcaccatcaggaaaggtgttgagaatagttaagaatttgagaatatgtgctcattgccatgaattcttcaagtatgctagcatggtgatcgacagagtaattgtagtacgggatgtcaataggtaccacacaattaagaaaggtgattgcagctgcagagactgctggtgaaacacatatatcctgagggtaaactatgatgcaagaagcattattacgattttcggatactccacgagataattggcttcataaaaaactcaccgcaggattgattggaaacttgcttggagttgttgccatagggtttacactcttctaagcaagtgaaagcttctttggtttgtacaaaacaagaaggttgaagatcggactgacccacattttcccactgtccaaggcatagtatttctgggcttgaaggttgaggcattgatacagtttatactccaacagggtgcatcaaaaaatttgaatctcatgtagtgggataaactctggacaatcaacaagaagataattgatccagtgtgcgcaaggcatacttctgtgctaaaagaccagtgtgtcatctttactcttcaaaatggtccaggccatttattcgaataatcgaattttaccaagacataagaaattttagggtgctggaaagaaggctacaacctttgccaacagaattttggctcgattttgctgatgtggtagctactaccgagggtgaggaagtaacctttatggattgggggaatgctactgttaaagagatcaaggtggagtgtggagtaattactgaactagttggagaactaaatcttgagggatctgtgaaaacaacaaaactgaagatcacatggctagcagatatagaggagctagttcccctttcattggtggaatttgattatctcatcagcaagaaaaaggtgctctgacattagctagtgttttgctttatccgaagaagttaggtggaggagcagtgttcagcaggtgggtgcctttcggttcatcagtgagaggatttcacctgaagcgaggaagacccatttctttggtcgcatcgatggaatggctgacaaagtagtcttgtttgaagccggtcaagctggtccaccatttttttttgcagagtacgggtgttaactgtgattcaaggcatatttcccttttatcttgagtcatggatcaagagtcgtctaaatgcctctcaagagaaggccgctgcagaaggtgcgtgtacttcatcgggctgtgctggagcgcacctgccaagctgtggtggccactgatgagttccggcgagagcgaaggcccgatggccatactgacatcttcttgcggtggaatcgagtcgtcatcaggttgacagatggactgcacgacatctgagctcccacactctttcctgtactccaggatgatgctgctgagctggttctgctgctggaagtgatcaggaagagtctgcatagcacag

SEQ ID NO: 25983 - DNA, 2170 bp, Zea Mays
agcagcacggacggggcatgggattgacccacacacccgccctccgccccgcaagccaaatacgccgtggcacgcgtcgccatgccgccccagttccccaccgcccgcctcctcctccctagtcacaggctgctcccgctcctctcccctctcccctccgcgtccctgtcccctgctcctcgcaccctccgcctcccgccgccgcagcttcttcaccgagtcgcccgccgccgcccgctgctgcgcggcatggcctccgccgccgcccccgggtcacacgccgccgcggaagcgccccccgtcgacgtggggggagggggcgctggcgccccgcggcggctcgtcctggaggagctaccctgggaccattccttcgtccgcgagctgcctggcgacccgcgatcggacactatcccgcgggaggtcctgcacgcctgttactccagggtgtctccctctgccaaagtggacaaccccaagctggttgcgtggtctgattccgtggccgatctactcgatctggatcacaaagagtttgaaagacctgatttccctcagtttttctcaggagcaactccactagtggggagtttgccctacgcacagtgctatggaggacatcagtttggtgtatgggctggtcagttgggggatggaagagcgatagctcttggagaggttgtcaactctcgagcatccgtgaattcttatgcagcgaagccatgcacggcctaggcattcctacaactcgtgctctttgtctagttgaaactggaaaatcagttgtccgagatatgttctatgatggcaatgcaaaggaagaacctggtgcaatagtttgtcgtgtagcaccgtcttttttacgttttggttcgtatcagatacacgcttcaaggggcaaagaggacattgagattgttcgtcgtttggcagactacacgatacatcatcactttccacatcttgaaaatatgaaaaagagtgaaggtttgtcattcgagacagctataggagattccccaacaatagatctcacatcaaacaaatatgcagcttgggcagttgaggtggcggagaggactgcttacttgatagctagatggcaaggtgttggcttcacccatggtgtacttaacactgacaacatgagtgtgctgggcctaactattgattatggaccatttggatttctcgatgcatttgatcctagctatactccaaatactactgatcttcctgggaagaggtactgttttgcaaatcaacctgatgttggcttgtggaatattgctcagttcactggaccactgtcctctgctgaacttatcagccaagatgaggcaaattatgtgatggagaggtatgggacaaagttcatggatgagtaccaatctatcatgaccaaaaaactgggcttaactaagtataataagcagctaattagtaagctgcttagcaacatggcagttgacaaggttgactataccaacttcttccgtcttctttcgaatgtcaatgcggatcctggtattccggagaatgagctgcttgtcccactgaaggctgctctcctagatattgggaaagaaaggaaggaagcatggattagttgggtacagacttatattgaagagctggtggagagcggcgttcctgatgaagaaaggaaagccgcgatgaactctgttaatccaaagtatattctccgcaactatctctgccagtctgctatcgacgtagctgagcaaggcgattacgaggaggttcgccgggtgcttagggtaatgcataatccgtatgacgagcagccgggaatggagaaatatgcacggttgccaccagcttgggcatacagacctggagtgtgcatgctgtcctgctcctcgtgaaccccatgatgcaagacgtggagtcgtcgtggacattacaaaaatgcttgggtgcttatagtcttcctcctgtataggggtccatctttgtgctgtaatgtgtcaagcatcgcatgctattttttttccggtgatgcaagtgtgtaagaaccatgtcgttgcaggaatagtgaagcagtgggacctgttattgtgactacctagtatcccgtacggagatggaaatttggcggtttactagtctatatagtgaagctctggcacttgcagactggtcaact

SEQ ID NO: 25984 - DNA, 1699 bp, Zea Mays
aacaaccgacgagcgaatcgcgcagtcttttcgcgtgggaaaaagctagtcggcccggatataaaggcatttcttcctcgcaaatcgcaagcttcgtcttcgtcctccactgggcaacgaacgcctcctccctccctggttccgttggctcttgcaccaccagcaatggcggcttcttggagagccgtggcgctgtcggtcgtcacgctggcctggctccttggcggtggcgcgtgggcgttcccggcggaggatttggtcacgcggctgccggggcagccgccggtgacgttcaggcagttcgcggggtacgtggacgtggacgtcaaggccgggaggagcctcttctactacttcgccgaggcgcaggagaacgccgccgccaagccgctcacgctgtggctcaatggaggtccaggctgttcttctattggaggcggtgctttcacagagctagggccattttaccccagaggtgatggtcgaggcctcaggttgaacaagaagtcatggaacaaagcgtccaatcttctgttcgtggaatcgccggctggggttgggtggtcttattccaacacttcgtcggactacatcaccggagatgcgcggacagctaatgacatgctccggtttttgttgggatggtacgccaagtttcctgagtacagatccagagctctattcctcactggagagagctacgcagggcactatataccacagatcgctgatgtacttgtcacccataacgagaggtccaagggtttgaagttcaatattaagggagtcgctatcgggaatccgcttctgaagcttgacagggacgtcccggcaacctacgagtatttctggtcccacggcatgatctccgacgagacattcctagcgatcagccacagctgcgatttcgaggattacaccttcaacaacgacagcccccacaacgagagcaagccgtgcaacgatgccatcgcagaagccaacgccgtagttggagactacgtcaacaactacgatgtcattcttgacgtctgctacccatcgattgtgatgcaggagctacggttgcgacagtttgcgacaaagatcagtgtgggagtggatgtctgcatgtcctacgaaaggttcttctatttcaacctaccagaggtgcagcaggccctgcacgctaacaggacgcacttgaagtaccaatggagcatgtgcagcgatttcctcaactacagcaacaccgacggcaacatcgacatgctgcctacgctccaaagaatcgttgagcgcaagataccactctgggtcttcagtggcgatcaagactcggtggtgccattgttgggcagccggtcccttgtgcgagagctagcgcacaccatggggctgcatgtcaccgtcccctacagcacctggttccgcaaaggccaggttggaggctgggtgacggagtatggcaacttcctaaccttcgccacagtgcgaggtgcatctcacatggtgccgttcgcacagccggaccgggccctcgggctgtttcgatcgattgtactcgggcggagactaccaaacgcaaccagtccaccaattggctgaagtgtatctatctacaaatgaaggtggagatagaaaaaaggttgtggcaaagaaccttctattagtggaacttttgtccccctgacggactttacaagaaagagtggtccaa

SEQ ID NO: 25985 - DNA, 917 bp, Zea Mays
cggtaccgcacgtttaattgaaccggccggccgtgggtgtgccgtgtggtgtgggggtgcgggtccggccgtgccgtctcgtcgtcgatcgccgtcgcgccgtagtccggtccctccgcgcgcgcttgaacgatcctggcggcgcggctagctacgcatgtacccgccggcggcccggcccccccgcgctgtacacggcggcaggcatgcatgcaacgcgctgcccccctgttgacgcatggccggccaacttgcaacagacagcgcggcgtgcggtactgccgtctttcccggcggccggccgcgcgcaaagttcgtgcgagcagagcacgagcaaatcaaaaaacggcagggattcaaaaatctgggcgcacatttacagacgcgctaggacggccggaattattcagggccgatcgatggatcgacgcgcgtgtacgtgtacgagtacactgtaggtgtacactgcccgccgcccgagcaaagcggagcgatcgccatcgtcgatgggggcggccgacccagggcccgccgcgtagggcatctggccggggtggatggagatgcatggttgtgcactacccaggcaggcagaatgcacgcacacaacacgggtgtctgggtccggctccggccggctgtagcacatgtcaccggacctggcaatgatgtggacttcgtgggccccgtagtggtccatggacaccgcccaggatcttctgcgtccttcatccgcaccagctgtggttaatggcgtcctcctcgtacgtgtatgtgtatcataagttttcacatctaggacatgtttctctcagcggactgtgtgggcgagctagctagctctagctcctgtttaaagtactacagtattataaatattgagctcatgtttaatttatgtgagtggttggtttcta

SEQ ID NO: 25986 - DNA, 2664 bp, Zea Mays
cacaggcacaggcacagcccacccacgggagggaaggataaggattcatgcgaaatgccacctgaacttggaatgtcttctagaactgttgctggtgctgttgtaaataggaggcctcgccgcctgtttgggagatcatcagagaggaagaacccactcaaccttcagtttgagcgtcaagtagctcgcctcgaggcaaggcagcagcaacagagattgcagaaaaaaatgtttgcaacaaagaattttacggtccacctggaagcaaaatgccattctaatgtttttcctctgccaatccttggtcggttatcctttgttaattaataattgtggtattcacttacttgccaggtgtgttattgtgacagttattcccttcaatttctgttacgacttcaaatcactatcgctcaccgagagtgcaagtgaggatccttcatctcgacctacatctccagaagagaaccctgaaacatcgtcctcaccatcgattttgttcctgcaccttaatgctcaagatgtatctcacagaagatggcaggataattcatcaaggctactggaagataagcccacaacatccaatagcatgtctgattcagatttcttagtcaacagctttaccaagccgagtgataatgcaaggccatcaagaaggaagagcaaaaagaaaagcaagaaacacaggcaacgctgtaggaagccgactgatggatctgaagctaaattcagagagggcaatggtgctgcctctgcagctgatgttggtgattgtgaagattcgacactttcgcctaagcatgttggtgacatacgctttgaggaaacttctcccagttcttctgtcaaggaagcttctgaagaggctcctgagagtgatgatgatgagtaccattgctgctcaggtggttcagtttcgagtgcgtcctactgtgatgagatggaactgtccaaatcaacaacttcgtgccctgcattgtgtggacaatgtcctagcagtaacttacagtatttggacaacactcaaaattctgcaccaacaggtccatctcaagaaacttgctatgctggcagtaaagcgaactgtaaccatgataccaagtccctgtttatattcagaaatgaacgtggatctgatccttgtgaggcaacagagttttgcagctctagcagtggatttgatgagaactggatagagaagtttgactatgatagtggcatttgttcgccaaaaagtgttggtacatatggtggagaccaggctgcccacttgtgcagtgacacaactggtgacaatgatttctgtcttgtaatatctagaaagagggccagaaaggagaagaaaatgtcattgtggaagagttatggagcgcatgcatccacacctgcacttgatcgaaataaaaaatatgttggccattcttcaatgcagatgaccaacgaattcaacagtaacgactggtcccatagacaaaatcatgttagcaggatacaccctcagcatggaaatgcactgaaaagctccaccaaaaatttcatgcagaggccaagcattggttgcagggagactcaatatgggtttccagctaaagaatccaagttaggagcaagtctcaatcattctacaggtccaagagaaaaaacttgtggaaaattaactggcggttttgataagacagcacaacagctttatttggacagagacctatccaatgctcttaacagcagtgaatcaatacgttgtgagacgagatcaatttcctcttctgaaccgacaactccaaagtctttaaaaggcaattatacttcagagtctggtgaatcaacagatattacaataggagctcttcccatgcagaaaagaagattgcaggatttagttcgaactgatgatgccagtgaaactatttctgggcgatcatcaccttgttctgagtcatcgacaactgaattaattgctggacatagtacagattcatctattgaagggaaccatggctgtcaagggctctgtaactctagaacacatctagcccagatgctcagggttgtaaacgatgcctgtaaagttcaggttggtgcagatgttctccttgctgctggttatccaatttctgatcttgagaaatttatatgctctgcaactcccgttattggtcgtgcaccttgcatgataagcaacacttgttcattggaccaagtagttagtgactcagtttgtcagcatgacatctctaatgtttccttgaggagaatatgggagtggtatgaagagccagggtgctatggattggaagtaaaagctcttagcaatctcagctctaaaacatccagcagcagcagttcagagttctttgcatactttgtgccttatctatctgctattcagttgtttgggttgtctaggaataacatgcatcacagttttggtgtgcaagggagggaattactgatatcatcaaatactgcaagctctatgagctctcatcctgtgcatgcaaaagcgcatacactgcttgaggaaagtaatgcatgcttgccagagtcatctttagttgtagaagatcctggagaactcatatttgagtactttgaaacagagcaaccttctctccggcctccattatttgaaaatgagtttgtgagcaatggaacttttca

SEQ ID NO: 25987 - DNA, 1665 bp, Zea Mays
cgatctctcccatcccaaactcccaacgtcctcccctagcacggctttccacggccgtgtccgtgctggtgctgtgcctgcataaaagccacggccagggcagtgttaaggcgtcggagggcgcgaggggaggccgggagggacagccagcagccaagccatggacctctgccccccgcgcctgcaataataccacccctcgccgacgccgccaccatgggcaagaaggcgtggctcaccgccgtcaagcgcgccttccgctcgccctctaaggacgacagcagcagccccgccaggaaggcgtcgcgcctccgcgaggacgccgacggcgaagacgacaaggcgctggtgcgcgtgcaggcccgtgtccgcgaccggcgcatgcgcctctcccaggaatccgtgctctccatgtccggcggcggcggcggcgccggcgccgcgccgtgcggcagcagtaagtcgtcgtacagcgtcgacacgtccgccttttgggaccccaagtacgcccacgactacgccgaccgtcgctccgttgagcggtcgcgcgacggcagcagcttcgccgccgacgactgggacgaccggccgcggacgatagaggagatccaggctatgctgcagacgagaaaagacgcggcgctcaagcgtgagagggcgctctcctacgccttctcacaccagattcggaggaacccagcggcgccgtcggcggacatggacgtggacgtggacgtggacgggcagccgcggtgggcggagcggtggatggcgtcgcgcgcgtcgttcgacaccagccgcagcagcgtacgcggggccgcggcggcggcgcccgggcgcgcgtccatggagcagcaccgcgagccggtgaagacgctggagatggacacggcgaggcccttctcgtactcgacgccgcggcgtcacgcgggggcgtcgtcgccgatgcaccgcgcgcagcagaaccagcatcatccggcggtggccacgccgtcgcctgtgaaggcgcggccgccgatccaggtgcggtcggcgagcccgcgcgtggaccaccaccaccgcgggactggcggcggtggcgggagctacacgccgagcctgctgcactcgcagcggcacgcggcggcggtgcccaactacatggcggcgacggagtcggccaaggcgcgcgtgcggtcgcagagcgcgccgcggcagcgccccgcgacgccggagcgggagcgcgaccgcggcgccaagaagcggctgtcgttcccggcgcagctgcagcaccaggtgctggcggcggagtacgcgcagagcctgcgcagcccgagcttcaagagcgcggcggggcggttctcgtcagagcagcggtccaccgtgtcgtcgtcgtgcgcggacagcctcggcggcggctgcggcggggacgtggggtcgccgtcgtcgtccgccgcggacctccggcgctggctccgctgagtagagctagagagtagtggcgagtggctcgtcacgtcatcagacacggccacgtgctagctgtatttcttcttttcttctttctctaggtgtaattcatggcagcttttctctattttgtattgagccgacggattggagtttggagcgtgtgctgctgcctgctggtgcatgcgcgtggtgtgtccagtgtcccaactccca

SEQ ID NO: 25988 - DNA, 2082 bp, Zea Mays
ctctcctctcctctatcatatttaccaccaacggcatgccgctgtcgctgcctttaaatagccggcggggggcaaacagctcgtcagtcaggctcgcggccgagccaccgaggagcaaagcaaagctctcgttggtcgtggcggcagcggcggcggtggcggtgtcgagctgcggtgctgaaggcaagagagccgcgcgccgtgaagagtcgtcgtcgatccggccgagctccgtcgcttcattgatgaatgccgaagctatagcggtccttgctcgttccaaggttcgatgccccggtcgccgcccggatgacactgccaaccccggtggtagccggcgttgcggctggcgccgccgcgctgctactggccgccgccctcgccgtggcgtggtggtggctcgtgatcgtgaggcggcgccggcgccgtgaccggagctccgacaccggatcctcgtcggaggctcctcctcccacgctggcggagtggggccggtgcggccgcacctcgtcggcgcccgagttccacggcgccaggcagttctcgctggaggagctggcgcacgccaccaacggcttcgccgaggccaacctggtcggcgcgggggcctttggcctggtgtacaagggcctgctgctagacggcaccgtcgtcgccatcaagcgccgcgcgggcgcgccgcgccaggacttcgcaaacgagatcaggaggctgtcagagatctggcaccgcaacgtcgtgacgttgatcggcttctgccaagaaggcggtctacagatgctggtgttcgaatacctgcccaacgccagtgtcagcggccacttacaccggcaaggagacgatgaccaggctggagttcaagcagaggctgtcaatagccattggagcagctaaaggtctgagtcacctccacagcctggcgccgccgctgatccacagggacttcaagacgagcaacgtgctggtcgacgagaacttcatcgccaaggtgtccgacgccgggatccacaggctgctgcgagggcctgatggtggcgccgtcgccgctctggcgagtcgcggtgtcttccaagacccggaggtacattcatcggcgcaggcgcagctctctgagactgagagcagcgacgtgtacagcttcggggtgttccttctcgagctggtcacaggcagggaggctgcggggctgatgccgccggggtccagcaaggactctctcgctcaatggatggaggcgcgtttcgcctcgaacgagctggtcgacccgagactgggagggagcttcacctcggagggtatggcggaggtggtgggcctggcgtccagctgcctgagcccgtcggcgaggcggcggcccaggatgcggctggtggcggcggagctggaccggatcctggagaaggagatggccctgaccaccgtcatgggcgacggcggcaccgccatcgtcacgctcggcagccagctcttcacgtcctgactgaccgggatccgatggctggcatcgtcggcccaaggaggaagcatggtcgccgacgaagagacccccgcgttgcttccttcgtgtcctgggccgggagctgaacgacgcaacgcgatgcaagcagttcgtggccgccggtgattctccagctcactgctcacctcaggaaatttcaagagacggcgacaggcgcgcgaacctgtgtcctgcattttcttcagtcttccatgttcagagttccgttggatttcatccagcagctcagccaaaatatgtgtatgtgtaaaaattcacatctggaattggaagatggaatttatactagtactagaggcatattttgggctgtggaacctcatcacccagggtcacttatttccatttgtttattctttctctgaaacaacatgcgatgcgatgcgacactgcagctctcccaaaccgaactgtacccaaccgaagcgtgtcagtccagttcaattttaccactagatcgagctgctcctactactagaactacaactgaaacagaaagcattgtgcatgaattatctgcccaactagtgaagagtgacgaataacagaggtaaataaacggc

SEQ ID NO: 25989 - DNA, 148 bp, Zea Mays
tgttataaattatttatagtttgaaatatatgctagctcaagtgaccatcctcaataagaagtttagaagagttacttagacttataagaaggtcgtgcccaccggcgcttaacaccaatcacaatcaaagtgactcataacctgcag

SEQ ID NO: 25990 - DNA, 2314 bp, Zea Mays
gacccgcccatctttcgccctccccatcccgtcgtggttgcgcgtcgacgccatcgaccgacgctgcctgcccacttcccccgctcccgtcgcggcttgttagtctcacctggtccatcggcggcccctctcaccgggacgcgaactcctccgcgcttccttccgccgaagcgaagcgctctacccaccttcgtccttctgcactcttctgtacgggcgtggaacgtagatctgtctatgctggcactggtttctgcttcccttgatattcttcacctagtgggtctgctcattgatggaagacaaccagattttggttcagtcagagcataaccttataccaggttcgcggacccttgtcattggtcaagagtttgcagatgttgacacatgtcggagggctgtcaaggacatggccattgctttgcactatgaactccgtgtagtgaaatctgatcgtagccgtttcattgcaaaatgctcaaaagaaggttgcccttggcgtgtgcacatcgccaagtgccccggcgttccaactttcactgtccggactttgcacggagagcacaaatgtgagggtgttcttaacctgcatcatcagcaggctactgttggttgggttgctaggtctgtcgaggcaagactcagggataacccgcagattaagccaaaggagatactgcaggatattcgagagcagcatggggtcgctgtttcttatatgcaggcatggcgtggaaaggagagaagcatggctgcagttaatggtactcttgaggatggataccgacttcttcctgcatattgtgagcagattgttaagacgaatcctggtagtgttgcaacctatagaggtattggaccagggaatgccttccagcggctgtttgtctcgtttcgtgcatccatttatggtttcttaaatgggtgcaggccccttctagaaattgacaaggctgacttgaagggaaagtatcttgggacattgctgtgtgcttcagctattgatgctgatcacatgatgttccctctagcattcggtgttgttgattgcgagagcgatgataactggaattggtttatatcggaattgaggaagatgctcggagttaacacagataagatgccggtgttgactatagtttctgagagaaaacggcaagtggttgcagcggtcggatctaatttccccactgcttttcatgggttttgcttgagacacgtgagtgagaatttccgtgatgagttcaagaatactaaactgcttaacattttctggagtgctgtgtatgctctcacagcatcagaatttgatgcaaaggtaaatgaaatgatgcaggttcaggatgttatgccatggttacagcgttttccgccaaacctgtgggcattttcttacttccagggtatcagatatggccattttagtcttgggataaccgagatattgtataacttgtcccttgactgccatgaacttcccatcgtgcaaaccatcgagcacatcaggcaccaactggcttgctggtttgctgaacgccagaacctggcacagtcatacaactcggttcttgttccgtcagctgagaaagttatcctcgaagccatccatgactcacaatgctatcaagtccttcgagcaaacaaggtggagtttgagattgtgtcatcggagcgaaccaacattgtggacacccaagctaggttctgctcgtgccgccgatggcaaatttacggcatcccatgcgcacatgccgccgccgcactgctctcatgcggtgaagacccccgcctctatgctgatgactgcttcagtgtgatgaagtaccgagaaacctactcccagccaatatatcctatcccggacaggagccactggaacgattcgtctccctggtcacaaggtgcggtcagcaaggccgatgtggtgcttggcccgcccaatatccggaggcctcctggccgacccaagatgaagattctaaagatcgagagcatgaagcggccgaagcggatcgtccagtgtggccgatgccatcttcttgggcattctcaaaagaagtgctctttgcgaagctgacacgtccgttggtgtacatgaactctgttttattgacagcttagggatctcatgctttttttcgcgtcaggtgcaggtagtccttctgtacaagtacttcggtagttctgtgtagctctctgcttctggggaagcgtgtcgactttgggcaccgtctgtccatagcactcaaaagtgtcttctacgccgtttcagagcaatgataatctgccactgttttttatgatttttgcg

SEQ ID NO: 25991 - DNA, 2026 bp, Zea Mays
acgcccgcccgcgagaaccgcctccgcaacacccttccccaaacccattctccccacgcgcggcgcctccgcaacagcaaccgccgcgcccgagcccctccaccatgtcccattcccaccgctaccaatggcgcccgagcccgagcccaaacccacgcgctgcggcggccgagatcctgccttcaacgacgcgaaccccatcccccacgcgccgcggcggccgagatcccgccttcaacgacgcgaacgccaacggagcccgagcccacctcgccttcaacgcccctgcctccctctttctcctcctcccccgcatgcttccactgcttctctccagcggcgccgccaccgtccctctcgctccagcgagatccagatccggcgcggctcagagtggcaacgcgccgcaaccgcggccgcgccccacacgtgccctatccaaccaccatggagctcttccccatccatccaccacgccgagcgggaggtcgaagtgcgagcgctggccgaccaggcggcccacatagaggccgaggcgcgggccgtcgcgtgcaagaaggtcttccgctcctaccaggcgcttggcggacaccgcgccagcaacgtgcgcggcggcagaggcggctgctgcgcgcctcccgtggctcctccggccccacccccgcagccccagccgccgctgtcgccattgccggagcaccgtgacggaggcgaggacgatgacatgaacgcaaagcagcagccgcgcgagtgtccccactgcggccgcgtgttcttggggcaggctctcggggagcacatcatgcagtcccatgtgtgcgcctcgtcgccgcttgccggcaccgccaccgcctccaccacctcagccgccactcctgcgtcaccgaccaacagtccctccatgatcgatctgaacgtggcgccgcagtccgaggaggtggagcactctgccgtgtcagatccccgcttcaatccaggtgcctgaagctgaagcaggcagatcagcgccctcattctggatagttccgttgctcggaggtgattctaggttgagctttctcttgaagctgcaaatttagcacagggaaatgcaactctaggaataagtgactcttcagcagtatctgcaacaagagccagggcactggctgaggatgcatttttccatccatccattatgtcaatcagttatgcttcagtagagcactatttcgccatttacatgccatttttcgcaccagtttccttgcatgtgctgctggcggcaatcaaagagctgaaacgttacaaggcagagcgagcaaaatattcggcatttcttgcttcccaggcgacatcctcctgatctggtggtgattagggtttagggtttagggtttagggtttaggcaagtactacgagaagaaggggctcatcgctgaagcttgggaatccttcaatcgacccagaccatgccatgagtcatctttgttgaccttacccccacctcttagcgagagaattcttgtgattttcttgatttttgttgttcatgtttgatgtcactaattttatttgttgttgttgttgtgcagatttgagatcgagcgaagctaagcttttcatcaagatggcgctttgttacaggtggccaccacaagcgaggggtctgcttcaacttcttgacagagacagatcggaggctttcttggcaatggaaagttttgttggtagtagtattagctttatagggggacatgtcattagggttgatcttgtgcttttgaggccttgcttacaggcacggtactactgaaatagttagcaaaagatggcaatactgatgtaatccagaatgtagcagtacatatcaactgccgtcttagtttcagttcatgaagtgaataatgcataccaaactatgtcccagttcaaagcatctagaacagtgaagtattatgtctgtcgcgttttctcattctgataattcatatcaactgcttgtgatgctttgccattatggaattgagtatgctgtgagttcag

SEQ ID NO: 25992 - DNA, 1043 bp, Zea Mays
cttcccaaacggagagagaaacggaaggcgaatagaagaaaagcgtgctgttttttcatcctctcgtgtctcgtgtgtgcgcgcgagcgtgcgcctccctccccatctcgcgatcccagttcgatccgctcgcccgctctcccgatccgacccgccctccgcggccgggcaattcggccgccgccgctcggattcgcgtgggctcgccctcagattcgctctccccggcgccccaaaccctagatccgccgctggtcgtcccaccgccgccgccatgttttggcgcatgaccggcctctccgcggcctcgcccgtggatacaattctggacaaagaaaattttacattggaagaacttcttgatgaggatgaaattattcaggagtgcaaagcactgaactcaagactcataaacttcttacgtgacaagtcccaggtggaacagttgcttcattatattttggaagaagttccagaggatgctgaaaggaagcgctccttcaagttcccttttattgcttgtgaaatatttacttgtgaaatcgatgtcattttgaggaccttagtagaggatgaagagctaatggacttgcttttctcatttgtgaaacctgatcatccacatagcacattattgtctggttacttcagtaaggtggtaatatgtttgatgctgaggaagactgctccacttatgagttatgttcaggggcatccaaagatagttgtccagcttgttgacctgattggcatcacatcgataatggaggtgctgatacgactgattggtgctgatgagaccatatattcaaactatggtgatacattgcagtggttagaaaatacagatgtccttgaaatgattgcagacaagtttggctcatcgattggcaaaggtgaaccttgaagcatgtactacgacacattgttgaatctggatgcaccatttctgctcgtttcattcacaacctgaccagttgctgatgctggctcagaggagatgagatgtgtagatgagagaagttgtctgtatacctccaaag

SEQ ID NO: 25993 - DNA, 3664 bp, Zea Mays
cggcgggagcctctaacccttgctgttcgctcgctgttcgccccccagccgccaccgccagttcttccattcctccgcgctctttgagccttcgtctcccagtctcctcaactcaggtacgttgtccgcccgccgcacaccctcgccactgttcatcgttgcacgctggtgcttccctcatctccacagaacatctgattcggccagttgagttcctctcggacgctggttgtctccttcgacctccgtttccttgtcatttctgtgcctgacagcaacccgcgctcccgccgcatctattcatggcggagccgacccccaagtcgaagcgcaccaagaaagcgaagaagccctcggcccgggaaggtgatggagaggacatggatacgctcaagtctgacgtcgccacattcgcctcctccctcggcctcctccctggcgctggcgactccaacggcggcttcgatgactccgacttccgcaagtccggccccatgtataaatcctcaaaatttccttccaaacaaccccatcaaaaacctgataacacggcaaacccccatctaaaccctagacctaccaagaagccacaccctctcgagctacgtgactcctatgctgccaccaaacctggtgctgtcaacactaattaccccctgatgaaggcggcagcactctcagggcagtggtacactgatgctgatgagctggaggcgagggtcctaggcggtcgtaagcaggtgcctccagctgtggggcttcaggagatgcagggaatagtggagagaaaacgagagctggcagagaagctcatgttgcagtatgcgagggaatacgatgccgtgaggcgagggcatggtgacctgaagctcctggacatatcagcaaagtctggtacatcagctgacaaggtgtcagcatttacatgtcttgtcgaggacaatccaattgcaaacatgaaggcactcgattccctccttggtatgataacatcaaaagttggtaagaggtatgcgttcacaggattcgatgcaattaaggagttatttctcatgaggttattgcctgaccgtaagctgaaaagtcttatccaacgcccgctagacattttacctgaaacaaaagatgggtactcacttctgctcttctggcattgggaggactgcttaaaacagagatacgaaaggtttgttatggcattggaggatgcggtaaaagatatgctgccaaatcttaaggacaaagcaatgaagacagttttcatgcttttgaaaagtaagtcagaacaggaacgtcgtttgctcacagctcttgttaacaaacttggtgatcctgaaaggagagcagcatcaagtgctgcatatctgttaacatgtctcttggctgctcaccctaatatgaagatggtggtgatagatgaggtggattcttttctcttcagaccacatgttggacttagggccaagtaccaggctgtcaatttcttgagccagattcttcttacaaacaagggagatgggcctaaaattgcaaaacggttggtggatgtctacattgcacttttcaaggtactaatgagctctggtgataccaaaggagatacatatagcaaggacagcaagaaaaaggtaggaaaaatagagggaggaaataacaagatggactccagatccaagggaaacaatgaagtgggttcaacagcaggatcagatttggagctggactccagaatcctttctgcgcttttaactggtgtaaatagggcattaccatatgttgcaagctcagaagttgacgatattgtggaagtgcagacacctattcttttcagattggttcacgctgaaaatttcaatgttggtgttcaggcattgatgcttttgttccaaatatctataaagaataatatagcaagtgatcgtttgtaccgtgcattatactcaaaactcttgagtccttctgctgttacttcctcaaagccagagttatttcttgggctgttggtgaaagcgatgaagaatgatgtaatgttgaagagagttgctgctttctcaaagcggctgctgcaggtggctcttcaacggcctcctcaatatgcttgcggatgccttttcattctgtcagaagtccttaaggcaaagccaccattatgggggattgtgctccagaatgaatctgttgatgatggtgatgaacactttgaagacattttagagattcccgaggactcttctgttgcctcagcagtgctacataaacataatgaaaaagtagctgcacatgagaaacacaaccttgatgctgctgatggaattgatagtgtaaaacaagtaaatttggtagatgagaacaatgcatcaactgactcgtccagacaacatgcattctatgatccacgacacagagagccttcttactgatcgtgtcagttggtgggagttaacagtattggcttcacatgtgcacccttcagtttctactatggctagaacattgctatctggcaacaatattgtttacagtggtgatccgctgacagacctatcacttcctgctttccttgacaaattcatggaaaagaaaccaaaagggaaccgcatagctgaaggaagatggcatggtggatcacaaattgctccggctaaaaagcttaatctgaatcatcatctcatcggagaggagcttctagaattggcagaaaatgaagtgcctcctgaagatattgttttccaccgtttctatttgaacaagaccggcactgttaagcgtaagacaaagcagaaggactcagttcttgatgaagatgcgggggaactcttagctgataatgacgctgatgaggctagtgacgagagtggagatgagatactggatctgggagatgggttggcagatgatggagaatatgactatgacgaccttgactcaaatgcatttgaagaggaaaaagatttacttagagatgacagtgatgtggaatttgatgacgtttcagatgatactgcatctggggatgaagggtcagaaaatgacgatgacattcctattctcgcgggcgattcagatggcaacttaagtgatgacgagatggttgatgctggtaagggcggtgtctcttacacaaagaaaaggagggcagggaagaagagtgggttgtctccatttgcaagcctggatgattatgagcacctaatggttggggatgctgatgcaacaacagcaaagcggaagcacatggcaacagggagagctggtggtgagaagaaaccaaagttgagaccacgaaagaaaaggtcgcggagttcagaatgagaaacatgccttttacccttaactcttttaaaatgttcaccacaatggtgttcattacatttttgtacttctggaaggcacaggattgggtaacgctattgttgagccgagaatgtattgagattagattatacaggtgctctcatatagtagtccttatcccacacaacgcatttatacgggctaagtttaagaccaactcaaagagttgtttttcttattgagtcaaattttagattttctgagtaagaaattattctccaacaggtattctatctagagttgtagattagctagcaaaggcatatcgtcctttccacttgctaagccagtcctaattttcctgtctcag

SEQ ID NO: 25994 - DNA, 1127 bp, Zea Mays
gatgttatttcagtctctctctaccttcccccatcttgttctggtccaagctcttggcacatgatatacgggatggacttaaacactgacaaaggtcttcttttggtggcagataactttggttttctttacttcctggatagacgatcaaagacgagaattggacatccaattcttatccataaaaagggtagcaaggtaaccagcctacattgtaaccctgcacgacctgaagtgcttctaagcagcggaaatgatcactatgcccgtatttgggatacaaggaagcttgaagccaactctccccttgccagccttgctcatggacgggttgttaattcaggatacttttctccacgaagcggaaataagatcttgacaacttgtcaggacaaccgaattcgtgattacaccgaaacagttgcagtgattggccgttacataagtgagaactacaatggtgttgctctgcatccaattgattttatagatactagttctgggaagcttctggctgaggtgatggaccctgacataataacaatcagcccagtgaacaagctacatccgcaagatgacatcctagctacaggaagctcaaggtctattttcatatggaagccaaaaattgaagatgaacttactgaagaaagagccaagcatgacaatagtagtgatgacgactcaggtggtgattctggcggaaagaacaagaaagcaaagaagactcgcttcactcatgcagtaaagggaaagggcaaatccaaagtctgatgcttggtgtacatagtcggcagcattttgacaagaaagcgtccattaaccagctcctgatgcatctccttttgtaccatcttgccaactccctcaccccccccagctaaggtgctgaagacccgtatgaaacgcatgctgatagaccccatagttgtctcctgcatcaatgctcctaaggagttagccagttaggtttcggactcttttgaatcctgacatgcttatgatcacttgtcatttgtcaacgaggccttttaacggtttaatcctgtatcaacatataaatctcctgtacagttgcctgaatgcaatttgtgcttgtaaaatgtttattggtgctctcatctgtt

SEQ ID NO: 25995 - DNA, 545 bp, Zea Mays
cgcagaggcagaggcgcaggatacgcgggggaaaaaaaaggaggctcactgtacaccgagctcacgcagggcgtagcaaatcaggtaggcgaaatcggagcagaggccagggacgcgccagcgcgagcgataaggcacactgacatggccgccacggcgtactccaccgcgctccccggcggggcgcgcctccccgctgccggagccgccgcaccgccctctgccctcctcctcccgcggcgtaataaactgtctccgctccctctccggctccaagatgcgccgaggctgtcgttgctccgggtgaaggcctcctccgacgactcctcggccgcgagcggggacgagctcatcgccgacttgaaagccaagtgggacgccgtcgagaacaagagcactgtcctcacctacgccggcggcgctgtcgtcgctctctggctgacgtccgtcatcgtcggcgccatcaactccgtgcctctgctaggagatgactggccagcacagcaagtacatgtaaagcccggtaaaagttcatgcttggtttg

SEQ ID NO: 25996 - DNA, 845 bp, Zea Mays
cgcgtacgctctcatccgatccactctcccacctgcgctgcgcctcctcggtctctccttccacctccacacctaccgcggctcctctcggttcttccaatccaattaagaaacaaactacaaccaagcagatacagcatctacgaacgaaatggagctgccgcagggccacgagaagccgccgcccgccgccaacggccggggggcgtggcgcggcggcgcgtcgtcgtcgtcgtcctcctccgcggcgaccccgcccaaggtgtaccgcgtggagccccgcgagttccgggacctggtgcagaggctgaccggcgcgccgccgcccacggccttgcggcggccgcagcagcagcaccagcaccgcgcggccgtcgtggcgccggtggtgcatccgcagcccgtggtggcgtggtgctgtgctactgcgctactcatgcatgcacggtggacgctgcatcgtcgtcacaaagagatgacctgatcaatctctccttttgtaataattacaataattaccctgcatgtacgtacgtacggccggcgatgggatgacctgctcccggtaaggtaacatcgcatcgcatgcaatgcaagtacgtgttgtgttaactacagcagttaattagcgcgagggagtatatagtgaactagtgacacatactgtactagataggcgcggcgtacacagctgtactgtatatgttcaataatattaccccaacgacatgtcgtattattactgaacaatagtatttagttgtcgatcgtgtgatgtttctgtttaattacgagtagtatcgtaagtgcacacgtatttggttggtttctttgcattccaaaaa

SEQ ID NO: 25997 - DNA, 541 bp, Zea Mays
tcttgccagccgccgcctgcaccgcagcggggccgccggccggcgcggcggcccggcggagccagcccgcgcgcgcgttcgacgagccgggcgccgcgccgatggtggccgccggggccaggacgaagaactggcgcgtgacgacggcggcggcggcggagtcgtcgtcgggtatgtcgactagcgcggccgccgacgagaaggacgcgccggagtcgtcggcagatggggacggcggggcagcctcggcggccggcgagtcgttaaggtcccacatggctaggaggctaggcgctggtcttcctctcttgctggtacgacgagtacgatgcttgtgtgtgcctgtgcacaccctcctctgctcggtctccttcttgcctcgcactacaactcgggtgatgtgaagagggagaggaccccagccaaaagcaggcgctgttgccttgttggggcatgcaagtactttctcttttgctatccccttggcaaagactcttccaacctaggagagcagaggaggccaaaagcacccgcccgcccg

SEQ ID NO: 25998 - DNA, 1988 bp, Zea Mays
gatacaccattgtacatgctcgctcttcctcttggagtcttgggaccgccccctcccctcttccgaggtccgagcctgatccctccttccttccgtcagcgcacatctctagggttttagcgccccatttccgcaacgccattcccgatcggatcgcccccttcccacccgccgccgaccagatcccggcgcgagtgctacccaaccctccggcgccgccacccttagtctcagagggtcggtctccaccgaaagcttcgcacaaatcccctccgtttgtcggtgccatttgttgcaaagattgtgttttcctcctcatccgtgcctcgcgttccatttctgccgtccccgaaaatgccaccgctttgttgagatctctcgtttctcgatctgatctcgcctcggtatggcgtgagagttcctaggggagggcaaaatcgtcggagttgagattcttgcgtccatttgctagtctcaataccgagcatccgatctcgaacagtgagacaaagtagcgacctttgtgccgttccttgtaactgagcttgcccccgcctgcgtatcggtgggtgacggcgagctctacggcgctgcccattcctatgaatggacgggagggagtccacggtggcgtcggggcccaacttctcatcgttctacacgcagcaccggggcatcggggcgccgggtgtccccggccactcggcggtgctccatgacccgccgcccgccgggtaccggcagcatcttgatgctgtctctgctggctccggtggcggcaccagctccggcggtgatatggacattggcatgggttcggctgtgtgcaccaatgttaagggggagctggggagcgggcctgcccaagatgagcaggtgaagaagaagcggggtaggccaaggaagtataagcctgatggggcggtgactctcgggttatcaccctcttcatcattaacacctcactcggccagcttggggatgggaaccatgattagtgctccaggttctggatttgggtcggagggatcaggggcttcaggcttgggtgcgccatcagagaagcgtggcagggggcggccacctggctctggaaagatgcaacagttggcttcgcttggaaagtggtttcttggctctgttggaactggttttactcctcatgtgattattattcagccaggagagggtcggtttgagatcctgtgcctttctgggtcatacttggtggtagatgaaggtggcggcgcacggacccgaagtggagggctttgcatagctttgtgtggtcctgacaacagggttattggtgggagtgtaggtggagtcctgatggcagctggagcggttcaggtgatagtggggagcttcatgtacggaggaggttcaaagaagaacaaggtgaaagccgagttggacgcggagcctgaggaggcgaacgccggcgaccaagaggtggcacttgcggagcacagcagcatggcccctcatcctgccatgagtggtggtggcgggtgggcatctggcatgatgaggcagatggagtcgagaactcccaacatcgatatcaactccatccgcgagtagtttgcctgtttggttgggtggatgaggaaggctcctcctccttggatgcacacagcacagcggcatgcatatgtttggttgtaggcgttgctatgttttaggactccagagtatattgtgatgtgatgttgtacttggatgttgttgtataagatcatgggaacgcttggtcgtgttattatgttaataaaaatatataatggatggtaagctactgtttggaagaagattaattttgaatctagttttgataggcccattttctttttttttactaacatctccctaatggtggcgtgagcatcgatagtccagaccaactccatctgacgcaacaagttagaactaatcgcaactctatacatttgacacaacaaattggaattgatcacagctccatc

SEQ ID NO: 25999 - DNA, 4319 bp, Zea Mays
gaatccttcggttttgtattctactccgcttcctttcgtcttccccttcgcccctttctctctctctctctctcgcgtgttctcgcgtcgccgtcgccgctggtgcgagatggtcgagacgaggcggagcgccgccgcgaagcgcccggcggcgggggaagaggataagggggcgccggcatcgcctgcatcggctcccgcggagaacgcgggggcgggtccgagggcgggtgacgatgtcgcgtcgtcgcagcccccgaagcgagccaaggttgggtgcacggaggcggacaccgagaagccgttggtggcgccggcagaagtcggcaccgttgcgggcccactgcccaacacggctggtctgcaggcgctgaccggcgccatggacaagctggaggccctcttgaggcccaaggagggtcagtccaatccggccgggcataagcggggcactaacgataaagatataacggcgaagataaagagagccatggatttatcggaggatttatcagcaaagataaagaaaaccaaggataatgtggctgggatattgaataagccacaggcggcagccaccagcaggcgtcaggagccctggtgcagactaatttcacaatataccatgcaccctaccctttctatttatggtgcgcttttcactatcggtcatggagcacatcatgatttcagactgggcgaatcatccactgcctcacctgtttgtagactgaagcaggctaagcgaggtgcactccttgaagtctttgaatccaaagttgtccgtgtcaatgggaaatctttggacaaggctgccaaggttaccttaaatggaggagatgaaattatcttccgttcaccagtgaggcatgcttatatatttgagcaacttcatcaggagaaatcaagcactccagcattatcctccacttgcagtagtatccagcaggggcagtgctcacatttcaaagatattcagggtcatttatcatctaaagggcacaaagtcccaaccatttactttggaagaggtcggtcttcattgttgcctagtggttcatcagcagatccactcctgcttaatttatgtaaaacgatggagggccagagccagcatagctccgaagataatatatcatctggtcggtttcagctaataaaggaggatttgataaatgcaacggttgacgcgagtgacatttttgagtcatttgatagttgcccatattatctaagtgatcataccaaatgtgccctcatgtcatcagcatatgtacatttacactgcaaagactacttgaagtttacaaaagatatatcttctcttagtcaacgagtgctgctatctggcccaacaggaactgacatctatcaagaatatctggtgaaggcacttgcaaagaattttggtgctagattgctcactgtagattcttccatgctgtttggtgggcaaacttccaaggagccggagacatacaaaaagggtgatagagtgaggtatattggttcggtacagtcgacaggcgttattcttgatggacagagccccccagattttggttcacagggtgaaatatttcttcctttcgaagaaaatagatcatcgaaggttggtgtaaggtttgataaaaaaattctgggaggaaacgatcttggaggcaattgcgaagttgaccatggtttgttttgtccagttgattctttatgcctcgacattccaggatgggaggttacatccaaacatccattagatgtgatatttgagtttatctctgaagaaattcggcatggcccttttatcctttttctgaaggacacggagaaaatttgtggcaataatgattactatcatggtctgaaaagcaagctaaaacatttcccagctggtgcttttataattggatctcaaatccagcctgccaatcgcaaagagaaggcaaagggtagttctccttttctttcgaagttcccatacagccaaactatacttgacctcgcattacaggcctgtctggtactgctctggctctagctctggctccggcgtctccttgctatagtgcgtggaggagccggggccgctgaagcaaaaaaatagtggctttgtgtgttcgctggctcctagttcattttgaaagatcctcactacagtatacgaagaagctggagccgcagccatctgaagctctagcaaacgttgacattgatgcgataaatggtaataataaagaaacttcaaaggcagcgaagcatttaatcaaacttttcccaaataaagtgatactcgaggcaccacaagatgaaatggagctttcacggtggaaccagatgttaaaccgagatattgaagtccttaaaggaaatgcaaacatttcaaaaatgcgttcttttctaacaagggttggtttggaatgcactgatcttgaggcgatattggtcaaggatcgcgttcttacaaatgagtgtattgataaaataattggttttgctttgagccatcaacttaagaactgtacaaatccagacccccctttgagtaatgtgcagtttgttctatccagcgaaagccttaagcatggtattgacatgttggaaagtatccagtctggctcgaagagcagcactaaaaggaaatcactgaagatgttatccctccacatgaaatcggtgttacctttgaggacattggagctttagaaagtgtcaaagatactctgaaggagttagtgatgcttcctttgcaaagacctgaactttttaaccgaggacaacttatgaagccgtgtaaaggaattttactttttggcccacctggtactggaaagacaatgcttgctaaggctgtggcaactgaggctggtgctaatttcataaacatatcgatgtcaagcatctcttcaaagtggcttggtgaaggagaaaaattcgtgaaagctgttttttcactggcaagtaaaattgctccaagtgtaatttttgtggacgaggttgatggcatgctgggaaggcgggagaaccctggagaacatgaagccatgcgtaagatgaaaaatgagtttatggtgaactgggatggtctgagaacaaaggagaaagaacgtgtattagtacttgctgcaactaacaggccatttgatcttgatgaggctgttattaggcggcttccaaggaggttgatggtgaatttgccagatgcatcaaataggagaaagattcttagtgtaatactagccaaggaagatttggcagacgatgttgatctagaagctatagctaacttgacagaagggtactcgggtagtgatctcaagaatctttgtgttactgctgctcatcgtcctattagggagattcttgaaaaggagaagaaggagagagcttcagcagaaacagaaaataggccattgcctctgtcgcacactagcaatgatgtccgtgcattaagaataagtgatttcatacatgcgcatgaacaggtgtgtgcaagtgtttcctcagattccagtaacatgaacgagcttgtgcaatggaatgatctctatggagaaggcgggtcaaggaaaaagacaacgctaagctacttcatgtagctgatgttgcaagtatatcgggagaagtgccctggcacaaagcagaaatggttggaggcagttgggggtgtgtatcgggtgcagttggaaaagagctaggttcacctgccatccatccattgagagaattgatggctcaggtggagcggaatggagtagtatacacattggttgctgcctccactctgggccatgtatcatgcatctggacatgacggatggtctggcttgcagttgtcctaacaacagttttgagtgcaacatatcactgtctgggaaagaaaagaaaagaaaatataccatttgtgttgttcccactccacaggaagcacggcgacgacatcgcccaacaacccttttccatcgtttcttaaaaaataattcattatttaggttgtaaacatttagagcctgtgcaagtgtacagtatgagcatcaggagtattaacctagtgttgatgtctatacctaatctaatttattgattagaatcatttaacatgaaatacatgattattttgtatcttcgtgccttcgttaggttgataatggtcgaattaaaactaaccttgtggttatgatctctgttcacatcgtgtacaataaatagagagggtcggtacacttagattcgatccatctcactaaagtgaaggctgttgtcgtctatcttattgttcttaagctgacccccatcgttctaatagttaatctcatggctagggt

SEQ ID NO: 26000 - DNA, 3526 bp, Zea Mays
ccgagaccccgacccaccccgcctcccccgccgccgcgctcgcgctcccccgcgacagccgccatacgccctatctccgccgtgcctgcgcctcctcccccgcccgcccgagacccgccaagtttcccttccttgcacggcgagatccaccatcggcgcccccttccctggcgagccacagccgtccatgttcctggccaccggcgacctcccttctctagcccttggcggcgagccaacacctcctcccatggctgccccccagaccccagtcccgtccgcgcatccgctcttccgtcagcgacgcacctattctcccctctctccccgacgtcgcccatggcgtggacggcgacctccctcaccctgcaactctgcacgtgtaagggccgtgttgcccgcctcctttccccacaccggcgcagccccctgtcgccgcggccccttccccaaacagcacggcaccacatgctccccctgccgcgcccgcactctccttccccaaataacacggccccacatcgctggttgcctcgcctcgccggggacccagcacgatggtcagggagctggtgggtgggggagacagggaggagcggaggaggaggtcaagctcaacatggacattgtgttcgtgacgctgccttccccaccgacaccaacgactcactccagaacccggatctggggcccttcctcctcaagccatggtattgggcgagggtggcgccgcctcgcgtgcttgagttcgccgagcgcgccgccagggtgctcgagcgaagaggtgagggcaccgagctcgagctcgccatgaatctccacatcgctgctggcatccactgcggactcagccaccaagccctgacattgtagccagtttcttgcaatcagaacgaatgccagttgatacaagtttgtggcagagatttctctgacacgccaatcagtcttcgatgcgaatgcttgttgctcatatggacttgtggttgtgataatgagttcatctccgtgcacatttgtcgtccttgtggttacagcagttaactgagtagtctctcttgactgcaaaacaagcaatctgttgcctctgctgtgatggtggagcaatttcagcgccaagaatgatatctcgcattttagattgtgtcagtgcagaagtattaacattgtttttctttgcataatcagaaaggatgaggtcccttagtgcacactcaaccttcaaccactgttcatcattcagagatggccatatatgatgtgtttcagtaataattgttttgtcaggtttgagcaacatctttgccttctcattattcacatgaagtgcacgtagaataagcacaatgtgggagaatgttgtgtatgatgatatacttttcaaccaatcatcatatatattataaagaaccatctgtggttcagttgccttcagtataagatcaccaaacttctcaatcttcaagcaagcctggaaaggaagctgcagctcactgcccttaataacaatgttagggaagtcaggtagatggacctccaagggatccaacatgcccttccttgtcacaacaatttgctttggctgctcttctacaggaagagatcgaaccaatgcagcaacctcctcagcggttttccacttggccagctgcccaagacgcttttgccccgcccatacacttgtgtggataacctgcacattattatccatactcagtttaaacctacctatgttcagggttttacagaaaaacaaaatcacatgaaaactagagcagaaattcgaaaagaacaaaccttaagaaaaagttgacccgttcttggattgaaaaatgaaaatagcaccattaattggtttggtggtcaagttaccctaaaatgttttgtgaatagtgactcgatacacatttgtatcatccacgaaccatatgatttgattgctgaatatctctccatagttctgtgaagacaggtatggttcatatattcaaatatccaaacctcatttggagttgtgataccagcaacctttgacatcgattcaagatgctactggagtgttattcatgtgagtgtaatttagtacatgatccaactggtaacaaactttatgatactagcatatcacataatagatgagattactagaaacagctcatgttattgaatatagaaatttcagttctattgtttttacacaaatttgtttgtgatgcttcaaaccgctaatgattttttttaaaaaagttgtgcaatgagcatatcacataatatatgagaatcttaggaataaaccaagttgctaatgagtaaaattttggctttgctttttaaaaaatatgggttcaagttgttcctgacagatgccactgcacaaatggacgttgacacgttgtagtgatcacactgtcacgagagctgagcaaactacagcctgcaagagctacacgtggcatgcttgaccacatcatggtggagaatgcaagtgttaaagttgcattgaatcgcattgccgttgtttctgtcctggatgcacataccctgtcagtgatgtcttatgaagcttggaggctcatacatctgtttctgttggctctctctagctatatgcagtggagctgctaatatgcatgaagtttgggctaggtgagcttcctctttcacttttcaaaccagtataggtattggccgatgtcaagaagacaaggccggcgacgagaggacgacagcgtgcaagaagagaaggcccatgttaggcgcaactataggtgcaactgtgcaaggataggcaacaagtgttcaacaatatgtctgtggatcaattgacctgcatttcagcttttagttgaggatcaaaatctcgtgtcgttcagggccctcggtagagagacattaatgtgtcggcaccgtggatcgtcgcagttgtgggtcactgtaacggcactggtcacaggcaccatctgcctctgttcgtcctcctctattggcctcctcagcacctacagggtccagatggaaaagtttctataatacatatgtaacaaatacatactccttgttcaagagatcgtaagcaagattgtaaacggtatccaacgcagaagcacctaatatggttacagagtattactgatgggcttacctgcagactgcatgctactactcaaggatgttgttgcaaatgagttgtggagaaccgtagatgcaaatggttggagagcatcttctgcaccacacatctattggcctcacataccagctgaatctgagagcaatgggtacttgtgtgtccggtgcaacggcggcttgaccttacaaatcagtgttgtatgactaatataaaactctctctctctaaagtagcatagttcaccatgcaagttttgtgtattcatggcaacatatctgaaagatttaagattacttctaccttgattttgtagatatgaaatgttgttgtcattgcacgaatcattaatgacttgattttgctctctatatgctatcttagaagtttcagagttca

SEQ ID NO: 26001 - DNA, 1700 bp, Zea Mays
cgttgcgcgggcgagcagcggaccattgattcgcacacgcatcctcagctcagagccgccggccaccggatgatgatgatgatgaataggccgcaaccgcagcaagccggcccgctgcagctcctccgttcgctaggactaggagtaggcggaggcggaggcgcccggcggggggccatgaagtcggccacgtcgctcctgctcggcgccgcgctcgccaccgccttcttcctgctctacacctccctctgccgcgacctcggcagcgccgctgccgccgcgcccaggtcgggatcgccgccgccgacgacgccgcggcgggagcaggagaccggcgacacggccgccgctcggcaggaggccgccacgggagagggcggggaagaacgtgtggctgcgagcagcgacggcgaccacagaggcggcgacgccacagcggaggagaatggtcagagcaaggaggaggagcagcggcggattgtgatgcctgccacgtcaactacccacgaggccacctcccaccatagaccgcagccgaagcagcagaagaagagcccaccaccagcgtcccaggatctggcggacctgctccggcgagcggcgacggcggacaagacggtgctgatgacggcgatcaacgaggcgtgggcagcgccagggtcgttcctggacctgttcctggagagcttccgccagggcgaggacacagcgggcctgccgcggcacctgctggtcgtggccatggacggcagggccctggagcgatgcaacgccgtgcaccccttctgctacctgttccgcgtcgacggcatggacttcgccgccgagcagaagtacatggagggcgactacctggagatgatgtggcgccggaaccggttccagcagagcgtgctggagctgggctacagcttcctcttcacggacgtggacatcctgtggttccggagcccgttcccgcgcctgccccgcgccgcgcaggtcgtcatgtcggccgacttcttcgtcggcgacgccgactcgcccaacaactaccccaacggcggcctcctctacgtccgctcctcgcccgccacggtgggcttctaccgccactggcaggcgtcgcgcgcgcggttcccgggccaccacgagcagtacgtcttcgacaggatcgtcaaggaagggtacgccggcgcccgggtgcagttcctggacacggccgtcttcgggggcttctgccagcacggcgacgacctgggcagggtggccaccatgcacgccaactgctgcgtggggctggacaacaagctcttcgacctcaagaacgtgctacaggactggaagacctacagagcgcgcgccgccgctggcaacgcgcagggtttctcgtggcgggtgcccggaaaatgcatacactgactcagctggctccatccttgtctaaactctggaggggttgagctcatttttcgattgttcgccagatagtacaacttaacagctacatctcttttttttccctaatgtatacatacatatattgtttatatatatatatttgtaaagctttttatggaatgtagaaaaattattattaatgacgcaaacaccaccgcgtttcatctcaatccgcgcatatctcaaacgcaacgtcgaggacaaggaccaagcatatgcagggctccgtccattccacaacaccatccgcggggttacaa

SEQ ID NO: 26002 - DNA, 2014 bp, Zea Mays
atttgcattgggctgtccgcagtatggcgtcgcctccgactcgtcttgtgttctccccgtcgctgcgtcgcagccgtcgtcgggcttctcctctttcttgcactttcagtcgagtccagacctgcggaatatagatctaccaatcgaccgacccggatccttcccttccgtctgacgtcgtctccctcgcagctgcagtcgtcgtagcagatcttatctcaaaccctaccgaccaacagctgcttgctcgggacgggaaccggagttggattgcgatggcgctgcagtacgtggaggcgcagcggcaggcgcgcccggacctcgccgactggtatgcttccctcgccgacctctaccagcagaagctatggcaccagctcaccctcaagctcgaccaattcctacagctccaggccgcacagaccggagacactatcattcagctctacaacaatttcatcactgattttgagaccaagattaatctgctcaagcttgcccattttgcggtgatagcttctcgccagtaccctgataaggatgctgcaattaccttcttagagggggtgatcacaaagctgcgtgatacaagagagtcacggattaatgaaccgattctctatgtgaagatgcaaattgcagctattaatcttgagaaaggaaaccaaaaagagtgcaagaattcgttggaggatgggaaaaccaccctggatagtatgactgatgtcgatcccacagttcatgctagcttttactggatatcatctcaataccacaagtcatgccaagaatttgcagagttctataagaacgctcttctctatctggcctacacaactgtggagtctctatctgagtcattcaagctagacttggcttttgatctttctctagcagccttgctgggtgataacatttataattttggagagttattagctcacccgattatcaatagtcttattggaaccaaggtggagtgggtttatcatatgttacaagcattcaacacgggcaaccttgctttctaccaagaactttgcagggttcacaatgctgctcttactgcacaaccagctttggtgcaggatgagaggaagctgcttgagaaaatcaatattctttgtctgatggagataatctttagtcggccatctgaagatagaactattccattaagtgttattgctgagcagactaagctttcaatcagtgatgtggagtatctccttatgaagagcctctcggttcatcttattgagggaataattgatgaagtggacagtacagttcatgtttcgtgggtccagcccagagtgcttggaatcccacaggttaaggctttgcgcgaccgcctggatgcctgggttggaaaggtgcatactacattgctttcagttgaggcagaaacacctgatcttgttgctgcctaatttagcacctgttacacttccgcgagaggcttggtcagcaaggtgatgagatgcattgtgacacttgtagtcattttctggataatgaacctgctgccctgagcgtttgtcagcctgcgtcctgatcggggcctgtaatttcttttttgatgtcctctggacatggatgggtacaacttcacgcagtgtcacggaaacgggaccaaatgattgaaatttttatactagtagggtgttactgtagttttcccagttgaatttaatttgtaactgagtttgtactctgctggacatggatgcaggagaatcttgctggaaatttagttgtgcttgatgtttgcatgttgcattgcgataagacgtggatcatcattaatgtattcttattctcagacattgcgttctgggctcggatggaattgtgcttagtttgggacgtttttatggctatgcttggttcagcgtctggggtgcttatagtcgccagaagatggaagccaaaccaaacacctggcttctggtggatgcgctttcgctcgcagcccctttagcactggccgtgagaatcggcctgaagcccg

SEQ ID NO: 26003 - DNA, 172 bp, Zea Mays
cagaaggctactcgtcgctgattccttttgggagatgggagacgtgttgattccaagcctacggtgtgggaacttatctgtgacgatatgcgtccgtgtttctcggttttgggacttttctgatcctcaggatgatgcaaggctgctacactgtgatatggtgttgctggac

SEQ ID NO: 26004 - DNA, 2395 bp, Zea Mays
ctctagctcaatagctctgccgcagagacttgctttgcttgacgttcactaggtgcaccaagaagccaaagccaatggcgactctacctctgctcctgcacctgctatgggaggcctctccgtgggcccgtgcaggcgcggcgacggccgccgtggtgctggtgtggctagcggcctggacgcttgagtgggcgtggtggacgccacggcggctagacagagccctacgggcccagggcctcaagggcaccaggtaccgcctcctcaccggcgacgtgagggagaacgctcggctcaaccgagaagcccgcacgaagccactgccgcttgggagtcacgacatcatcccacgcgtgctacccatgttccacaacgcggtgaaggagaatgggacaaattcattcacttggtttggcccgattccgagggtgataattccagacccggaattaatgagagaggttttgtctaacaagtttggccactttggcaaaccactgtttagccgtgttggcaagttactagccaatgggctcgctaatcatgaaggcgagaaatgggcaaaacacaggagaattctcaaccctgcattccaccatgagaaaataaagcggatgctgcctgtatttgctacctgttgtgccgatatgattaacagatgggaaaattcaatgtcttccaaggaaccttctgagatggacgtctggcctgagttccaaaatcttactggagatgttatctcaagaactgcttttggtagcaactatcaggagggcaggaacatcttccagctacaaggagagcaggctgaacgccttatacaatcttttcaaacaatatttatcccaggctactggtttgttcttttccttataaatagtagcaatttgttcatgagactcgttgcgtaggaatatttacgtatccatgttttaataatgacttgatatcatttttagtaaaggcgaaagggtctctaacgtaatggttaaggctttcgaataacacctccagcacctaggttcgatctctcaaaggggcgaatttctggcttggttaaaaaaatcatctcgttgtgccccacccgctcccgggttacgtcctgcgcgccaccctccggtgacggcccgctagtgatgggggccagggttcgaagattttctcggctgggaccatgtttcggtctcttcttaatataatacagggagaatggtctttccctccccggccgagttttttttatcatttctagtaaaggatgagatacaaaaagacttctccacatccaataaaattttgaacaccatctacattttacttctacttcagttgtcgaagctgagtcgggggataaagactagggaagttctgcggcaggaatcaagaatctgttttgttataacactgttgaacatatgcaggctcttgcccaccaaaaataacagaaggatgaaagaaattgatcgggagatccgtaaaattctgcatggaataatcaggaaaagagagagggcttttatagatagtgaaggaactaatgatgacttgttaggcttattggttgagtcaaacatgagggaatcaaatgggaatgcaaaactcggaatgactaccgaagatataatcgaggaatgcaagttattttactttgcaggtatggagacaacatcagtcctgcttacatggacgttaattctgctaagcatgcaccctgaatggcaagagcaggcaagagaagaagttttaaaccactttggaatgggtacaccagactttgataacttgaaccgcctgaagattgtaaccatgattttatatgaggtccttaggttgtacccaccagtagttttcctatccagaagaacctacaaggaaatggagctcggtggcatcaaatatccttcaggcgtgagccttctactgcccatcatcttcattcaccatgatcccaacatctggggaaaagacgcaagcgagttcaatccacagaggttcgaggatggcatttccaatgcgaccaagcatcaggccgccttctttccatttggatggggtcccaggatctgcataggccagaacttcgcgttgctggaagcaaagatggcactgagtaccatcctccaacgcttctcctttgagctctcatcatcctacactcatgcgccatacaccgtgataactttgcatcctcagcatggtgctcaaatcaggtttaaatttagctttgatatgaataatgagaaccaagtgtgtatgaatggagtaggggtgtaatcggatcggatacgaacggatattgcttgtaccatatttgtttcatattttctgtttggattcagataacatcaagttgtgtcggataagatttgaatagatattgatatcttaaatatcc

SEQ ID NO: 26005 - DNA, 934 bp, Zea Mays
acactgcatcccatcccacgaaaacaagcagagagagaaccccagcgggcaaacgcctccccccccccccccccccccccccttgcctccaggccccagatccggccatccgggtagctccagcccttctccaatggcagtcaaggtctacgtcgtgttttactccacctacgggcacgttgccaagcttgctgaggagatgaagaaaggcgccgcttcagttgaaggcgtggaggtcaaagtatggcaggtcccggagattctgtccgaggaggtgctcggcaagatgggcgcgccacccaagaccgacgcgccggtcatcaccccgcaggagctggcggaggccgacggcgtcctcttcgggttccccacgcggttcggcatgatggcggcgcagatgaaggccttcttcgacgcgaccggcgggctgtggcgcgagcagagcctggccggcaagcccgccggcctcttcttcagcaccggctcccagggtggcggccaggagaccacgccgctgacggcggtgacgcagctgacgcaccacgggatggtgttcgtgcctgtggggtacacgttcggcgccaagatattcgacatggagagcgtgcacggcggcagcccgtacggcgcgggcacgttcgccggggacgggtcgcggtggccgacggaactggagctggagcacgccttccaccagggcaagtacttcgccggcatcgccaagaggctcaagggcggctccgcctgatatcgctcgcaccctcctatacgtatacatacagatatgtcctcgttattacatgtacacgaggtatgatatgcattccatgttttcgtggtggtttcgattgtattgttgtgtgaaatttggtaatcggacccatattaattaataattatggcgtcattcatgtgaccggtgctcctatgttcc

SEQ ID NO: 26006 - DNA, 965 bp, Zea Mays
caagaatacacggtacacaccactggttgtctgcttgcttctccccgtctctgttctccgccagaccaaacctgaccaaccccacccactggaccggcccgcgcccgcttggtccagcgccggccctgcctgcagccagccaccgttgtccgttccctcccgcgatccactcctctcgagctctaggggacggaaggaatccggcgggggtggggtgcgagcagggggagggagaagagcagccgcccgccccgcgagggggcaacagctgcccaagaacctgaccggaagagttgtgggagcggcggcggaaagatggggcaggccctgcgcaggctcttcgactccttcttctccaccagggagatgagggttgtgatgcttggtctggatgcagctggtaaaacaacaatactgtacaggcttcacatgggagaggttctttcaacagtccctacagtcggttttaatgtcgagaaggttcagtataagaatgtggcattcactgtgtgggatgtgggtgggcaagaaaaactcaggtcactgtggaagatgtacctgagtaattctgatgcactgctttgggtttgttgcagatctatgtcgttgattctctggacagagaaaggatcagagacgcgaggcaagagttccagaccattatcaaggaccctttgatggcaaacagcataatcttggtatttgcaaacaaacaggacctgagaggcacgatgagcacggacgaggtcagcgaagggctggggctgcacgacctcaggaacaggatctggcacatacaggggacctgcgcgctccgcggcgagggcctctacgacgggctcgactggcttgcgtccaccctgaagcagctgcaagaatcgggccacgcgacttcggtcgctggcccttccatctgatccagcgcaagtgagctcagtgcctcagccaactgacagcaagcccac

SEQ ID NO: 26007 - DNA, 272 bp, Zea Mays
tccgaggctttctcctgctggtgcggacgtacagtttctcagcgcccacgtcgcctcctctctcaccaatatccgccgcgcttgccgcatgttgagtctccccgagcagatcgccattgtccctgcaccaagcacaccggagaaatgacgtcggccacgaacctccgtcccaaggcttgcggctcttgggaaactgtcgtgttcactccccgccgcgccggagctccgttaagccgttgccgcgacattctccgtcgagatccgtttcgagg

SEQ ID NO: 26008 - DNA, 2634 bp, Zea Mays
cgggcggctgccgggtcgccgtcgaggcgtcctccctcccgagtcccacgagcacggagcaccggcctccggttcagattcggtgacacgcacggcacggacgaacccaacggggcactgctcacgggaaagagagaggattcctccgccgcgtccgcgttggactggacagctcacgccgctgcgaaagcaaccagccagagccagatccgtcggttccaacgaaacatccattcacgcccgccaccggcatccccatctccgatccgccgcagccgcagtcgcaggcacgtcctcctctccggccacccggagcgcggcagccagcgagcgagccactgtggtcgccgtgcaggcaatcaaaagatgtcgtcaaggcactaaagaaacggattggccacaagaatccaaaagttcaacttcttgcactaactctgttggaaactgttataaaaaattgtggggatatacttcacatgcatgttgcagagagagatatattgcatgatatggtgaagatagtgaagaaaaagtctgatcctcgtgttaaagagaaggtattggtgctgatagatacatggcaagacgtgtttgggggatcacatgcaagatatccacaatactatgcagcataccatgagttggtgcgtgctggagctgaattcccgaagagacccgagaaacctgcacctttgtttaatggccagtctcaggcagcaaggaatatgcgtagtcctgaccaacaggaagcggaatcttctgctgccaatgattttcctgctttgagcatgtcggagattcataacgcttgtggtattatggatgtacttgctgagatgctgaatgctttagacccaggaaacagagaggggctaaggcaggaggtaattgtggaacttgtggatcaatgccgcacttacaagcagagagtagtgcagctagttaattctaccacggacgaggaacttatgtcgcaggggctcacactgaatgatgatttgcagcgtgttctagcaaaacatgatgcaatagcagcaggcattgcagtccgagtggagaaaaaatcgaagtctttgcaagcacttgtagagaccaaggattcgacaaaccaggattccaaaaaggagcaaggactcatagatattgaggatcccacaagtcaagatgctgcaaaagatccaaatcaaagtacaagtgaccaatctccttttgagcaattagctcttccagcaccaccagtgtcaaatggcgcagcaacttcagcaccacaatctgatcttggcattgatcttctgagctgggatgatacccctgctacaacacaaaatccacttgctcttgttcctgtcacagatcctcttgctgactctacttcatcaaatcaaaatgcgctagcaattgttgacacattttcagaaaacagcaccacgaaccacaacgctcaaccagctgacccctttggtctcaatccgagttctgctattccaggatctcagctatacaacacgccaactcagcagcctttccagtcacaacagcctccgcagcaggcggcgctctatgcgaatgggggtgctgtggaccctggaacgtcttacgatcaggcatcccagtttaaaaatgttagttctgggtggaatggtcaagctgccaaccctgttgtgcccctgccagagcaagcactgaattacgtgatcaaagtggaaaccttccaccgcctccttgggaggctcagccagcgtcaaacaatgaattgccaaatggccaattgggaagcttgcaacctctcccaggttcagctggccagatcggtggcatgcagcagccactgcaaccacaagttaaccacatgggagttccacaaagccagccaatgtatagtaaccaaccaatgcaacccggtcaggttgccgccacaacacagatgcagcctggcttcggaaaccagcagttcggttcgctaccaccaacatccatgctgggcatgcaattcggtggcatgcagcctccgcagatgtatggcggatcgcagccagtcatgatgtacccgcaacaaatggcagtggcccagtatggagcaatgccgcggcagcagccgacgtatggtggtcgattggcgggttacatgcagcatcctgctgtggctgccgcacactactacaacaaccaggggatgtatggctaccccggtgcgaacgggctgtcacagagcatgtatggcctctcggtgcaggacaactcgtccatggggatgaggtcgtcttaccagactacgacggcgccaccctccacggggcaacctatgaagccgacgaagcccgaagacaagcttttcggtgacctcctgagcattgccaagacgaagaaagcttcatgagacgagctggagcgggagcggccttctgatatatcgtctccccttttttttgtggtttttcgtgctgtttgatcttacacttgtaacattatctgaatgtgtaaacttttttggggtccttttcttttattcccacgtcgtgtgtgatcctattgatcccattggattcgttataccgtgtgcgtgtactgatcacgagcgatgggaaactttggccgtaaatgatgattcaataaagggtgtgcagtacgtgatta

SEQ ID NO: 26009 - DNA, 2212 bp, Zea Mays
tgtgtctgattctccttgtccaggcaccaactgttacctggacaaggagaatcagacacacatcattttgacttggcacattgcaacgtgttactgcgaggtgcaaacattgaaatgcctttatcctagagttgggggggcactcaagttacatcttgacatcgcaaccatactgtcaaagtactgtgcatacctggtggtctcagcaccgaagttgcttcctgggaactactatgattctagccttgtgtttgatgcagtagcagtggaagctgcacagtttctgcagaaagtggaagacaagtatgaagccttgagaagtttgcctgtatcaacagaaacctccatcttacagagggggatgaagttggcgaggcagctcgaggagatggaatgtgacaagtgttggaaggtgcttgcggatttctgggcagagatgttgctctatatcgcgccttcggaaaatgtgaatgagcatttcgaggcactggcaaatggaggggagtttataacacactggtgggcattgctcacccacgctggcattctagagagggctccaaggaatgtcaacaatgacatagaaaatcaatgggaaggatcatcatcatatggttgcccatctacaactcaggctgcagctgcagcctgtgccacaaatcaacagccaatggctggggaccgtactgtgcaactgattgaaatgaatgtcggagacatagaagatgctaagactgacaggcattatcctggagagatttcatatggtgctgctttaaggcttcgtcgtgcgaactcctacattagcaagtgtagagaagctgctaccttagccaccagcgccacgattaaaccagcaatacgtggaaactgtgagcaagtgaggatgatgattcggcaacaagcatatctaggtcaaaatgtggaactcgcaagtcccagcgcaagcactgctccaagtgagaacaaagagattgaaattgtaatagcatgttcctgccaagttgggctacaggaagaatacattgtttgctccaactatcgcacttggcaaaatctcattattactggcaacagctgcacctgggttggatactggagaaggttgcctgaagagactactgaagctaagctactgatgcgttatttggttcagttaatcagttgtatcctctgcccttgtaggctgttgtacctcacctgtgtcagcaacatttttgtgaatctaaaacagttagcacatcaacaatgctgacagactagaaccgggctttgccggtctggatgtactgcttacgtgcattgatgctagtgtggacagcaaatctctgcactgcatcatcagactgtgttcttgaatgaaaactctggagagctgggacgcaaagacatctgtccgagccaactgcagaagatggaagacggttcagactggaaaatagcagcatgtcatcttagagattttgtgatattggcagcatgcatccagtctgtgtaaatgtcatgtgattcaaagagaactaactggaaaaagaagttctgtatgacggcagcaccttaggcagctgggctctcgtggagttccctatggtgtgcatggcatcaaccgcagagctaagagcgtttcttatcccttgaatatctgcctgaaaacatgaggtctcagtatttcaagatgagaagcaacagattgacgaaacttagttcctggtttatggaacaccaaccactgctccatcggagacaggaaggcgcaggacggtggcagtcagagcctgtgtagttcctgacaaagaatgggcatggcccctctccaagaagggccattcttccaggtatttcatctgcgttttttagccccaggaagtcaggaggaggggtcagtcaatgacccgacccctactggttaatgtaaatacatacgtaggaataaaaagaagatagcttgtactttcatctgcatattgtaattttatcagattttgtgcggacaatgtgtactcagaacgaatctagtgtcataaattagcgattagttactccagcgcggcaaactgggtgtacgagctttaacctttaagatagcaattatagttgcatcttcatgaaccatgtcatggccattttaatttgcaagctagtatgaagtccgttttatcagtgagatgggttgtcagtgttgtggaacagatggagaattgagctgtataaa

SEQ ID NO: 26010 - DNA, 1920 bp, Zea Mays
caagtgactgccccgacccatcatgcgccaggcgaatcaaaccactacctgatttgtttaccccccgaaatttgccgtctcctcgtctcgctcctctccctgcgcagcccccagatccggcaccgcccgctcctcgatccccgcaccccacgcccgcaggccgggaccggcggggtcgcgcgccgggtaggaggaggagaagaggaagggtggtatggcggcgccgccggcgagggccagggccgactacgactaccttatcaagctgctcctcattggagacagcggtgttggcaagagttgcctcctgttgcggttctctgatggttccttcactacaagctttattaccacaattggtattgactttaagatacgaacgatagaattggatggcaagcgtataaagctacagatttgggatacggcgggccaagaacgcttccggactattaccaccgcgtactaccgaggagctatgggcatcttgctggtttatgatgtcaccgatgaatcttcttttaacaacatccgaaactggattcggaacattgaacaacacgcctctgataatgtcaacaagattttggttggcaacaaggccgatatggacgaaagcaagagggctgtacctactgcaaaaggacaagcacttgctgatgagtacgggatcaagttttttgaaacgagtgcgaagacaaacctgaatgtggagcaagtgttttttctccatcgcacgtgacatcaagcagaggcttgcggagactgattcaaagccagaggcaatcaaaattaacaagccagaccagggttccgaggcaccagctgcccagcgatctgcttgctgcggctcataagcagatgcacgatggccatagcctttggttatttgacattatttatttcccgcttggctgttataggaaggatttgaagaagccacttatgatataccgatgtggttgtactcgtggttgcttccattctttgaagcaaccacctcttgctgttgacgtagctattgctattgctgggagctattgcactcttgcattggatccgttggaaaaactctcccctccctacagtgtgtaatgaatgaaatccatgtcgttgggtttgcatggaataacgtgtcgctcttgtgtgtgtgttttaagtgtcgccgttccttgataatcgaatttgttgggaccaagaatatatctacctggaatgtctgtatccacagaaagtctggatcttcgatttaggttaaaaggaaacgtatctggaaatagaccgctgcatgttgtaatgtttgaaaaaagagtaaataaaacttgtacagttgtatatactataattgtaggcagcttgtcaaagaggagggcagtccagtatcagcgatttccgttcgcagtgcgctgtgttgccgagcacggcgtcattccggcacttggcgcagttccccgacggcgccaggctcaagtccaaacagattccgctggcacagccagcgccgccaacgttggcttcctcaaccgacgtggcgtccccagagcggagctcacattcggactcggctgccagcgaagtcctgcggtgccgacgcatgtggccgcccagcgcctggccgaccgcgaactcgagcccgcagatggggcagccgtgcagcctcggccccgccgcgctctcgcgcggctcatccagcctcgttcggcgtagtagccccgggtcgccgacgccgtaggggtaagggtagggcttggggcgcctgtggctggcgcggtggccgcccagcgcctggaacgtcgggaacctcctcctgcacgtcttgcactcgaacacgcgcccgcgcgcgccgagccccgccgccgccgtcctcgcgccgccctgttgccgctgcgagaggagcatggggacggcgccggtctccat

SEQ ID NO: 26011 - DNA, 3915 bp, Zea Mays
cctcgcctcctcatctcgttccgcctcctatcggcccagctccaaaccctagcccgccgccgtgctgactcccctagccaggcacgacgtcgaagagagcagcggcggaggcggcaacctgatgcccagccccccgtgggggccatggagctcgtcctcgtcaagcccgcggcaggagctctcgtcgaggtgggctccgggtccgttgccggcgcgggctcgatcccggcgatggtggcggcgcagcaggagattttgcacgaacaggtggaccagctccaacgcctcgtcgtcgctcagtgccgcctcaccggcgtcaaccccctcgcccaggagatggctgccggtgcattgtctatcaagataggtaagaggccaagggatctgttgaatccaaaagcagttaagtgcatgcagtcactttttgccttgaaggacattcttggcaaaaaagaaacccgagaaattagtttactctgtggggtcactgttacacaggttagggaattctttacagttcaacgatcgcgagtgagaaaatttgttcgtctgtctcaagaaaaagcgctgagaatagagacacccaaagagcaggacaattcatactccataaacactgagcagataccgccggacatagaagcacaagctgaagttattgaacctttgagaactttagaaccggtggtcctacagagctctttgcaaccaacgtgtgtccctcagatctcttcgcaatcaatggagctccaacaaagcgatttgcagcacatggaagtcttccaaaactctttgcaacaagcagaggcacaacataacattgcagctcctataatgccatctggagcaatggttatgcaaccaactgacgctaagattagttcagactctgttcaaaaggaagttaagcaagagggagttcattctggtgttgcgtcagaagataagaagttcttggaaagtatctttgctctaatgcagaaggaggaaacattctctgggcaggttaaattaatggaatggattctgcaaataaataatgttacagttcttagtaggttcgtaacaatgggtggtttgaccattatgtcaacatggttgagtcaagcagcaattgaagagcagacatcagttatccatgttattttcaaggtgctgctccaccttccgttgcataaggctttaccagtccacatgtcagttgttctgcaaacaattaataagttgcgcttttatagaacacaagacatatcgagcagggctaggaacctcctctccagattgagcaaagtgcttgtaaggattcaggcattgaagaaacctcagaaggacttaatatgtaaacaaaggataagtgaaattctccgtgacgagtcttggaaatctgaagttgatattaccgaggaggtacttgctttgactgatggtgctaatgagagcagaaagcctgaacccagaaaaacaccaatgcttctcactgcttctgctattgagacaaataaaaggagttctgtgcagacaaaatccaaacaaaaaagaaaagttctacttgtggagcaaccaaacaagaaagctacgtggaagaatgctaattctgtcaggaacacatctacaaacaatagccggccattatctgcagatgatattcaaaaagcaaagatgcgtgccatgttcatgcaggagaagcgtggcaagattgacataaataaattgagtgataaaccacaagcaatggacacgaaaaaagcagctggattagtaaattcaaatccatcagctatgcccataagtccccatacgtcagctgcacaacctgttgacccaagcccatctacttcaaaacaaagcacagatcctcagcctgataatacagaaatttcaggtggtttgaagttaaacataggttccaaaaacaatgtcatagagaagttggattgcaagagagttctttggcaaataccaccagctgtatggatagacccctcgtggagtgtaggagctggtgacaacagcaaggagcttgaggttcaaacacagaggaaccggcgtgaaaaggaaaccttttatacaagccagaaggacgtcccaatgaatccaaaggacccatgggatctggaaatggacttcgatgacagcctgaccccagaggttccaattgaccaggtgccagatgtggacgccatggaaacggaaagcgttggcgcggcgcctagcgctgtggctcctgttaaggacaagcagattgaatctgcctcatcgacatcaggcgcagttgctgatgatgaggaagctaataccgattacgaattgcttacggtgctactcaggaacccggagcttgtctttgcattaacctctaacaagggggagaacatgcctaacgagcagaccattgcgcttctggatacactgaagcagaccggccttagcctatcagagcttgttaaccgtctggggaacggcgctgggctcccaaaagagccagagccggagccagaacctattcccgcttcgcttccgtcaccaactccgccagaccgtacatcaagggctgtctggataccagaacacgcaatgcaggtgagggctgctccaaccttgcatctgccaagccgggggagtacacctcctgttgcaaatgccgtgcaacaaggcttctcaaacgtttccaacatgtttcccctgtgaataaccttctgaacagagcttcagtgcatcagcatggacagcagcaatacgctttgttgtctgaccctgttgccacgcccttgcatcaacaagcagcggggagcaaaccagctgtagcagcacatccgtcgttgcctgagcctaatgcatcatctcacacagcattcccttggcaatctaatgctgctgacatgacccacgctggacggaatgcgacggctgatccatgggccgccgcccgcgcagctaactcgtatagtacagcatcagcaagcacagtgccgtctgctaaccagaatgcttacggcgatcaaggcaagcagggtgcgtacagctcttatggatcttcggcagcctcgtcccgtcctgttgtaccagggcacgggcatgacagaaatggctacagccggtctgccctggtggagtacccatgggacgggcaccaccagcggcactcgaggtcaccagatcctggcgtggtccgggactacgacaccgactatggcggtgcgcagggctacagtcagcagcccctgacgcagtggagtgcagggaaagtgcagcagcagggctacaatcctgagccgtcaaggcagtggagttcttcccaggcgcaccagggcggctacgcacccgccgagccgtcgaggcagtggagttcttcccaggcgcaccagagctacgctcccgagctaccgaggcagtggagctccgaacgccgtggctacgatgatgcggagccctcgaggacatggagctccggccagcagaacccggaggcgccgaggcagtggagccgcgggaagcaggatccttactacagcccgagccatagccgaagatcgtacgatcagcaccggaggagatagcaaaagcttgctgtattactgctaccacattagctagatcctggatggaggcggtcggttcttgggagggtttgtttcatttgatttgatgtgaggccgggtattcgttgcatttgggctttgtgattgccaccacaagggccattgagaaaagctataggttattatgtatcgatgtagtttttgtctcgaaattaaaaaaaaaatgtatctatctaggtagctggagaggggaaagaagaagaaaaaatgaatgaatgaatgatataactcagggagggtcaagaggccccccggctcgaattgattgcagtcttgaatgctgagtcgaacggttggccaaatttgtcgtctgtgc

SEQ ID NO: 26012 - DNA, 1424 bp, Zea Mays
acacacagcttcgcttgattcagtaaatgaatagttcaaaccagcccactaataacttagatagtggcccttccactttattatagttgaccctacctattgacttcaaggtaagaccctttttttctcgaaagttcaggagaactgcgcatcattatattaagaagaaagatatatggtgcccctagagggccattacagcagagcagtcaaggttcataggaaggggaaaccaagacgtagtgggatgtaggcttcagttgtttcggtaatgacactttttgctgccgcactcctggagaaacagattgttattgtctgttctaatctgggaatgttatcggcttcagttttgtccatcttacctctaatacgaccgtatcagtggcagagtctcctcatgacggttttgcctaatgacatgatggattttctggatgccccagttccatacatagtgggcgtacaaaacaagacatctgatgtgctcaaccggctaacaaatgccgtagtcattgatgccaacaggaatcagattaagtcctcttcagtcccacaactaccacagcacagagagttgctttctgccttgcgcccgtatcattcaatacttgttggcgaaagttatcttgcaagaaaacgccctgtttatgaatgcacagatgcccaggtggaaggggctaaaggtttcttggcagtgcttagagactaccttgacacactatgctcgaacttgagatctcatacaattaccaatgtgcaatctaacaatgacaaggtttccttacttttaaaagagagctttattggttctttcccaagccgggataggccttttatgaagctttttgtggacacccagttgttctcagtacatacagacctagttctctctttttatcagaaggactaagtgtctggcagacttgaatgtctgcctcgtcttgccaagctcagtgtttgtgcaaagagctcgaaggagaagccatataccgtcagaaaaaagtggtagattgccaggatccagttatgggtattgaagaagaatgcttgtagctgcttaagttagtctggtgcggtaatccaaggttttgttggctgtagttggtgcccccataagaagccttgtatggattgttcctgcaaatgcctgtgctgtaacggaaccgtgtctgtggcaaaatctccgaacatgaatgcgtccatttggcaaatctaagcgtgcaatgggacatcgaagaaaatgtaataattcgtggtactccctccaggccgaatcagttgacgctatggtatttaataacggtcgagctttcttattttaaactggatttgtagaaatattaacaatatttgtattattagaaaagtttattactaaaacagattcagagatttatataacaatactagttatgtgcttt

SEQ ID NO: 26013 - DNA, 640 bp, Zea Mays
cgaggagatgaccgccgtgcaggtaatggttgctacagttcgatgtgatgaaattgcaaacgagaagtttggatgcataacctcagacacagaatggttggatgtggagagtgctgtccaatctggtccagtacctggttttggaaaaaaacttggcaatatcgtcgacgttcacttgcaagagtatgacaaagaagctgtctattttgatgaagctgtaaggaaaggaaaacgacagcatttggagtccagaatactgaatcttgtccaacctgcattccagaaaatgttgactcatctgcgtgtgaaggctctagaaaaatttaaaactggtcttaattcatctttggagagtggaaaaggattcgcagtatctgctcgagacaatactgaatgctctctcaaagaatttgaacaaggctgtgcagatgctataatcaagcaagcgaactgggactgctctaaaatgctagagaaagttcggcgtgatattgaagatcatgcactttcaattcgtgaaagcaagctatccgaaatgacaagacacgctaaggttatgtatggcaagctgaaagagattttaatcactagcttagcaatgcataattttcttctagatttatttgcatatctgatatta

SEQ ID NO: 26014 - DNA, 2693 bp, Zea Mays
tgaattgcgagaagtggaccctcgaatcctgtcccaggcgagcagcttcccgtctccccgtctcatcccatgtcatgactcagcaccacctcccccatcctcctctgtcctcgtataaagcgccgcagtccacgacggcgacgccgcccatgggagctggagcaccagcacacgccgctgccccggctctgcgccgcgaaccctagccgaccgcctcatggccgccgagtcctgcggcagccgcggcgcctcgcccccgccgcctccctccgctggcggcgcggccgggaggcgccgcaaggcggaggcctacgccgaggtgctccgccgcatccgcgctggcgccggcggctacggtgctgcccgccccgggttggaggacgagctctgggcccacttccaaggcctacccgccagatatgctttggatgtcaatgtagaacgggttgaagatgtcttactgcacaagaaattgctggagcaagcccataaacccatgaatggtctggtctttgatgttcgtcctgcacagttttagggttttactctggaggaaagcactggatttgagtccacaacttcctttaagcaagaagaacaagatccccagtcctcagtattcacatcaagagatcaaaggcctttgcatgaagttatatttgcatgtgacgataagccaaagcttcttagtcagttaacctctctcctcggggagcttggtcttaatatccaagaagcacatgcatattcgacgagtgatggctattccttggacatctttgttgttgatggctgggagtatgaggctgacattctccaaagtgcattgagggaaggcgttgataaaataaagtacagagcatggccgttggtaccgtcgatgtctgctaggatggatcaccaaccattggaggtttctccttcatctgactttgtccagataccagctgatgcagttgatgtttgggaagtcgatctcaggcttctcaaatttgaacaaaaattagcgtctggatcatttggtgatctataccatgggacgtactgtagtcaagatgtagctatcaaagtactcaagcctgagcgggttagcgttgatatgctacgtgagtttgcacaggaagtttatataatgaaaaaggttcgtcacaaaaatgttgtgcaatttattggtgcatgcacgagacctcctgttttgtgtattattacagaattcatgcatggaggcagtatttttgacttcctttacaatagacgaggaaattttcaactcccggatgtgattagaattgcatctgatgtgtccaagggaatgaattacttgcatcagattaatattgttcatagggatttgaagactgcaaatcttcttatggatgatcaggtacttaactgcacagtgtagtattaaccttggttacaatatctatctcaggaaatagaactctactaccatactcacttctcaggatagtggaatcttagctttggatacaaaggttactttggtcctgaactcctgacatcctgatatcttgaagataattctgcactagcttagaccgctgtgaaattgaatagaaatatggtcaacctctatggccgtaattgcatatggtaacacaaatcaacagcttcactagaatcatgcctataataaattgttctgaagccacctgctccaccctccagacgtccttttttttgtgcacatctgtctgtctacttatattgcaattgcttcaaaatacgatcaatacataggtgtgcatgcatcatcagtcactcagtcttttgtcaaaccaatcaatggacccgttgtattgtatctgtgaactatgatgacatttgtttttgggaatgaatcatgatctggttatgtttgcttgcccttgggtactatatacgtttcaaataaataagcacatgtttactcagattactgtgccatttgaatgatataatatcgtaggttgtcaaggttgcagactttggggttgcaagggttaaagaccagtcaggagttatgactgcagaaacaggaacctacagatggatggcccctgaggtcattgagcatttgccgtatgatcatagagcagatgttttcagttttgggatagttctttgggagctgctgaccggaaagcttccatatgaagacatgacacctcttcaggcagcagttgctgttgttcaaaaggatctgaggcctactattgctgttgatactcatcctatgctcgctgagctactccagagatgctggcagaaagatcctgctctaagaccaacatttgcagagattgtggatatattgaactctataaaggaggcggttcggagttctgtgcatcacaaaaggcattcatgtcgatctcactccgggagaagacgaggctgttgatgtgccagttttatgtggtgccgcacgcccttttcattttatttttgtagtcgagcgataacttcagaatacggccagaagagcttactgtgttcattccgagaggttttggtaactttattttttttaatttggacttatgcttcaaggattttcatcgttaaaaagcttagaggtgcatatccacgtttacatttggcatgtatctgtatctcgtactcgttttcttaagtttggcaggcaaccaagattttaatgaaaatctttaaccattactcactccgtc

SEQ ID NO: 26015 - DNA, 1744 bp, Zea Mays
ctccctcctcgcgctcgaggaccccaggtcccccacggcttccgcctcctaccggattctcgtcgccgcaatcgcctgcttcgcgctcactgcgctcttcttcgcgcctttcgtctggacacgcctcaacgcgccgtacctgtgccgcaaggaggggattcggctccactgccccagggtgaggcagcgggactctctgtgggagaatcctcatgctgcagcaacttggtggaagccgtgtgctgagcgtcagagtcatgaagtctcagacctcgtgtcagagaatgaaacttctgggtttatatttattcatgccgagggtggattaaaccagcaacgtatagctgtatatatgtaatgctgttgcaattgctaagataatgaatgccacacttattctgccagtgctaaagcaggaccaaatatggaaagatcaaacgaaattcgaagacatctttgatgtagaccattttataaattatttgaaggaggatgtgcgcattgttcgagatattcctgactggtttacagaaaaggatgagcttttcactagtataaagcgcactgtgaaaaatgtcccaaagtatgcatcagcacaattttatattgataatgtctttccaaggatcaaagagaaaaagataatgtcaatcaagccgtttgttgataggttaggatatgataatgttccaatggagattaaccgactgaggtgccgagttaattatcatgctttgaagtttctacctgacattgaagagatggctgacaagctagcaacaaggatgaggaatcgaacaggaagtttaaatccatacatggctcttcatttgcgatttgagaaaggaatggtgggcctttcattttgtgattttgctggaactagggaggagaaagctatgatggctacttacagacagcagcaatggccaaggcggtacaagaatggatctcacttatggtcactagcactagaaaagagaaaagaaggccgctgtccgcttgagccgggggaaataggaattattttgcgtgagatggggtatactaaggaaactcagatatatgttgcatcagggcaggtgtatggtggaaacaacagaatggcacccttgagaaatatgttccccaatctggttagcaaagaagatcttgctagcaaggaggagatggagcctttcaagaagcatgtaactagtcttgctgcactggacttcttggtgtgcctgaagtcggatgtgttcgtcatgacccacggtggcaatttcgccaagctgatcatcggctaccgccgctacatgggccgccacaggctcaagtcaatcaagccagacaagggtctcatgtccaagttcttcggggacccttacatgccttgggcgactttcgtggagaacgtgatgatcacccatgagacacgaaccgggctccccgaatccaccttcccacactatgacctatgggagaaccctctcaccccttgcatgtgtagagcttaaattatagactacgagtgatggtgcatagttattctttgttcatttgctgatatgcaaactgcaaattttgtgtagttttttaccactttttgatgtacgatttttttttaccaaagcaaagttcagttcatgcacaatcctcggcacggatacattgccatccactcattcggagcagcagaagcgccgcctgatcctgtcgtcgttaaggctatctccaaccctttgccctctcaaatccccac

SEQ ID NO: 26016 - DNA, 1268 bp, Zea Mays
atctgttccgttgcgtgctcctctctcactccacggtccacgactgccaccagcgcttcccgctttcccagccacccgtcgcctccgcgtgtcgccccatccagccatcagttccaccccagctgcgaatccggcgcgctactaaccgccgggggaccgaaatttccccagccgcaagtttcgggaccggaacaacaatggcagcagcagccgtcgcctccagttccaccccgcggccgctccggttggcgcagcgcggggcggtctctgcgcacgcgtcccaccacgtcagcgccccgccccaccgctcccgcaggccgcggctctccgtctcggcctcagccggggtggaggggaccagcgggtcggagcggttctacttcaacttcaccgggttccccttcccgctcggcccgttcctcaaccgccgcaccatccgcaccgaggcggtgaagggcagcatatggctgttcgagcaggagcaggcgctgggcttcagcagcgtctccaccaacatccgcatgacggtcatcaagctcaagtccggtgggctctgggtgcacgcgcccatcgcgcccacgaaggagtgcatccagatgctcaaggagctggacgcgccggtggagcacatcgtgctgccgaccttcgcatacgagcacaaaatcttcgtcgggcccttctccaggaagttccccaaggctcagatatgggtggcgcccaggcagtggagctggccaatcaacctgccgctcgagttcttcgggatcttccgggccaagccgctcaaagatgaggatgacgccacgccctgggtcgccgaaatcgagcagaaggtgctcagctctccggaagttgggattgggccatatgtggaggtggcgttctaccataagccttcacggacactactggtgaccgatgctgtcatatttgttcctcaacagccaccggagtgtatcagcaaagaatctctgttggcatctgcgaagaatggactggcagtgaagctattgagcaaagggaaggaggttcccgatgaaccagttgttgacaataagctaaaccgtcagaaagggtgggagagaatggtacttcaaatactatttcttggtccgtcaaatctacttgagccaaatgcaagttttgctcaaatgtcgcaaaaattgatcgtctcacctattgtcaagacgctcgttttcagcaaagttccagagaaggacgtagaaggcctgaattgggacgacgaaggatggatacctggagcagga

SEQ ID NO: 26017 - DNA, 768 bp, Zea Mays
cttgatttcgtttatgatcatactatcaaaggcaagtgttatggtttaaaaactttcactcaccccagagctgctgagcaagcaattgcaggcatggacggcaagaaattaggcaatcgtattattcgagtaaatgaagtgcgtacaagaggtccccgagattttggtcgagatggttttagacgagatccaagaaggtatggtagagatccatactgggacagaagggatagggaacagagctatgatcgtgaaagagatccctaccatgacagggatagtgatagatcccgcgagcatgatagagaaagagattatgagcatggtggctttaatagagaagttgactatcccatggatcgagatcatgaagtagacgacatacatcctagagaacatgatcgtgcagcagaaacacataatatggattcagataatgacaaatataaggaacatggatcaagaaaaagccacccaaaaggtcgtgatagcaaagatttatcgagttccagtgatcttcaaaatgatgttagccagattaaggataaaatctctgcgaaaggacaacacattgcagatttgcagaagaaagctcagaaattagaggacgaactggctgctgcacggaaagtctcttcagaacgacaattagctgttacagacctgtacaaacattttcttcaactccaagactacaacgatagggtcaaaacagctgaacataggctgcaggtttgcttatgttgttggcaaggtgagaacggtgcg

SEQ ID NO: 26018 - DNA, 3498 bp, Zea Mays
aaggaataaaatgaagggactaaacattagtccctagaaaccaaacacccccgaagaaccattgatcgagtcgtaactcgtaagcaccatttgtccattttgaccggttgcaccaaatccaggtcaaacccaggtgattagttttccagtcccactcactcaaacctctccgtcctcctcctcctccgggccgggctgcaacctgcgacgctggcgccggtcggcacgaggtgttccacgagtcgctgcgccccccaccggccaccacggcgcgtgccgggagcagcgcagcggcggcggccataatgggcgccgccgccgcggccttcgactccgagtgcaagagggacgcttatggattcacggtgcggccgcagcatctgcagcgtttccgcgagtacgccaagatttacaaggaagaggaggaggagagggcgcacagatggagggacttcttggacaggttggctgagtcagcgaatgtgcccaccacacccagtgtttctccatatgcagctaccgacgatggtgcctcaggtgcaggacaaacacaagggaataacggcatcggaatacattgtgatgatgaagaagtgggatctgagaacgcagaagataacaacaaatttgaaagcccgaaggaagctgatgcaagtggcgaatcaagggaaccaaatggtaagccaggagatctgaaagatgtaactaagttggacaaagtgcaagaggagactggtagcagctctacgcaagcaatcaaagacttagagggcttgatggaagcaagcggggactttgaagaactaagagatttgaatggaatcccagaagaattggaagaagagaataatggcaacttggaaaagctggtagaactcttcttggataaggggttgttggatgaactgaagcccataaaagttgagtcccagtggcgggtgcgtgcagcgcttagcatcattgacaaaatgatgagctctcgggtagtgaagggtggtaatggtgcaaacgatattcatcgaaaggatggaccacagcttacttctattgaagaggaaggaatgactgcagaagtgagtcacgacggatatccagctgaggttgaggagtcttgtgttgcagagaaggtggaacttggacaggagacaactgatgattctacaggtactgctttggatagagacaatgatgggtcgtattttctttggagggaggagcttgagagcttggttcgtggaggtgtgccaatggctcttagaggagagatatggcaagcatttgcaggtgttagtgctcggaggattactgggtactacaacaatttgcttgatgacaggactgcgatattggatgaaaaggatcccgtggacccagtggtcaatgaacagagaagtgcaccgagaaaagctacacagcctgagaagtggaaaggacagatagaaaaggatttgccacgaacatttccaggacaccctgcattagatgaggatgggaggaatgctttgaggcggttattaaccgcatatgcaaggcataatccatcagttgggtattgccaggccatgaacttttttgctgggttatttttgttattcatgcctgaagaaaatgcattttgggctttagtaggggttattgatgattattttgatggatactacactgaagaaatgattgaatcacaggttgaccaactcgtccttgaggaggttgtacgagaaaggttccctaaattggccaaacatatggatttcttggaagttcaagtgggatgggtgactggaccatggttcctttctattttcgtcaatatgcttccatgggaaagtgtactccgtgtttgggatgtcatcctttttgaaggaaatcgtagaatgttgttcaggacgacgcttgctttgctggatttatatgggcctgcacttgtgaccacaaaagatgccggagatgcaattacactactgcaatctcttgctgggtctacttttgacagcagccagcttgtattgacagcttgtatgggctttcaatcagttggagaaatgggattgcaagagttaaggaaaaaacacaggccagaaattttaactgcaatggaagaaagatcgaaagaccgtggctcctggaaagataagaaggggttagcaaccaaactttacagctttaaacatgatccttcattcgtgtgctcaccagttaagtccaaggaggggctagatggttcaaaggtgaatggagagactgggccagcaaatcttaagacctaccttagtactagttctatactggatactgatttggatcagggtgttgatcttcaagatcaggtgtcatggctaaagattgaactatgcaagctgctcgaggagaaaagatcagctgatctcaggggcgaggaattggaaactgctttgatggagatggtcaagcatgacaacagacgtatgttgagtgctaaggttgagaagctggaagcagaggtatatgaactgcgaaaagttttttcatacaagcaagagcaagagcaaataacgcttcagatcttgttaagaatggagcaagaacagaaagtggcagaagatgcccgcatagtcgctgagcgagatgctgctgaacaaacatgcgctgcccatttgcttcaggagaagtatgaagctacaatggcagcactttcacaaatggagaagagagctgtaatggcagaaacaatgctggaagctacaaagcaataccaggctgggcaggttaaagccaaccaatctttcacttcaagttcacctcgtgcagaacatgttcttgggaagataaatcaagaaccaaaccaagatatgtctaacaggagaatcggcctgctttctaggggacttggatggcttgacaagagcaagggaaggcaaaattccactgaaacatctggaggctaaactcatctagagttcaggatgaagtcatagctcccaacaagatctggattgttcattgatgcttggattgcctgatcacgataagaatgtgttgaaatcagcagctatgttttctcggggagattcagctggcattttccatgaagttttgcaggaagtgtatcttgtaccatattgagctcagttgtcggataaagttttgttggtaggtcagaaaggctgctgcaagtcatcggtgtaaattttcttttattagtttcattaaggtcgtcaatagtcagtgtttccaagtaggagaaagaaaagaacccaacttcatatacacatggaaagaggaaaaattgtgttagattagttacagtatcatggggttgttttgttgaagagcgtatatctcttccgaaatgtctgaaccactgaagagattatctctgttttttttttcttttgagacatgtggctctaacatattcttcagttactgttgacatgcctgatgtacgaaaattattgtcaaaaggatctgattacgaatccaacatcgaaaaatccagtatagcgagacgttttggga

SEQ ID NO: 26019 - DNA, 3909 bp, Zea Mays
attatccacggaatggaatcgaatcgtccaggaaaggggaggaccggagcgagagcgagatggtagtggtggccgccgcggccgcacgcggccgcgctgtaaagcccctgttcctcgtcctcgtccaccacagccgccccgcgccccgcctcccccgccgaaccgcccgcgcccggccgctgcgcttcctctcctgctcgacctcagcgccgccgctgttcgcagccgtcgcatccatggactcgccgccccagggttaccgcaccaacgtcggcatctgcctcgccgacccatccctcaccaagattttctcggcttctaggatcgacattcctagcgcgtggcagatgcctcagggtggtatagatgcaggggaagaaccaagggcggctgccttcagggaattgagagaagagactggtgtcacatccgcagagatcgtggctgaggctcccgtctggttaacatatgatttcccgccagatgtcagaaccaaactgaatgccaggtggggaaccgattggaaaggccaagctcaaaaatggtttttatttaggcttactggaaatgacgatgagattaaccttaatggtgatggatctgagaagccagagtttggtgaatggacatggatgacacccaaggaagttatcgaaaaggcagttgatttcaagaaacctgtatatgaggaagcattgaaacactttgccccctacctgcagtcagatccagccgcttcatcatagaagatttggccaatttgcttgcatccctgctgtatctggacccccaataatttgacacgacgcaatgtagccatgaggtgtgctatacaatttgatagtgtgtggcctgtttgagtgaattatatatgccagcattggatcctcgccctctacttagtcacataagtatacaataagtggtggaaacagtttcagccaatctggaacatggtggccagtgtatcttgtctgccaatgactgaatgctttaggttgaagcaataccataattccagagagactgcggtacagcaacctcaggttatgtggggggtcgtcggcaaaacgacgctcgtttggcattggctacggcagaaactagtgtctggctgccattggttgtgggaggagcagaggaaaacaaattgttggttacactctgtactactgcgtcatgatattgtcggctttcgctttgtggcttttggaggaaaactggagatgtggcagctttggctttacgcatcttggaggaacaggagatataaacacacgcatttcgtttttttttttgttgaattgagaagcaagaagggaagaaagcggctacagacctcgcagcggcggctccaatcggcggctgacgggctgacgaccacaggcctcgcggaggcggctccaatcggccactgactgggtgacggcggtggctccaatcggcgaacgacggcggcggcggcagctcagatcgacgagcggctgtggctagcggcacgcaagtggaggcacaaagaggtggcttcggggcagcggctatgcgatacaggagtacgtgcgtatatgaagcctagggttggaacgtatcgcacaggtatcgggaaggtgtcccaggagtatccggcttttttatttatttaaatctacaaaaatatccgatacgtctccgatacgtatccggaagtatccgggaagtatccgtatctgatacggtatccgacaccggtacgtgagttttgtgaagtatccgcgcatcataggtgctcaaagctattgataaaagaagaaggggtttcctgtggaaagggcaggaaaatgcaaatgggggcagctgtcttgtttcctgggattgtgttcaacgtcctctgcagtttggaggtctaggtatacttaacttggagctgttcggttgggccttgcgtattcgttggttgtggctgcagaagacggatgcctcccgcccttgggctggcctccccctcgaagtacctcctcttgcgcaagccctgtttgacgttgctgttgttactgtggtgggcaatggtgaatcaactaaattctggacagatcgatggctgcaaggaaaatcagtttcgtactgggcccccagtttgtttcagttgatccccaacagggctaagagacataggacaatggcgcaagggttgcagaaccatagttggatttctgatataagaggcgccctatcagtacaggtgcttgtggagtatttacagctctggaacctctttgataacttggcgctccaacaggaagttccagatcagcacgtatggcggctaacaaatcatggggactacaccagtaaatcagcttacgaggcctttttcacggggacaattaagtttggcccctggaggcgtatttggaagtcttgggcacctttaaaatgcaagttcattgtttggttggctatcaagaaccggtgttggacggctgataggcttgccaaaagggggctgcctcatccatctgcctgccccctttgtgaccaagctgaggagactatccaacatgtcctgattggttgtgttctcgcgcgtgaggtttggacatctaccctcaatagcttggggctgaatgcccttgcacctcagcctggttgtcgccgttttgtgggctggtggtgtacagctactaaagcagtcccgaaagagatgaaaaaaagtgttaattccctcatcattctggtcgcctgggaaatttggaagcatcgagatgcctgcgtgctcgaaggaaaaaggccatgtgttcgaactgtcctgcaaatcgtggccactgaatgtgctctttggagtgcggcaggtgcctctcgcctcagagaactgctcacctgccgactcatctcaggggattagcccaggtctcgggtggctgtggtcgtgtatgagtgatgtggtcgtgtgtgtgtgtcgctgtggcgcgttagttcctaaccgccttgtacacgacgctatttttccagttgcgtcgtactcttgttttttctctccttaatgaaatgactcgcagctctcctgcgacgttcaaaaaaaaagacaagccaacacacatctcgctagtttacaacagactgaggcgaaatagactcaagaggcctacgcagtgtgggggcgcatgtaagcggcttggagtctgtaagggctgagtcaaagccctgatcaaatttgctggaaaactttcctagctgtcattgtgcatcatcaactacctaaattatgggagtggcaactaaaattgaatgtatcatatcagtaattcattgagtaaaataagagcgtccaatttgaattggtaataagtcagagtgacttcaagaagctaatttccttgtgaacatgcatgtagtctcttaagatcatacctacaggcatgactgaatcttatacctatccaatttctcacgtcacatcgcttaccatatgtgcgatctgctggagacagtctaagagtggagtttgaaataggagatgggataagagatacgatgggtaagctgctagagacagcctaaaggcaccgagccaccgatgcatgtatagatatggcagttccacacaggggaaccatggtcatttctaaaagaggagttttaataaaacaaaacaacatgtaatgacatgttttctctgcaacttaataaaagttgttcactgatgaaattatacttacatagatagggcctatgcgaagaactaagaatgctttgtaatgaaagcatgccgtcatagcaatgacgcgtggggaaagcatagtagttggtggaaaattataattgctactttaggcagcacagcaagacgcgaacaagtacgtgaacgaaaagtaagaaataacacaaacctcttttgtaaggatttggcagttgtctctagtgcgatcgaag

SEQ ID NO: 26020 - DNA, 905 bp, Zea Mays
ctgtataggccatatctgtacaattaaatgcatggcggaccaatgagtccgtgaatgccgaagaaacaagagggctgacaaatgtgtactggcatcttctggctttcaaggtgatattaaggctctgcagaagaacctagctgccagagaattgctgtaccaacaccagcataataaaaggatgagctgccccgccatggcacagctcctctccaataccctgtactacaagcgattcttcccatattacgccttcaatgtgctcggtgggcttgacagcgaggggaaaggatgcgttttcacctatgatgcagtaggttcctatgagagaaccggttacagtgctcagggaacgggatctactttgatcatgccagtcctggacaatcaactaaaatcaccaagtcctctattactccctgtcagggatgctgtcacaccattgtcggagtcagaggccatcgatctagttaaggacgtgttcgcatctgcaactgagagagacatctacactggagacaagttggaaattgtagtcattaacaaggccggtactatgcgcgagtatatcgacctgagaaaggattaagccaacacttcagttgtgctgcagctgtcatttgctttgaactttttttcctagtctggtgatttatgtctaaagctgttgcttcataggaacacttgtgtttacttgcatatgtaatgtacggtatgtaccaggattcagtgagttttttttctgttgaaacaaattgcttggatactgaaacactgtatttattgcctgaattgtctattttagttttcgtatttggtaatttagggaccaaaatagaataaaatagagggactaaacattagtccctagaaaccaaacacctctattaaaattatttggtttc

SEQ ID NO: 26021 - DNA, 1079 bp, Zea Mays
cccgattcgacggcggcgggcaatcctggttgtaacagccgtggactgcaactgcaatgggtcctccgtccgttcgttgttagtttacggcttttcccatgacaaattccgtatgattctttcaaagatactaccctcctcgtcctcgaccacttgctttgctgtcgtaatctcaccataccaatgaaaacacctagccttagcgtatgctctgggccgcccatgcaagcgggaagaatctcacctgcccacaggacaaccatgtgtttacactagagttgatcgatactgtaactgagaaccaaaaatgaatatgaacgaaacggtgctccgacgaggtgaatccgcggaagcagccgtacaagttctccaaccagaagctccgggacctggggctgcagttccggccggtcagccagtcgctttacgacacggtgaagaacctccaggagaagggacacctgccggtgctcggagagcggacgacgacggaggccgccgacaaggatgcccccacggccgagatgcagcagggagggatcgccatccgtgcctgagagggcgatgccacacatgaacacaaagcaatgttcatactgctgccctgcacctgctgtgtaaacaggcctgtgtttgttctggctgatagtgatgtaccctaagacttgtaacgtcatgttcgttcttgtgaactatagcgagtgaataaaattggttaatgttggatgttcaaaattttgcagataagagagtcatcaattcaggttctgaaaagcaatcccgaaactaccaccctacctatcccctacaggctacagtagactgtacaagaccctttgttaccaaaccaaaaaaaaacatcggacaaactcaagactattcatgtttggtaacctacttgtgtagaaaagtgagctctattattggctgatgcaatatgccaacccttacatgcagcaggaaagcaaagaaagaacagtaaaacaaatgagttggtaaacagagaggactgcacaaaacaaggaatccggagaataacgatatctcaattttcaagaccaaatttggattaaaaaaaa

SEQ ID NO: 26022 - DNA, 1798 bp, Zea Mays
tggttctcttcttcggttttgctggttcttgggcttctaggccccaaagatcacctccgcccccctcctcctcctcctcctcctctctctctctcctgggttagaagacgctcttttcttacggcggcgccaaagtggtgttcgaccagatgggagcgatgtgcgtcggctattcgcccctttctggtgcggtcaggtttgccgtatgtttcatgtgatctattgaactggattttcgagcgtcgtgctggttgatcttgttattgtaagttcttatgaatgtttgaggcatgaggatatgtaattagtggagtccgtacggtgagttgcctctgcaaaaaaaaaaggacctcacaggtgattcaatcctgaaggcatcaactatgttcaattttcaagaaatgtcttgctgttttacgtgtgcgacgggcatggaacgaaataatgaaaacgaaggtgaccagttttgaggaagcaaggtgaggattttttcctacagtgagatgaggaaagctacgcatgattttagtggagcaaacaagattggcgagggcggtttcggctccgttttcagggggaagcttaaagatggaacgatcgtcgcggtgaaagtcctttctgctaattcaagggtcccagaggattcttgtgtacaattatctcgagaacaatagtctttcatatacacttctaggttcgggccggagcaacattcggttcaactggagagcccgtgtcaagattgctgtaggcgttgctcgtgggcttgcttatcttcacgatggaattcggccccctataattcatcgagatataaaggcgagcaacattctccttgacaaggacctcaccccaaagatctctgatttcgggctggcaaggctcctccccccaaacgcaactcatgtgagcactagggttgcaggaacaataggatacctggctcctgaatacgctgtgagggggcaagtgacgaagaaatcggatatctatagtttcggcgttttgctactggaaattgttgctggtagatgtaactacaacagtagattgcctcagggagaccagtttctgcttgagaagacatgggcatactacgtgcagggaaagctagagaaggtcatagacgccgaagcaggggaggacctgaacgtcgaggaggcatgccgtttcttgaaggttggcctactatgcgcccaagacgcgatgaagctgcgtccgaacatggccagcgtcgtcctgatgctgataggagagaagggaatctccgtggacaggatcaccaagccagccgtgatcggtgacccgtacctcgaccggaggccaagcaacgcagactctaccacgatgaagtccttcgccacgaccgaagctttaacgtcatcagaggcaaacacggagtggtctctgtgatggggggaaaaaacgtcatcatcgatggagatttgtttttgtggatgctgcagttgccaaacaaataccgcatcgcttctgttgattatgtttgtttgttatttttgtgtgtgtgtatatatacttgaaatggaaccacgggagtgaaacgaggattgaatatgctttacccatctttggtacaagtagaatcgtttgtgtttctatcatattcactctctttttttttcttctggaacatgtatgttatcttttcagtctgatcacctttgtaggtcagttccagcagactgatgatgtgatgcgtagcgttgatgcaacggacatacaccaccaccctttgtagcaagttgcatcgaacagtttcgttttccggaggaatacg

SEQ ID NO: 26023 - DNA, 2385 bp, Zea Mays
atcatttaaggtgtttgtgcttgatttaatttcttacatttttaaataaaatgagtgattaaagttttcgaaaaaagtcaatagtatcatattgtgaatataaatattttgaataagacgaatgaacagagttagtacttaatagaattgatactcgtaccagcaagtttctgtactttgtttttcctaagtttgtacttctttatcggaagtataaagtataggtgaccgaccagtgtttctttacctttcattttccgtgctcgatttttttagatcgaacaccaggccaggaggaggagcaggcgcggctaaacgcgcgagtgcacgtagcaaaccgcatcgtcgaaagaggagagagaaataataaatatacgacgagggggcatggcccccctctcccttattctattcctccacaccgatcactcgctgctcccctctctcgccggagctccgggccggatggcggcggcagcagcagctcctcccgcctccgtgatcgcgtgatggacgcacacaccgccgcgctccgccgatggacgacgccggaaggccaccaccacacgctcccgtggcggtgaccgcctccgcctccgcctccgccaccgccgcgcccgcccctccccaaccctcagccactgctgccgtcgacaggtcctcccccgaccccgacgcgctctatgaagaggggatgtggcaacaaatggccatggacagcggtgccactatgcaacctgggtcatatcctgagcgaccaggtgaacccgactgcacttactatctcaggactggattgtgtcgatttggcatgagctgccgattcaatcatcctccggataggaatctggctattgcctctgccagaatgaagggagaatatcctgagagagcgggacagccagagtgtcagtattatctgaagactggaacatgcaagtttggccctacatgcaaatttcaccatcccagggaaaaggctggaattgcagggagggtgcagctaaacacatcaggatatccactccgcccggtttgtcttccgttgccatttatatctcctcttctacatatgtctgtttgttttgctgaaaagaagtccactttgcttctgtagaatgaaaaggagtgtgcatattatttaaaaacaggacactgtaaatatgcaaatacttgtaaattccaccatccggaacttttcaatgtggtgccttcgtcacgtggttctcctatttatacctctgtacattcctctgcgagtgctggtccgcagtcctatactggaactatgccaagctgggcttttccacgagcttcttttataccaagccctaggtggcaaagtccttcaaattatgcgccgatgattgtacctcagggccttgttcaaatgcagagctggaattcatatactggtcagctgcagtcacctggggctcaacaaacttatggaagttcacaacaaggagaagctagtacaggaaatcagggaatgctgtcaccatacagacccagttcgtttcccgtgcctcaatatgcgctgcagagagagaatgtatttcctgagagacctgatgaaccagaatgccaatattacatgaagacaggagattgtaaattcggtgcagtgtgcaagttccatcatccccgggtgagatcactgccccctccagattgtgtcttaagtccaatgggtcttccactacgtccagcatcgttgttgatacctggacactgattagagcaatgtcaaaagttacaaatttgctaggacaggtattatcagacagttactcggtagaggaagggacaagtgcacagactgatgtctgcttacaaatagagcctgtctcatcaataggcactagatagtccttttgctgcacctcattgaatggcctgtcgtcttgattatcctgtccccaatggtttttcagggtgaagaactgtgcaaattctattctcgttacggcatctgcaagttcggcgccaactgtaaattcgaccatcctacagtggttgctccaatggtctatgcttgacctacttcgatttataaaatccatggcactgcctcaggcgctgtgaatgtttctcctaacttcctgccgggatcaaagttctgtaaattgagttgctaccggagatgtacagcccctttttttttggttaatccagatctttgggaataactctcgaaaccgaataaactttggatacagagatgccagttttcaggtgcctgcactatttgacattattgctgcacctatggttccgaacagaggaacagttgaattctctggaggggctgaagcctgcacttgtgcagttgagattatatcatcgcgtcgatttattttggaacctgtattcagctggtgt

SEQ ID NO: 26024 - DNA, 949 bp, Zea Mays
gtaaaccatggctggcatcgggcatctccactcccactccaccggccccacctccgcgaggggcgacccgagaacaccaccacgcccgccatgtggcgccgcctccaaaccctagccccctcgctccgccgcgccgccgcatcgtcgtccccggcctccgcccgcgccgtgcccttgtccacggtgccggtggccgcgttccggcgcacttcgaccctcctctcctctcccggcgacaagccggcgcccagcaaggtcgaggatgtcatgccgatcgccacggggctggagcgcgaggagctcgaggcggagctccaggggaagaagcggtttgacatggatcctgccgtcggccccttcggtactaaggttggtttctcgagaagcaatgattgcattttttgtgggacggagagagtagtttcttcctcaagctgagtcctgttaggactgtgaagttagccgtgattgaatcctactataacaagagaatagttggctgccctggtgccgaaggagaggatgaacacgatgtcgtctggttttggttggaaaaggataaaccgcatgagtgcctagtctgctcacggtactttgtgctcaaggtcattggtgatgggggtgatccagatggccacgatgacgaggatgatcatcactgaggccttgtgtcgataatgataataagaactttgtgaaacatggttttgtcctatctttgcagcatcagactgccctatagagtattgtaattgataagtgtttgaccatgaaccaggtcgggtggtgttttacacctacgaattttgttcagatcttttcgaccatacggttgcttctgtttggaatatagatttttttttctggagtgcaacatcaaataaaggatgagtgcatcggtttcactctattgaccatctatttttgggttatattttgttcctgattg

SEQ ID NO: 26025 - DNA, 2715 bp, Zea Mays
cccggtcgcgtactctgtcttctcgtggttctcccgtgcccctcgcgtgcgctctctgtctctcggggcgacgactaggcggctgctcgccggccgccgacgccgacgcccgccgccagattcccaggtatctatcttcgggacctcgaccggcgacgagcacccaacagtttcaagtgaaatcatggcacgaaaaggaaatcaaagtaagagtggccccaatcatgcttcacctaagtggaaaaatacaactgatggtgatgcactaagtacaccagaaagaggtgctgcagatagtgaaaatccgagttcacatgttcaaggcagatcaaagggtcctgaaggaagcagtgagaagaaaggaagaggcagcaaaaggaacagcacaaacaacggcatatcatcctctggaaaaaaacaacaaatggacaccggttgtgatataaacagttcagaagaaaaggagattccggtaagaggtactaaaaatagaagaggtagccagaaaccctctaggcgcggttttggtagaagttttttcattgagcaaacaacatcgtctggattggcaggaaatgttttggagaagaccaggtgcattgcttgcatggctgcatccattattagagcttccatgatatatctagttgaagaaggcaaaagatttatcgaaaaaagaatgccaacaatcaacacttatatggcttttgtcaacaaagggcatgcatatgtcttaagcaaaattgcatatgtttatcccatagttcgagcttggatgcttaatgctggaagggtgatgctgctcttgtttacagtttggttagactgcaatgtaaggggctttgattctttgctacgattggggacaaactctctcctagcagtactttggtgcagcacgctgtcaacttttgcaatgattgggataaaaaagatgctcatattcatggcgattgcagcttctgcgtttgccttcataggtctaggttttgctatcctgcttatatcagtgcttgcagtggtaatcttatggttttatggaagtttttggacgaccacttgtgtaatgattcttggaggtgttctctttttcttgaaacgcgaaagaataactcttcttgttgcctgtttatattcgatgtattgcgcgagatgctatgttggatggctcggattgcttttgggcctcaacttatctttcttttctagtgatattctagtgcagttcctaagggacaatgcagacaataaaaaattcaatggttcttcaaggtactcagagcgaagctctggtagacaaggcaatatctttgaagaatttcagccatcagcaaatagcacctaccaagccagatatgctcgagcttcagatcgagatcctggtgatccttcaacaagtggacctgagaaagagcttacctctgaagatgaagtggctcgtttactgaactgcactgaccactattcagcattaggtttccgtcgatatgagaacatagatgtatcatctcttaagagagaatacaagaaaaaggctatgttagtccatcctgataagaatatgggcaatgataaagctgctgatgcatttaaaaagcttcaaaatgcatatgagattcttcttgattcactgaaacgcaagacatatgatgatgagttgaggagggaagacctcttgaactacttcaggcagagtgtttctcaaaagaatggaagaaacagtactttccaacatgggttcagcccttcagaaggtgttgatgaaggtccttatggtctttccagaagaatagcttgtaaaaagtgcagcgactttcatctttggatttatactggaagagctaaatcacaagctagatggtgtcaggactgcaaggagttccatcaagctaaagatggcgatggatgggttgaacagtcctttcaacctgttctatttggcatgctgcagaagcctgatttacctcatgcatatgtttgcgcagaaagctacatatttgatgtcactgagtggttcaactgtcagggaatgagatgcccggcgaacactcacaaggcaaccttccatgtcaatgccaacatggcaaagcagagcagtggcaaggcgagtacctcaacgcagagggctggtaaggccccaagtggtgtaaacatggatggaggaggactcaacgaggaagagttcttcgagtggttccagaatgcagtcaactctggaatgtttgaaactacattcggggcacaaggcgacccgacttctcctggtaacggaagcaatgccaagagtagcggtagcagcagcagcaacaacaatagtaggaaaaagaagaaaggaaagaaacagtggtaatcaaagcaaagcaggctggggtctggtgatcacttctcggggcagagaaaaaaagaaacaaacagaataagcgttttgggtatgtaaatacaactcggaaaaatcggtccctggcttaaatggttcctaacgagaggccactgtaaatccttgttcatcatggggtgctgacggctgttaaatggccattataaatcctggttcattatgttgtcggatcttaatatatcgtcctggccctcggtaacttgctagcaaaaaaaatgttataaagcaagttactacgaaacaagaatttgcaagattaaagatagttttttttgactgtcatggggaatccctacctggatttcattgattctagc

SEQ ID NO: 26026 - DNA, 4754 bp, Zea Mays
tcaactgaagcacgcagtccacaccgaagcaacgcttcgctcctcttcgccgtagtctttctcggccctccgctcccatactggttgttctacttattcaacgcgcgcgacatacattggagttgcgatccaaactgctggtgcagttttacttgtcacaacccttggtggttcagcataaactccatgagcgacgacggcatggcctccgctgcggtggagccgcccaagcgggagcaaaattttctagtgaaggtggggatggaggcatggacgcagtcgttcgcggttgcacacaaagtcaggttggtgcacatcctcaagaatctccacacctcggaggtgaaaatctactccgacgcgtccaaggagttcataggagtactggatggtgagtctggcggcgaggtgctgcaggagtacgtgcaacagtcaccgcagcttggggagctgctcgaggcatggcggctccaccgggagaacccggggatggcgcacatacttttgctctttgcagctgtcctgggccaccctgatggtaagctgcggcgacatggttcggttaagaagagcttggacggtgtcgctaggatgatactggaggataaggagaagatgggggatgtgtatttggagctgaatagtggtgagttccgacggcagaatgcagcactggatttgcttgctgcaattgtcaggcgtggagggggtctagcgtctgaggtcgctgagagatttgattttaagatacctattttgccgcagctggctgggacaatgaagaagaaggggagcagggatggaaggaatcggcggaagggtgccgactttgggtccacaaggcggtcgtttattgggtttgccatgtcatttttggaggttgggaatccaaggctgcttagatgggtccttcaacagaaggaggtatattcaggggtgcttcgtgggattggaaatgatgatgctgagactgtcatctatgtcctctcaactttgcgagacaatgtcctggtagatgagtctcttgtcccaccagggctcaggagtgtcctctttggaagtgtcacattggagcagctgagcttgatctcaggaaatcttgaatcaggggaagcagctgacattgctcatgaggtattggtcatggtgtgcactgatccaaaaaatggattgatgccaggatcaaatttgagaggtaatgagaaacgcttactagatctcatgaaaaagttgaaagctactgaggttgttcatcacaaaaaattgttactggccattgtgagtaatagactgtctctttgttcggcgtacatgaatgagtttccttacaatattgaaccacgttcgtctccttcatggttttcagccatctcccttgcagctgatgtcatagcttcagcaaaatgcaatagcattgttcaaactctttcatccagttcacatggtctggtatctgtagatgatgaagaagttcaggtagtcttgaagtgcatggtgcccaatgtatgctctcgagcaatgataaatagggggttgctgcattctgatgatcttgtgaagcatggttctctgaggcttgtttttgaatcagttaacctgctttgttatatcactgaatccatcaattgcatggtatcaaaagggagactgaagtcagaattcattggctcagagaaagtaaccatgaaaatagatggtttcccagtattaagctgttctgatgctacagatgcatccttagttgatgaggttcaccagggagatgaaatgcaggtcaagaggtggacatctctaagagaatacatccaagatgaagttcatggagctatgcctgatcctcaagtctttctcaagttactctcttctaccagccaaaaacatcaaagttattctcagagcatacaaaagaataatgctcaactttctgagcctcctcaaaagaaacgaagatgcagtccttcctgtgaagttgatgatattattattggtggcattgatgttgagcaggataaggacgcatctgaagaacaaggcctggaattaaaaaatgaccgcacaaccaccttgtgtgagatatggagcttagataaacaagatccaaagacgaaagatgcaaatgttgtggaaaatgtcttccactcgaagttgctggatgttctcaggctttatttgggggtgatgcccagctcttttgatggatcatatgacttctttaagattataccacctaacccattggatctgtccatggatgagcaacagtccctgttatcttttttacttgaatattcaggccaatctagaggatgtttggacccagaaagagttccagaatcaatgtacaagtatctgcaacccttggtttatatcatgttgcattcacagattaagaacatccgtgatcaagcatatattttagttaaagctgctatggcaagttcgggtgcttttgatcataacttcacagagattgatgcatggttggttttcttgcctggttatgaggccaaatggtgtgtaagagagaacctaagaattggagcacctaataaattatcacacattgtgatcccttttctgtgtgatgctatttcggtagttggtaataacctgtataaataccaagagcacacacacaagcttatctctaaatcaggccagttggaaggccgttctccagatttcagccctctgattatttgtgttcttcagaaatgccttaggctactcgacacagcatctagaagtacaaagttacacgagaagtctacaatttcattgtatgtgtgcaacacgatccaccttattcttcagtctcaggtactattctaaaagaaagatttgataaattttcatcccaagaactgaactctaggatttatctggctgagtggaggccgttaacaaatatgctgcatttcttgaggaaaatttctgaccagcaaaattatagcctgttcaacacgctggaacattctcctgagtttgatggtaactcgttgtgctctgtatctagacaggttgaagaattgttgaatcaagaacaaactaattcgctggatgatgtagcaaccgcattcttattttcaatcatatgtgcacctccaaaagatgttatcagtgcctttccagatcttcttgatttggtgaaagcacattttccatctcatgttgctttcttgtcatcggttctttttctacaacatgattatctggctaaagttgctagttgttggccagatatattcttcagcagcatcagactgttcaaggatgatatcaatgctgaccatgcaaacacagttgaggacgaatgccagaacctctctgtttcaacagaatcagctccgctaagtacatttttaagtgtcagtcccttctgtgcgcttttaccttcagtattgagccttgcatgttcttcgccagatgaaatcatggaagcacataaggatgcacttctaagactccttgaagttaaattgtctgactgcacattcagtgagcttaccttgtatctgagagtcatcttgttctggactcatcacctactgtcatcatatactattaaggattcaaattcagatgatcttgagcaagtatgtcatttgtgctttggtcttcttgatagagtatttgagcgtattcaagttttgactgctgacccttcacagtcaaattctgaatacccgtactatcccgctcaacatatccaagacattgttgattctgttcttcggcatcctgttattaccctgtctttgtcatgctctttatccaattgccaaaatttagcagatgggagtttggaacatctggaagaagctttggctatttttgcgacggaaaatctgcaccttatagaccgtttcgttctaaaccttttgggtaaattgtatgaccttttgctaatgtttggtagctatggtggtaactactctacagataatgggccatcccatgagtcactgtttgctgctccaaatcttctgctggagaacataatattgttgttcaaggagaagtttgagctctgcgtggacaaactaaattttgaattgcttttgccaaatttctacatggttcgcacactgtcaaagttcttttctcctttcaaactcctggagcttgcaaattggatgttctcaaaattggatggtcacaacttcagttcacctgcttttgtttctgctgttttgatgtgcctatacattattgatgtcaccatggaaatgctgtgcttttatctgcaaaaaactgatcagagatcacaatcctatctatttcggcacttggagattcacaattctgatatcaatgccattcagcaagcctatcacatcattcttcattttgctactaaatggaatgttgagtttgctgatcattgcttgctgaagatgctgtgccatattcattacacagaaagatgcgcaggatggaacactgactatattgcattccatatggtattatctacaatggccatcaatactcccattgacattcttcatcactgcattttccccacatctaaggttaaagcaaaagcaatcctgttgcttttggaagcaagtcctatgcatctgaacctttttagccagatattcttggaaattttaaataaagacacttatgttttgcaagtcaaggattctgattccaacaatttgtgggctcaagaagatggtgctatacttctgttgcctgccgctttatcatgcttgaaatttcacagcaatgacaataggcagtgt

SEQ ID NO: 26027 - DNA, 1477 bp, Zea Mays
cttgccactgtgccgacgtgtccggccacgcgccgcagccgtttgcgtgtcatgttgcctgacgctgcccgcctagaagatccacctaagttcgaactttgggtgataatacttttagctgttgcgagtgtgtcatttgctgctttagtggctgctctactttggattatcatgcacagacattattcccgtgcctcatcgatgaagatagagttgcaagttgcaagggaattctcgtaccaggagctgtctgcagcgaccagcaacttcttcaaggacaggaagctcggcgcgggccagttcggggaggtgtacagaggtgagctgccggaccctctcatgccgccggtggcggtgaagaggctgacgaggcagatggaggcgcggacccggaaggactacgtgaccgagatcatgaccttgggccggctcagccaccggaacctagtgaagctcgtcggctggtgtcaaggcggcaatgagctgctgctcgtgtacgagctggtaacgaacaggagcctcgacgagcacctccacaggtcagagcgcctgctggcgtggcctgagaggtacaggatagtgctcggcataggctccgccatagagtacctccacaccggcgaccagaaccccatcctgcaccgcgacatcaagcccagcaacgtgatgctggacgatgacttcgaggccaagctcggcgacttcgggctcgtgaggcagatccatccaggacatggctcttccctcgagggcaccgtcatgatcgggactagggcgtacatggatcccgtatgcatgagcaccaacacggcgagcacagcgtccgacatatacagcttcggagtgctgctgttggagatcgccaccggcctgatgccgaccgaggtggcgggcccaggaggcctcctctccaacaccctcatcagcactgtccgggaatactacggcaggggatcggtcctcgagatggctgataggcggctgaacggcgacttcgacgagggcgagatggagcgggtgctgctcgtcggtctcttgtgtgtccagcaggatcgccgtcaccggccggaaatcagaatcgctgtcaacatgctctcgaatctcaagcttccgagtcctagaattcgttcctgaaaagattcactcgccaataatagggtgccttgcctctcgaatctcaggcttccgactcccagattcgttcctgtatgtacatagtgctttgtgagttagcatttggtctggctttgatcacgtattcctctataaactagcaagctggctcgcacaagaactaatgtgatgtttggttcacatatttgtaatgtaacgggtaacagataacgttaaatcatgtttatctaagtccaatcgtaatcgaataccatactaaaaattaatatcggtctattcaaacttattataagttttttttcattataacatcaagtttgttttcttagatatattttaaata

SEQ ID NO: 26028 - DNA, 1451 bp, Zea Mays
cgcggggaggggcacgacctgtcttgggtgacaatacaactttcatcatcagctaaagcaaggtccccagcgcaaaaactatttacaaaaatatctgtcgtcctctgtcggacaagagcgtctctcagcgtagtaccaaattttcctctaccgggaaaaaggcgaagaaagaaactaacagacagacagtcattaaaagctccggcgactatgctcccgcctccgttggcgatgagcagttcaggtcgagatcgaacacggtgggcttcctcgccgacacagcgaccgatggcgacggcgacagatccactaccgacgaacagtccgagtcgctctacgccacggtgaccgtcgacgccagcttgagcacacgacaccctgcttccgcggtggctgcgcaacttcccctcgtctgcctcggcctcgggctcgcatccgccctcgacctcggccgttcttcctcctgttcccgccgccgtccgccgccgccgctgcttggcggccgcctctctcacacccaccgcagtgcgggcgacgaggaccccatgactatgatgacgccgccccctctcgagcagcagcagggggacgagatgctggtgccgcaccaggagctccctgtcgctggcccagaacctgccccacagccgatggaagttgttgcgcagacagaacccgccaacacagcggagacccagccacccgaggacccgcagacgtcgcgcttcacctggacaattgaaagcttcagtcgtcttaacactaagaagcactactctgatgcgttcgtcgttggaggatacaaatggcgtgtgctaattttccccaaggggaacaatgtggatcacttatcgttgtatttggatgttgcggattctgggagcctcccatatgggtggagccggtatgctcagttcagcttggctgttgtgaatcaggtccacccaaagtatacaattcggaaagatacccagcaccaatttaatgcacgcgagagcgactggggtttcacatcgtttatgcctttgagtgacctatatgacccaaacaggggttatcttgtgaatgacactgttgttatcgaagctgaggttgctgtccgcagaatggttgattattggacttatgactcgaaaaaagaaacaggctgtatatcatatgccaacaactgagaatgacatgccatctgggagtattcctttagccctgcagagccttttttacaagctccagtatagcgacaacagtgtagcgacgaaagagttgaccaaatcctttggatgggatacttatgattctttcatgcagcatgacgtgcaagaactcaacagagttctttgtgagaaactggaagataagatgaaggtaaatatgaaaataatgaattatcaatacatctaaaaggacagaccgagtgttgtcagctcccacatgaatggggtctagggaag

SEQ ID NO: 26029 - DNA, 2069 bp, Zea Mays
aggtgtaccggcgccaccgccagtacacaccagctcgccggagatcacaagaagatacaagaccgtgctcctcgacgccgcccgacatggcggacgccgcctctggccgcggccacgtcgtctaccctccccgctccgccgaggacatcttcaaggactaccgcgcccgccggtccgccatcctccgcgccctcactcacgaggtcgaggacttctacgcgcagtgcgatccagacaaggagaacctgtgcctgtacggctacgcgaacgaggcgtgggaggtggcgctgccggcagaggaggtgcccacggagctgccggagcctgcgctgggaatcaacttcgcgcgcgacggaatgaaccgccgggactggcttgcgctcgtcgccgtccactccgactcgtggctcctctccgtcgccttttactatgccgctcggcttaatcgtaatgaccggaagcgcttatttggtatgattaatgaattgcaaactgtttttgaagttgtctccggtgcgagacaacaacaatctaaagagaggtccagtatggacaatggtggtagagccaagcctgtaaagatagaaaataatggaaaagtcacagacgaagcatacgaagatgacagtgatcacggtgaaaccctatgtggaacctgtggtgggatatacaacgcggatgagttttggatcgggtgtgacatgtgcgagcgatggtaccatggcaagtgtgtcaagataactcctgccaaggcagagagcataaagcattacaaatgcccgagctgcagctccaagagggcgaggcagtagcaaaacccatgaacgcaggaagcctccgaatgtgggatgtatggtgcagaagaggcgcattgcaaagtttgcaggcaggagaaggccaagaggcctccatttacaagattagaactatattgctatcttcccagtgccttatgcttgcgtttacctatgataagctgatgtgaggaaagataagacatttggcaaccagaggcacttagttaaatgccccttgatatacatggggatcaatgttgaggacaaaagacctgcgtgcccctacgagaagaatgatgacatctgctgcgcttctgattgacaacaggcccggggtctcagtttcaggtagagtgcaggcggagaaccaataatgggggcggcgccgtcgtccgacgactcgtcacgcgccggagacggccgggctgtggcgagcagcgctgcctctggcactggcagcaacagccaccaggcccagtcgaagcgggcgccgccgcctcacaagttccacgagatagttgcgcaggaggcgacgacggccggcggcggcggcggcactgctgctgcagccgagctggaggatcaggcgtgcagcaccggggtgtacctggctgggaaaaccaagaagtactgggtggacgagaagaccaggtgcaactgcttcgtgctgttcgctagagcgctgtccatcacttggggcgacgatcccagatactggatctggcatcccgtcagagaaaccaatgacgccgagatcgtcgaggctgcgtcgctgcagaacgtgtgctggctggaggtgcacgggaggctggagctgtcgcacctcacgccggggtgcagctacgacgtggccttccaggtgatgctcacggagccggcgtacgggtggtcggtgccggtgaacctgcggctcaggttccccgacggcacggctcaggcgcggaaggagaagctgcaggggaggcccacgaagcagtggctggagctcagggccggggaggtgaaggcgccggcccagccggggggagcgggacgcagcggcgagcttgagatctccctgttcgagtacgacggcgggctctggaagaaggggctcctcgtcaagggcatcaagatcgtcccgaaggagagtgattattaattagtgtttgtaactttgtttcagggtgactgctcctgctcgcttttgcctgtcaggtgtgctaagaacttcgtctaagataattggaataattaatgtgtgtggcactgcgtatttcaacgcttcactcg

SEQ ID NO: 26030 - DNA, 2554 bp, Zea Mays
cagcagtccactttcttcgctagacaactattctgtattggcttgttggagaagatgcctttgcccgaattgctcctgctgttgcaggtgttgctgatgtttcaacagctcattatctctttagggctcttgttggtgcagaaaagggactttcatttgatctgtggacaacatatctagcggaacttttgaaggttcatcatggcaggcaaacacatcaaacgggagataattttttgtatgatgagaaagtcttatgcattggctctagtaaaaaaagacctgttctaaaatgggaggaaaataccgcatggccaggaaaccttaccttgacggacaaggcgctgtattttgaggccattggactgtcaggtaccaagaaaccaatgaggcttgaccttacaaatcagaattcaagggctgaaaagacgaaagttggaccatttggatccaaactatttgactctgctgtctcagtttcttctggttcaatgtcagatgaatggacattggagtttgttgatttcagtggggagatgagacgagatgtgtggctcgccttcatcagtgaaattatttcagtttatagattcattcgtgaatatggtccaggtggtgatgatccagcaatacataatgtgtatggtgcgtacaaagggaagaaaagagctgttagtagtgcagcgaacagtattgcaaggctccagtctctgcagttcatacggagattatatgaagatccagctaagctagtgcagttctcttacctgtccaacgcaccatttggtgatgttgttcttcagaccctagcagtgaacttttggggtgggcctctgactacaaaagccagatctgcaaatcatagatcaactcagtggcatagatcttcagaggacccatctagcggtcgcacacatgtttacgacatagatggcagcgtgtacttgcgcaagtggatgacgtcccccagctggacatctagccactcagccaatttttggagaaattcttctgtcaagtatggtataatattgagtaaatctttagttgtagctgataaaaaccttgtagaaaaggcaatggttgactgtaaagagaagagcaaagtagttgaaaggacacaagcgacaatagttgctgctacaatcgaaggtattccaagtaacattgacctcttcaaggagcttatgcttccttttgcaatagtggctgaaaatttcaagaaactgcaacgctgggaaaatccacgttcaacattttgttttctactattggttcatactgttattttcaggactgaaagaacaaggccggttaggtagatcttttggtaaagtgacgattagggatcaatcaccttcaaacacaattcagaagatcctagcccttaaagaggcaatggcctcagtggaaaattatctccagaatctgaatgtctccctgctgaagatccgcacgatccttctagctggccaacctgaggtgacaacacaggtcgcgtttgttctcctagcatcctcagccgtccttcttgtgtttcctttcaaatatgttcttgcattctttacatgtgatcttttcacaagggagctagaattccggagggaaacggtgagagccttcatgaacttcgtgaaggaacggtgggaatcaatacatgctgcccctgtggtcgtgttgccatatgaaggcgctgaaagcagccccaagacactcccggcagaagtttcggggcaagcagaaccccagaatgtccaacgtgggagcggttatgtctcctcaaagaatggcatcagcagttgatccgtgcagctttgagggcatcttgctgtaaacttgtgtacagttaaacttgtatagattactcgagagggcagattaggtatagatcgtaccaattggtggattttgcagagtaatgttccatttacgtcgtagtgaagataactagcgtagacgagaacttaggagagaattttgggtccaattcgctgtcttggatcgttggtctggcagttagggatgtcaagtaagaattttgggtccaattcacggtcttggatcgttggtctgacagttaggaatgtcaagttgacagatgcatgtattcataatccgtttggaacgctgcaggatcggggaatatatatcagcggatgtgcctagacagacaagtgatctgggacgtggtttcagttcaggctgcagagaaagctaatgagatatcctgcacctagaaacctgcttaagtgcgttgatggcatcctgtccgtgtacagcgaacggccgttgattcccaaaggacagcagcaaacacattcggggtctcgcatatgaccgctcagcatggcactaggaggactgattggcacggcacggtaagaacatggcacgacaaatgtgcctcttagccgtgtcatgccagtaccggccctaagcattacatatgtaaaccctaaaatataattttaagaagtttaggtagctcttttgttctttgacaattaatattagagtttatattagtatgtgttttattattgagacatgttcc

SEQ ID NO: 26031 - DNA, 936 bp, Zea Mays
ctgtttcaaacccattgccatccatagactgggctttggattcctagcaattccgttcccccctgcatccgcgcccgcctgctcctcgtcctccctccacccgtctcctattcccttcctcccgccgcagcagcgagagcagagagcagagcggaacgagcaaatcttggggggggggggggggtgtcgcacccgctctccccgtgctgctggtggattcgttcaaggcgggggccgcctgcctgcccgcccgcttttccgtaccctggtccccggttgggttgggttggatttggttgcgaggtgttgttgggggtgggcgctcgggtggcggagtggttacttccccgcttggcctcttgctgcgccccgctgggccgtgtcgtgccattaaagccggcgcctttggtttctctctccacctctctctatccgcccccgccccggctctctctctagctgcagattggtgcctcacccctagcggtcggtggttggggccgggttccgacggctgctcgggagctcgactggggcttggaagtccaaagccgccgcctcctcgtggcgcgccgctccggaattcttgccttcttgggctccgaatctcgccgcccggtgtttgatttgcggcgttcctagcgaattcggggctgatttgcccccctatggcgaggatttgagtggactcgagaggaacaagtagaggggagtcctgatttgggcccctgccgtggtatgtgccatgaggaagctcttcttctccgagtcggcctgcaaggagaccaagctccactgcgcgccccactcatggctgcccctcgagagggggaagctctccaagttctccggccatgccgccgccggctcctccatgtaccaatattgatttggctatgcaaaattggcggattgagatgttcatcctcttttgtc

SEQ ID NO: 26032 - DNA, 3640 bp, Zea Mays
cctcccgcaatgccgcccccttccgcttccgccatcgccacccgcttcgcaacccactggatagctgacgccctcgccgacgacgagtccttcgacttctccgtgctccagggtgaggctccaaaccctaaactcctccgccgttcgcctgaacgctttcggtctctcacctggcccctcgcgggcgccccggaggccacgcgcgagcgggtcgcgctccggtgcctccaggaggcgtcatccgtgatagccgctgggggtgatgccgcggccacggcgggcgtgcttagggttgatggcgcccggtcatgcgaggatgtgctgttgcggcttatcagagaggttgggagttccagagaattggagaaggatttgcttccacctttcagtcaagacatccaggaaactatatgtaccaagaaatctacactaccagaaacttctttccagttgctaaaaggacttgagccatggatcacatctatgaccccacaatcccaaatggagcacaatgacactgaacaatgtgacattgatcagtccctgcgcagcagccatggatgtgtaaatatagagaagcctatgttccctacagacaatgctgaggttcagcaagagactatggcagatgtagtcaatggaagtgaaacgggaaatgtccaaaaggatccacctgcaccaacttctgtttttcaccaaccgtgtatgcacgaaagcaggtcttacatccctccgcaagaagatactatagatgttgttggtctaggcgataggtccttagaaaggagtcctattgtggaggggaacatgtccattggatctgtgcttgcttcagctggctgtgatgcacctttgcagggaagaattactgagcccttttcccagcaggataaacatgatcatactgctacagttgaaccaaaatcttgtaggcaaaaatctccaaatctatctcactgtgccgatggagagggggcagatgatggtggctccagcaatcagtcatctaaggtttccattcatgaaggaccgagtgctcatgccccagtaacttcaggttttgacagaatcagcggtgtcttatcaacagatgcatctgaacctgagcatttgtctgagtgcataccagcacaggatacatccatgatttcacagcttgacagcaggaaagctcatctgagtgctctgcaacaggaaagggttgagaaagtaaaccaaggtccggaagatatctctgcaaatattgggccagtggaaaaggaacatgttcatggggatctgactttgcaatctgctagtgttttactttctattagctgcaatggttctaatcaaggaactaaatctgaaaccaatcttcaaccagggactgctacagaggataggatggcttttgaagagcagaatgcggagaagtctcacttagaactcagtggtaccaacaaggctaatcaagctctgttcgatgatggcagcgtcatgaaaaataatacggttcatggtgggctgactgcgcatactgctccagtgtctcaaagctgcagtgtaaccttacatgataaaacttcagaagccaattgtttttctgagtggaaaaatgaaaagaacggtcaaaaagataattgccatacttctattccaggctcttctcaggatgggggtggagaaagtgcaaagaagacatcaaatgaggtaaactctggggacacttcttcaaaaatatgtgtccattctaaggataaagacattaatgatactcttgagggcttgtctcaacaagatttgtgtataaaatgtggtaaagttggtcagttgcttgaatgcagcagttgttctttagctgctcataatagctgttttggttcatcggtgacatttgaagagaccaacttattctactgcccagtatgcttctataagagagccaccgaagcatataaaaaggcaaagaaaacatatggggaagctaggaagaacgttgctgctttccttggcacaatacaggtcaccaagcaacataatgaacaactaaatggagttcaaccaggaggtgccaacagagaggatcattctgacacatcaaaaaggactcatgaaaatgaagtatataatcttgctcatcaggatgaagagcctcatcagcagatgaagaagcagaaaataaatgctataggtattgattatcgtaaggaggtactcactgagaaggttcctttccagaactctggtcctgcatccattaataaacattcagtgctccagaataacggtaaaacacgagttaaggatccagagaaaaagcagcaagcgggagacgaagaagctcgcaaagaagctggtaatgaaaaatctcatgaaacaggagcttcatctcagagaagatgtgatcctccttcgaatcatgacgttgaggctgaccaggaaggtagtcttacaacttctatccaatctagtggttctgatgaattagaagctaaaggattgcaagagaagaaggcagctgtatcaagtaaatctagaaaaggtatttcaaagcgggatcaacatatgcctacttcaccaagaaaaagaaattctgtacacctgcaaaagcgctattccaatcctcttgcaccacctggaagacgcaaaaaactcttttggacagaagaagaagaagctgttttgaggggatggcaaaattcactccacagaataatgcgcaaattccatggattctgatactagaacatggccgtggtgtgtttcacaggacgcgcctgccatctgatttgagggtcaagtggaggagcatgcagaggaagaagtgggcaggctactgatcttacacgcccccgcgcacgtagctgttgtgtctcatgctaaattactaaccataccttcatttctctgtgtccatctgcagatctgatgccgttgacatggaacactgacgtggtacttgtacatagcgaatgtgcaagtaggaatggaggagggtttcttctaattacttttgcagcccttaatcctgtagcactgacgtggattggttgtgggattcggtgaacctaggcctcctctaatatgcacgtagatgatggtagagagattggtagattcaaacctacgcgaagaattgccaatagatgactttggctgcttcgttcgttcaaatcgcacatatatgttgctgccgtgactccataccgtgaagaagcttgcccaaagtctgcagttttctaaacccctggtcaaaaaaggcaccgataaaatcatatctccaagttgtcagttgactgcaaaacaaattagattttgtttggatactctagtattgacctcaatccatatatgttgagatccatgtatgttgaggtggattgggttgtaaattagtttaagttgtactccaatttacctcaacatatgtggatttgggtcaatactagagtatctaaactaagttaaggtgcatgtagagataaatacggatggaaaacctccttctgtttacgtttcttgactcggtgtaggtacatcctagtgactttaatagtagcctaaggctctatttgtttgagcttctcgtcatctttttagtgtaaaaagccagaagctaaaacaaagagtttatatagatgatgttatatagaaagct

SEQ ID NO: 26033 - DNA, 1389 bp, Zea Mays
ggtttgcctgttaattctgaatatagttttcatgtcagtcatcaaggagtgtaagggtgaaatcatgattttttagtgtagtatttgtatgtttgggtgttatgcatactttttgcagcctagttcaccacgacaaaccagccttattttatacttattattggttgctgtcatcttacatttcatttcatgtgtctacaactctgcatgatgaaattgggttgcttttgtattggtagcatagtttcccctgtagaatgatagatttgttttggtacctgatggatgagcatatatgctagtaaaagatgcacagacagcatgataataaggaccaatgtttggtgttgaggtaatccatgttgtagttatcctgtgcattgatatcttctatttctactcaagattgtagggctcagggctgcttgcctgctttttctctctaaaacttgttctgtgcatggagccatgcattaagctccagtttggtgttgtgttcagatgcttgccaagtctcgtgctcttttcatcaaggagtacaataacaagcttttcaattggttggcgacattctctttggtcatggtggtgatcgggcgctttgtcatcaagttcttcctacttgaaattgttgcttgggtgatgtttatcttcctagagacgtacacgagaatgttctggtcagcggaatcactgtattataatccagcttggcacatcattgtttcttcctgggagatgatcgtgtacagccctattcttgatctggacagatgggccatcccaattgtcataatgctatcattgggggttctttactggaggtgcttcggccgcagaaggaagcgggtaaagggttccctcctcccattgtacaagaattcttacaagaactcgagtcgcccgagatcagattagttatacgcaatgtttaagtttttcttttaaaggatggtacaaaacatctgcttatagaagaggctacactgcccgtgcttttggatgggcatgttttgatgctgccttgcctatggatctccaattgttttttggtggacgaagagagacagtgaagctgctagcgatggccgatggggcacctgcacaagcctccgttgtaattgtaattctacttctctgccttctgtagctaggctatccttacatgtcacggtctcaattctttgcttattgtttacatccactgcaatttttgcaaggattttgtttttatcgggtcatatacaatgtagttgttatttagagcgtgcaccgtgacattcatatgctcgaagtctggcggtggaatttggaaacgtgccttttttatactgctattatacagttaatgtactcatgctatccttttggccaggagctgtgtttttg

SEQ ID NO: 26034 - DNA, 1432 bp, Zea Mays
gtttaaatgtgtctgtgctgattacttttaagttagccagcacgtttttttcaacctgtattgccgtcttgttgataaatgataatttctggaaatactattgaagacggccaaatttcttcaggcttctaaaacatgtgaaacgaactttgaggataggtctttccatctattgtcaatatgtatatttattgactatgatgtgttgaaacattcagggaagggttatcccttgcgactttattggtgttgttaaaagtcagcagcctgtttacttgaaaggggaaactgtgagtaatcatgatgagcttatgtccaatttctttgcccaacctgatgctcttgcttatggaaagactcctgaacagttgcacagtgagaaagttccagaaaatcttatccctcataagacttttaagggcaaccggccatcactaagtttgcttctgcctacactatccgcatatgaggttggacagcttttatccatctatgagcaccggattgcagttcagggcttcatatggggaattaactcatttgaccagtggggagtggagctagggaagtcactcgcttctcaagtgaggaaacagctgcatggaacccggatggaaggaaagcctgttgagggttttaaccacagcacttcaagtttgcttgcacgatatcttgctccatccaccccgtatgatactaccgtgctgccgaaggtgtaattactcagttgtttttgacatgccaattgctgagttctgacttggcaaggttgagcataagtctttcttcatttgggagttatcacagagccagtttggcagtgctgtagttttggttttacctactctttgtagaagaaaagtgaagagtggatattatggaacaaaatatatacctacggcagcacgcagcatgatgaaacatatttaaaaaatttgggtgctctaccacatgcccgtggaataaaacggatgtaaactcagtgcacttataacaccctaattgtggttttgtttgtggttcaaacttctataccgaggcatcgatcgtgtaccactgtcccttgcgtcctattagcgccgtgtattctttcgtgccctgatctgctttgcaatgcacaaacgtatagggttttgttcatctgcacattctccgtgtggttgattgtcgatatgtacaggtacagcagcagctcgcaggctgccgttacagctttgcaggcaacagctgggattaagcagctcacagacgccaaagcaggacgttcacgcaatcaataacggcgcggcgagcatgagttgcaaaggtgcagcatcacatgcgtacacggtagcaactcagctgctgctgcttccggcctgctactggtgcggttcacgggactcatcgccgtcgttgccgatcgtagagggacggcccaccgcgccgctgt

SEQ ID NO: 26035 - DNA, 771 bp, Zea Mays
ttctcttaattttcaaaatatttaaactaacaaaacaaactaagatcatttcactaactgtaggtgctcatttgttatgctgttttggtacattcgatatgactgttggaccactgcattgggagttgcgacctattcgattgttaggcacttattggtttaagacttaagggttctgttctgatatagattggaatgtatggacatagctggctctttgatgttgtatatcgttttcttatatgtttgcagatgattttaatcagtttccaaagtattgacttattactaatcagtaccagttcaatgttggtttagattccctttttgctttagtgcatttaaattgtaaccactataccttcttgacttctatggatatggatactttttaaaaacttttttacatgtgatttttaaactctattctattgtttcttttaaaaagctaattgctcttgatatgggtgcattgattgctggtgccaaatatcgtggagagtttgaggatagacccaaggctgttctcaaagaagttacagattctgatgggcagaccattcttttcattgatgagattcacaaagttgttggagcagcgtccattgcaaggaagatctaccagaggcaagacattggtgtgggtggctttcggaagatttacagtggctgcacctcaagcgcttcggcaaggtggacagcgccaacaagtacgagaccttgctggagctgtacaatgcggagctcactgatcgtctagctgtacaatga

SEQ ID NO: 26036 - DNA, 3162 bp, Zea Mays
cagcccgcgtccatccaccgcccgtgggaaggcagagcagtgagcgtcgcaggcatcggctccagctccggctccgcccgccgccgcaccggcccaccctcctcccccgatccgatcgccgatcaccggccctcgcttagcctcgccacgcctcgcgacaatatttggaacccctgttaccgatcgcctcatgccgtaccactgaacgatcccaccccaacaccgtacccccgccgcctcctccgccgtgcccacagtcgcctccgcctttcgcctgctaccccgtagaggctctatatcccgatcggactagggtgcggacgatggctagcaacgccgaccagcatgctgccgttgtctcggctgccccgtccgatagcccggttggggcgaagaaggctggggcggcggccgccgtctggaaactccccgcggccgcggcggttcccgtcgcggaggtggttgaaaaccccatcatggacgcacactcctggccggcgctgcccgggctgtcgtctccgccgccgccgccgccgccgcatgcggggccaacagccaaagcgtcaccgaaggccgcttctccagctcccactggggcggcgacgtcgcccgtctctttgggcaatcctggcgcgccggatgctagccatggtaacgatgctcgggtgcgcaatcctgtggcccggcgtgccctggtgatgcctgcggcggatgggctggagaagagtgcccctgcaccggaaccgtcccctgtttatgtgcctaatgcccggagcaatggtgcagatcctcatcagaatggacgtcctggctcgcatcaccatggccgaggtggtggctatggtgggggaaacaggaggggtaatggtggaggtggggggcgtcgcgggagtgagcaccacggtggttttgatgggcaacggcgcggaggtggccgcagagatggccatggaccggttcatcagctgcgtggccatcagccaacatacattaaggctcctgttgtagcaggagcacctccaccgcctccaccatttgttagccccgctactcctcagacaccaccttatggaccacctatgggcttccatgacatgtcagcgcatgtttactatttcccggcacccacctcggaaggcattcaaggcctgccttttgtgcctcttccagcaagcccccaagctgttctaattgacccttctcgaaagaaccttctggagcagatagaatactatttcagcgatgacaatttgtgcaaggacctttacttgcggcaacacatggatgggcaaggttgggtgccattatccctgatcgctggctttcgccaagtccagaaaattactaataatattcagtttatcttggaaacagtcatgctatctaacattgtggaagtgcaggtaatgttttctttgtacaattattgttatatgatttctaatatgattccgtttggccaaaaaacatataggttattcactaaccatatatgtttccattaacattgcatattatttgtagaaaaatcatggttcagaccattctcattatcatctgttagtgtgagttcaccaattatttattattgattcaggtaagcgtagtttgttaagcagatatgcttactggttagacaatggcatagatattaggcgatgtttgattcaacaaatggcaatgacaatgcaaagggaatgaataccagtggtagtgggaagggaagctttgattgtttgttttgtttgattgagtatcggatgcctaaatcattccattgatctgttacacctcaaaattgagcgcaacctggtttctgaagcatgtggacacattgccctggcaccaagatacgtcgggcattaaacaaacacaagtggttgacagtggaatctgatcacgccaataaatggccgaaccaaacagcaccttagcttcttgttatagacctagagctcatttttatctgatatgatacctataaaccaacagagtctatatcattttattgcttgtgaaaacatactcttttcctagtatgaccatggaaaatttagtacgaaactgattcaacaaggatctactgagcttacaggtttttgttgttccttgagtgtatatattctttcagttttaggtaggcagcaggtgtgaccgccccacaaaatcatctttgtggctcatgtggactagctgcaatatttttgcgggtccgaccaccaagcccagtggagtccacctcggtcctccagataactctatccatctgtgcgtgagccacaaagaaatccgttttgccatctccatgacgaactgcaggcagtggcatgccgatcctgatgccaggcttcacatctgtggcacccgcaacttgtgatctcctttctcgaaagtgataccccagatcatgacattcagggagacaagctacggaggcgtggagcatgggagaattggttgcttccaaaactgaactattctgctgggagttcttctggttcgatgacccctgtgacatctaacattgatgctcttgcatctcagtttcgttctgttggacttgagggggcaacgtaccatccaagcatgcctgggatgtctggtgaagctctcctgacaagatcagcaacttcagttagtctaggttaccatgcatcaaccttcggtgggctacagagcaatgggagtgaacctctctttgggccgaagtctgcaagaaatctactcaggagcgataccttttgaggctatatattcaagagaagttaagtacaatggcaggccgagttttcacagtaacggcatgcacaccttatctcaggtgagatgtaaaaacagctgttaaataaaaccaaaaaaggcaaaagcataatacaaaaaaaaagcatacacaaagacaaaaaaatacaaaatgcaaaaacaaaaataaaaagagcataggcagcttttgtgctagtactcctgtcctttgtgttatgtggtatattacctagtaggtttgttttctaatgctaggagtttgatggctcttctgtgtgaaccgagttatttaagtgttatggatggtaccattgggaaactgttgagtggacgacgttatataaaagtacatgaaaacattgttaattatgctgctctctgctgatttgtgccgcatttctt

SEQ ID NO: 26037 - DNA, 309 bp, Zea Mays
ccgtcaacgagtcgggttgtttgggaatgcagccaaatcgggcggtaaactccgtccaaggctaaatacaggcgagagaccgatagcgaacaagtaccgcgagggaaagatgaaaaggactttgaaaagagagtcaaaagagtgcttgaaattacccgggaggaaagcggatgggggctggcgacgcgcacccggccgtatgcggaacggctcctgctggtcccgccgatcggctcgggggcgtggaccgttgtcgcccgcgccggcggccaaagcccgggggccctaggcgcccccggcagccgtcgt

SEQ ID NO: 26038 - DNA, 1033 bp, Zea Mays
caagaatatcaggtccctccatttggttctgtcgatctttgttgccaacagatgagattttggtgggatttcactttcaacatgatctgtacaggagcatactgaaagatgctggaacctcatcagacaataagttcacttctattgctcttagcaacttctttgctggtgctgctgccggatgtacaaccctggtcctcatctatccgctcgacattgctcacactcgtcttgcagctgatatcgggcgtacagacacccgccagttcagaggcatccgccacttcatccagaccatctacaagaaaaacggcatcagaggcatatacaggggattaccagcatcgctccacgggatggtcgttcaccggggcctgtactttggcggcttcgacactgccaaggatgtcctggtccctttggagtcccccctgtggcagcgctgggttgcagcccaggcagtgacatccatggcagggctcatctcgtacccactggacaccgtgcgccggaggatgatgatgcagtcagggatggaggtgcagatgtacagcagcacactcgactgctggaggaagatatacaggctggaggggatccggtcattctaccgtggtgcattgtctaacatgtttaggagcactggtgcagccgccatacttgttttgtatgacgaggtcaagaagttcatggacaggggtaggttgtaacagctatagaggggtttctttcacagaattttggattcgatatgggaagtgggattaggccaaaaggtgcaaggagcagcagctcgagcattttgtaactggatgctggtttcctcctgcttactaacctgctcgatgtaaccgagcctgaaggttctgactcgcgaacaatgcagcttgttcagttcacctcatctttacctcttcgaggttccacttatgggttgtttgttgcctgcacggaggggcctgcgccatagttaaacccataatcacgtacttcattcttttttttatttgtcttgttttagtttaaaaataaa

SEQ ID NO: 26039 - DNA, 934 bp, Zea Mays
tgagctcaagcctatggaaatccaagttagtgggttctcctttgtttgaagcgtgccttgagaatcgcaaatgctgctcaacagatggctagtgctacaagggggagcagtggatctgtaaccctatttattgaaattttgaacaagtacttgtacttctttgagaaaggaattccacaaatcacaaacactgtgattcaagatttgattgaattgattagaacggagaagcaaagtgataactctgtagctgatccatctacagaggcattcttttctagcactttgcggtacattgaatttcagaagcagaaaggtggaaccataggcgaaaaatatgaacaaataaagacaagttcatgactcggaacaaacacgtcacgatgactggttttgattttgttaagagaattggatcatttgtttgacatggttcagtgaaatagaaaccgccagttttagtagcatccaactaaaggatgtttacatgagctgttattctcaaatctcacggtctgagcgggtttgctcgcccattggcaacattttcaggtttagtcaggtggcaataagctgtcctttggtgagcacaggtctgtacaggattacttgtgttcgtgattggttctactgctacctgagtttcattgttgtatatttccgcccctcatacaaagcttatggattttagatttctgtaacatttggagtgcatgcctccatttctgagttctggctggacatttgatgattgtttcatagcatttgaacattttgtttaaccactactcggctatgtggcgtgttactcttcactcgttcttgctgagaacaatcacaagcactgaagcacgtgtgcccatttggccatttcaccttttggagtactttgagtcctgcttgaaccagtgatagattaccgatacacttacct

SEQ ID NO: 26040 - DNA, 1598 bp, Zea Mays
ctgcctatctggcttgctactgtcacttccatgtgggttgatgaccaggtttagtttagtttctttaaaatttctgaaataagtttccagttgaaggaataatccagataactgttaatagcatatgtaaaaacattcaagcacctctagaaaattcaggaaaaaattctggagatatattatgatttacacccaatttctctttctgaactcaaggtcattgatgaatcatgtgttggtagcaagcctaagaagaaagacaagtatgattgcctagttcggctctatggaacatgtcaatatttatatgtagacccttggaagtctaactcagaatttgaaatgatgctgaagcaagaaaacaagagcgcaatggaagcattccgtgaggtgcttgagaaggagctctctggcgttaacttgcgcagtgattatgaggatggttatgaagaggaagatgtcaactcaaaaggcggtgacaacaaagggacctcaaagaagacctcttctagaaaagccagaaaacaagaaggtctgaagcaacaatataatggagaggaagaccaaaatggtgggagcaatgcaactactggaggtgctcggaaaaaaaagggtgggcatgtaagacaatcaagtgctactcatgatgccattgataaaaattatagtggcagttcagctgaaggtttaaggaacaagagacagaagtctgctgctcaaagcgcttcggtaggcagaagggaagggttgaggcaacgatctgatgccaagcaacatccagatgcagccgagggcagtacagaaccactcgctgatgtacctggaagcgatggtgcagctcaaggttcaatgcaacatggaacttcggctcctcataccgaaataaaagcgatggtcaggaacatactgttcaaggacatcgttgacaaggagcacgatgctgagatggcttatgtggaagaagtgatcaatggcatctgtaacgctactgacagcatggtcggcggcggcggcgtggagggtgagtctagcaatgccacagaaaggcgaagagatgaagcaactgagaatgccctcgccgtgaaagggaatacccctgggaacaatggcgatgacgccggggcagcttagcgcacgccaaaataggcagaacaggatcatgcaaaccctagctctgatccctccatcaggatctccgtttggcaggaatgaagaggttgcagccagccgtcaaaaactctaattcacttatgagcgccctaagaaacagtccgtgagcccccctagcgttttgcagtcctgtcctctgcgcaccatgcctagtatcgctgctgccattcagcttgcttttgggagacgcctatatattgcgcctgatctgctgaattacgtagcagttgctattaatctatccagaagacttggactgagtttgattgctatgtaaccacgcggttggttctgtacttctacgcaactgtgcgacattggccaatgtggtgccgttgaaccttatgtattattgtgcacccccatcaccatgttattactagcccccttcggcatttcagttcagcattcagcagttttgcatgttc

SEQ ID NO: 26041 - DNA, 70 bp, Zea Mays
ggggaagaaaacgaggatggaaaccaccgacggggctcaacgctattttggtcgtttccatgcgtcttgg

SEQ ID NO: 26042 - DNA, 2540 bp, Zea Mays
acaaacaaaacgagctacagtggttagaggcgagtgctctcttcctaaagaccatggtttgaatcctgacagctgcacttttttttgatattttgctggcgcacggggaacgctcgctacacgcatggggagggggacgacacacgacgaaactcacattttatatcaaagtgaagagcttgcatgtgcatctagagaacaagctgattctgctaatggggtaggaaacagcgctcattcaggatcaagagggagtggtgctttactacctttttcctctacacataatgcgtcaacttatggggatgaatttgacacgaccataattacattcaacatggctgtcatcctatatcatcttcatgactatgaatctgcactatctgttttggacccactgtaccgaaacattgaaccaatggacgagccaactgctcttcatgtatgctttctattattggatattacattagctttgcaagatgcaacaaaggctgtggatatagtacagtacttggaaaggtcgtttggagtagctaacacaatgaacccgaatgaaaatgcaagcatagctcagcagcaattagctcaagcgaagcctcctgtgaaaattagcatgcctccagattccgattcaaatgcttatgctggtggatatgagaacctttcgtcaggaattttcccagatgagcaaatagaatttgaatctctatgctctagttttgatggacatcagaatgtgggcaggcgtatcttgaatgatttctcaagggcgtctgctgatcttgctgctactgctgctgatttgaaagttagacttcagatttacaagctggagtatgcccgggggaattataggaaggctgtgaagctattgagcacaccaaataatcggactgaaccagcaatgctagccattttccacaacaacatgggatgtatactccaccaacagagatcgtatcacgcctctatatggtgctttagcaaagcgctgaaatacagcttatcatttcgttcagagaaaccaatgaagttgtctacattatcacaagacaagtcttgccttatttcatacaactgtggtatccaacatttgatgtgtgggaagcctttgttagcagcttcttgttttcgtgaagccatgccgctcttctacaagcgaccccttttctggctccgtttttctgagtgcagcctgctagctctagaaaagggtctcctgtgtgcaaatggtgcttcctcattcaacgatgagattgaaatcaatgttgtggggtcaggacaatggaggcagttgattgtcaacccagtgaactcgagaagtaatttagattctgcaggtgtgactttaggcgaacataaaaatttggtttcacttggatttgctagacagtgtctacaaaatgcgctgctattattggatgctactgagaaggaaaattgggtaatcgcatctgatacagaggattgggaccaaggaaccgtacatggatataaaagctcaggccagaagaatactacaagtacagattctaaaacaccttcaggcccaactctagctaatgtaaatggagaacaaaagggcacaagcttgaatgctaccttgcagagttctcttgctttctatgacgagatccgtagaaaagagtacatcaaaatcagacaggctgtcctggcgaacttggcatttgttgaattgtgccttgataatcccttgaaaactttgacgtatgcaaagtcagtactgcaggtgacagactgttccaggatgtatgcgttcctcagccatgtatacgcagccgaagctctatgtactttgaacagaacagaggatgccgccgagaatctatcagtttatataagagatggtaatcatgtcgagttgccttatagtgtggagaattctgaaaaggccttggttgagaaagacagtgatggtgaagacttggttgctcctgcagtgacaaaactcgccacagaagaacctgagcagctcaggccggaggaggcccgtggtgtcctgtatatcaaccttggcatgattgctgcaaggcagggagaagttgaaaaagccaactacatggtgagccgtggcctggcgatgttgcccaacaacccccgggcagtgctagcatcggtttacgtagaccttttgcaagggaagtcccaggaagctgtcgtgaagttgagacggtgtaggaatgtgagatttagacccgctagcatagcagccagcagtcagcagtcgagcttagaaaagcctcccctttcatgatttctgtagtttacaattaccgttataatcttttttggaccctgaccccaatgtggatgatcaaagatggtaatgcttctcctgtgtaacatatataagaaatgaactctaactccccttctagctccctcccagattcaggggtggaatgtgttggaactgtaccgttttaatttgccctctttggactgaagagagccaagtgatcaaaatagtttcctatgtttattcaagaatttggaaaataatgtgcagtcagcag

SEQ ID NO: 26043 - DNA, 1033 bp, Zea Mays
gtcctagccactcacgaacgcgggccgagtcaccgcccgcccacctcctatccacttccccatctgccagccgtccgagtccgaccacctctcgtatcgattctccaagcgccgcgccgcgccgggcgaagaagctcgtctcgtctccatggcggccgcagcggtggccatctccacctccgtgtgcacgtcctcaaggcgtagcacgggctgtccgaacgtgaggccccaggcccgtccgctcctaggcatgccgtcgctgcgccggaggctgcagacggccttggccgcgacgggcaagacgccgggcgaggcggaggagcaggtccccgcgtgggccaagcccggcgcggacgagccgccaccctgggagcgcgagggcggggccgcgcgtggacaggaggcccggcaggtccccttctacgcgtacctgctcgcgtctacgatcaccgccatcgccgcgatcggctccatcttcgagtacaccaaccagcggccggtgttcgggatcgtcggccccgacagcgccctgtacgcgccgctcctgggcttcttcgtcttcaccggcgtttctgtggttcaaggccgtgcagacggcgaacagagaggccgaggagcaagaccgcagagacggattcctgtgagaggctgtgggtgactccggcgcactcgccggtgccgtcgccgtgcagaagaacgcgcaccgcaccaccgtggtgttcgcagcgacgggtgacgggtcatgtactcaagttatgtatgtcagtgtactgtattctagaattggagagagcagatggatttgcggcacaaatcagagaaaatatcataatcatcattcgtatgagtggaaaatatttgtatttatttggttgaaaatggtatagcgtttttttgcacttgaatagttagatagattgcttattgcttctagcatatttttggcactcgtgcgtattgctctttattttaactagaataggaagtgctctctcaggcgttctaccattcatgtaatataaatgaacacgac

SEQ ID NO: 26044 - DNA, 1287 bp, Zea Mays
tagctagctataggatccaacgtcgatcgatcgatcaatcgacatggacaggccaggccaccaccagcaccattttttcatgccgccgccgccgcagcagcagcagcagcagctttgcgtgccgatgatggacgacccgtcgtcgttcttggcggagctgatgggcgtcggcggcggaggcggaggtgggccgtcgtcgtccgcgaggggggagaggaagcggcggttcacggaggagcagatacggtcgctggagtccacgttccgcgcgcgccacggccacgccaagctggagccccgggagaaggcggaactggcgcgggagctgggcctgcagccgcggcaggtggccatctggttccagaacaagcgcgcccgctggcgctccaagcagctcgagcacgactacgccgtgctccgcgccaagttcgacgacctccacgcccgcgtcgagtccctcaggcgcgacaagctcgccctctccacgcagtttgtttcatgcggcgacatttcactgatatcttcatacgagaaggttgagaattgtgtatacacatctactattttgagaaaatgtgctagatggggttccatgacactaaatccttggaatcgatgttccaagtggaaattagcacatgccgagaggttcgctgctgatttctacgtagcggatgcaaaatcaggtaggagggccttggtgaaagctgggcaccactcaaaggtcgtgccgctgatcgacgagaacctcctggtgacaacaagcaggggcaccgagttatcttccactctagagcactggctcgaagaaaggaacctttcttccgaagaagcccagattatccgtctagaggaagggtatatcagagaagggatgcggttgagcgtggttggagtgctgagcaagaagaacggggatgccgtgatacttcctccgctggagcctcaatcgacgggctttgtgttgctgtcgtgtctcctcccgtcatatttcgacgggatagtgctgagactggccgccgtgccgaactcgggcgtctcatgaagagccgctatgggtaggggagctcggtgagatgtaacagctaacaacaactcttgtgcggtgcccttgcccccttgggatctttttcctgtacgggtccacctttttcttttttgtttgcttctgggactcgatcgtgtatgtggttttcttttcaggtaatcctaatgtacattctcactatatcatagttgtagtgcgaggcatttcagcgctcttgcctggctcccttctatctgaaa

SEQ ID NO: 26045 - DNA, 3472 bp, Zea Mays
gccaaccagaaaacacaccacacggtctccacttcagatccaatccacgctacctcgtcgacccgttagcccgtttgctacctctacactcccgtctccacctcgtttcccccgcaggcccgcactcgcaaatctcctccccgcgcggcgcgcctgcacctcccggtccggcgagaggccaccgcccgcgcggccgcgctcctcacactaccacccgccccctctacgcaaggcctagaagcgccgcctccacggctgcacctccgccagttgcgctcctcgcctcgccgctgcctccgtagccgtcgcgggcgccaccatgccgctccggttggatatcaagaggaagctcgcgcagaggtcggagagggtgaagtccgtggatctgcatccgacagagccatggattttgtcgagtctttactcaggaagcgtttgtgtatggaactaccagactcagacaatggtgaaatcatttgaagtcacggatttaccagttcgttcggctaaatttattgcacgtaagcaatgggttgttgctggtgccgacgatatgttcatccgtgtgtacaactataacacaatggacaaggtcaaggtttttgaagctcacactgattacattagatgtgtggctgttcatccaacccagccctttgtgatatcatcatccgatgacatgctgattaagctgtgggattgggataaaggctgggtgtgtactcaaatattcgaagggcattctcactatgtgatgcaagttacatttaacccaaaagataccaacacctttgctagtgcttccctggatcgcacaataaagatatggagtcttggttcccctgatccaaatttcacactagatggccattcgaaaggtgtgaactgtgttgattacttcactggtggtgaccgaccatacttaattactggctctgatgatcagactgcaaaggtttgggactaccaaacaaagagctgcgttcaaacacttgaaggacatgcacataatgtttctgctgtatgtttccacccagagctacctataataattactggttcagaggatgggacagttcgaatgtggcattctactacctacaggctcgagaacactcttaactatggccttgagcgagtttgggctttagggtatatgaaagggtcaagaagggttgtgattggatacgatgaagggacaataatgataaaaattggtcgtgaagttcctgttgctagcatggatagcagtggaaaaattatatgggcaaagcataatgaaatccaaactgttaatatcaagagtgttggtgcagacaatgagatcgcagatggtgatcggttaccgttggccgtgaaggagttgggaagctgtgacctttatccacaaagtttaaggcacaatccgaatgggagatttgtagttgtatgtggagatggagaatacataatatacacagccttagcatggagaaacagatcatttgggtctgcacttgaatttgtttggtcaactgatggagaatatgccatcagagaaagcacctcgaggataaagatatacagtaaaaatttccaggagaagaaaagtataaggccatccttttccgctgaacggatatttggtggagtgttacttgctatgtgtacaaatgacttcatttgcttctatgattgggcagaatgcagattgatacgtcgaatcgatgtcaatgtgaagaatctttactgggctgacagtggtgatttagtaacaattgcaagtgatacgtcattctacattttgaaatataatagggatgtagtttcatctcatttggatagagggggttcagctggtgaggaaggtgtggaagatgcctttgaactgcttcatgagatcaacgaacgtgtccggactgggctatgggttggcgattgtttcatctacaataattcttcatggcgtcttaattactgtgtaggaggagaggtcacaactttgtttcacttggatcggccaatgtatttattaggatatcttgcaaaccaaagccgtgtctatcttattgataagcaatttaatgttgtggggtatactttactccttagtttgatcgaatataaaacacttgtaatgcgtggggatttcgatcgcgcgaatgatgttttatcatctataccaaaggaacaatatgacagtgtggcgcgtttcttggaatcacggggaatgttggaggaagccctcgagatagcaactgacactaattacagatttgacctggctgtgcaacttggtcgacttgaaattgcgaaggcgattgctaccgaggtgcaaagtgagtccaagtggaagatattaggggagttagctatgtcaagtggaaagcttgagatggcagaggagtgtcttctacatgctatggacctcagtggtttgttgcttttgtattcttcccttggggatgctgaaggcattaacaaattggcatctgtagccaaagaacaaggaaagaacaatgttgctttcctttgtttcttcatgctaggaaagctggaagagtgtcttcaattgctaatagaaagcaatcgtattccggaagcagcattgatggcaagatcttatcttcccagcaaagtccctgagattgtagcattgtggaaaaaggatctccagaaggtaaactcaaaagcagcagagtcgctggctgatcctaatgagtacccaaacttatttgaagactggcagattgctctcaacgtagaagctgctgttgcctctaaaaggagtatctatccatcggccgaggagtacatgattcatgctgaaaggtcaaatgagagtttagtggaagcttttaaaaatatgcatgtacatgaagagatggtaccagatgataatgaagatactgttcacgaggttattgaggatggtggagtagagagtcaagaagatgctgttgaggtcgatgcagaggatgacggagtagaagaaagtcaagatgaagctgttgaggttgaggctgagggttcaagtgatggtgctgtccttgtgaatggaaacagtagcgaggaacagtgggtgctgactgagcaatagtggattaacggatcagcaacttcgcttcagcggtgtagtttgtaaaggaaattttgtgcttccctttctacatgtagatcaggccttaggcgtcgaagacattttatagcctaccatgaggtactcgtttcacggagatggtatatgatataggtgatcggagtgatattttacatggtgcatatagtagcttgtcgaactgagaatgttttacctgtgatgtacatcggacttgggagctttgtatcattgtgttacaccttttcaatggtggcgaataaatttacagcagatgttttcaatagccttttagtaaatgtgtgaacgatttgcgttgtgctatgttttgttgctgacttgctgtgatggctagtctacttctatacttgactc

SEQ ID NO: 26046 - DNA, 656 bp, Zea Mays
cgcccaacagaatcttggcggccagccagccatatatggatgtactgctaggttccgggaggttcttggcgcgacggcctcccctcgcgctcgtccctcgctgctctcgaggctccccggacaaaagcggcagcgacaaaggtgaaacctcagctgactgggacaaggcatggtctgccttcaagaagaaagggaagaggaccctgttttctgatttctcaccggacaagtacgtgatctggaacccacggcgcagcgagtatccattgtcagaagaggtcgatccaatcaagagaagtgaaagatctaacttgatgctgtggacaagcccccagttcaccttggtcggggcgattatcatcgtcttgacattgctaatctatacactagttgttcctcctcccaagtaactgcagaggtgacaactactaggggggtgagctgtaaactagtagtatttcaactggggagtctgtattgtacatttttacgtgtactatggcaactatagcagtattaattcaattgcgatcatgtagatacaacaccactgtccattccattctggaggttttcttcaattgtgtgctaaatggctgctgtctgagtcttatattcacttattataatgaagaaatatttggggtcaggtagaa

SEQ ID NO: 26047 - DNA, 965 bp, Zea Mays
atggttggaggccgtcccctcttcgtgctcttcggctcctccatcgtgcagtacagcttcagcaacggcggatggggcgctgtgcttgccgacatctacgcccgcaaggctgatatcctgctaagaggatatactggctggaacacaaggcgggctgttcaagtcatggataaagtgttccctaaggattcagcagtgcagccgtctctggtgatagtttactttggtgggaacgactccatcgctgcccattcctccggcctcgggcctcatgtgccgctagacgagtacatagccaacatgagaaagatcgcggagcacctcaagagcctctccgagaagacgcgggtcattttcctgagctgcccgcctctgaacgaggagatgcttcggaagtcaaccagtagcatagccatactgagtgagatcgtccggaccaacgagacctgccgcctgtactccgacgcctgcgtggctctgtgcaaggagatggagctcaaggtggtggatctctggcatgccatgcagaagagggaggactggatgactgcatgcttcacggatgggctgcatctgtctgaagaggggagcaacgtggtggtggaagagatcctcaaggtgctcaaggaggcggagtgggagccgtgcctgcactggaaggcgatgcccacggagttcgccgaggactcccccttcgacctcgtctcctccagcggcgacgccaccgtcaacccgtcggagtggacagtccacaggagaataccatgggactgactgaccttgtttctggccttatccctgggttggctccatgtctggactggaccaggatgcgtttgttctctgttgtgccttgatggaactggaatggctgggcgttgaagggactgtgtcataccaccatcttatctatttcatcagactatgagtttatcttctactgatgaagtctcagcggatatttt

SEQ ID NO: 26048 - DNA, 4414 bp, Zea Mays
ctcctctctctcctcagccccagtcgaggagacgccgctgcggctctcgtcccatgttccaatgattgttaggtgattgagacttgagagggtctggaggctaccaactggtttggtggctcggccaagccgagcggttccacgctgttcttgccgcctggtgccggagtttctatgtcgaaggctgtgttcggagtttctgcgttgaaggcggtgttctgctgattggagaaactggtttggtgcggatgtttgatgccgtgttggttatagggaccgggagggtgggtgctggcatgaatttggttttctgtcgattcaattggtgcttaatttgagcctttggaggctttttgggatcagggagttggtctccgtcgaaggaggctgctagcttgcaggctcatcgccattggcgccggacctgcctgtcgtacggtctttcctgtgccgaagtttttgctgctgtgaaaacgctttaagcgattacctttggcgacctttccatgcaaaggcttgaccttttgggttccggaactgattggtggtcgaggagtcttggagtgctggtctacctgcattatcaacagggcatttctgcagaacaaaagttgtatcctgtgcagatagccagatactgctttgctagtgtattaaattgcttcttgtgtttgaacaaagattctattcagccagaagacagtgctcttctttatatcctgtccggagctcaatacagtgctccaaatccatatcagcctgctaggagtggataaggatctttgcctcaacgagtggagcaaaaccatggatgtgcctacgcctcccaaccgtgccggctgcaacagtaacatcagcaacatcggcagccccatgcaatcttttgatgatccctttggtggtgctgccatgacgagctttgatggatactcggagctcagcagcccatcagttgctgatcacatattctccctgctgaatgatccctcgtctgtgcaacatatgtttgccttgtggtcatcttcggggtcatctccgcgtgcttctgctgtgagagaagacatgtcgtttgacacctatcctggacctatggacgtgacagcatcacttgctcaaaggatcaactcagcatcagtattcaatccaactgaagtggacagaggactaaaagactcagatgggcttgttccaaataatggttcacaacaagggagtagcatcattccgaggtcggttggcaacattcttgcagacaggatgctcatggcgctatctttgttcaggaagtcattgagcgatggtgttcttgcccaagtctggatgcctgttgagcacaatggtcgtgtcgtgttgagtacatccgagcagccctatttacttgaccaggatcttgcaggttacagagaagtttctagaaatttcttgttttcagttaaggaggagcctggtctgcacctagggcttccagggagggtcttcatatctggggtgccagagtggacctcaagtgttacgtattacagtaagccagagtatttgagaatggagcatgctcttcttcatgaaatacgagggtcacttgctatgccagtttatgatcccagcaagggttcttgttgtgcagttcttgaacttgtcacaaacaaggagaaacctgattttgatgcagagatggacattggtgtgaacttgcagacaacaacagatcgcagcaatcagaaggtttactctgaaaatcagaaatatgcttctacagagattttggatgttctaagagctatttgccatgcacatatgcttcctttggcccttacatggatccctacatcaaacggcaccgctaatggtttttgtgtcgcaaagaatatcaggcttgattcgcaaccaggaaaatcagtacttcgtatccatgaatcagcttgttatgttaacgatgcaaagatgcagggatttcttcatgcatgtgctgaacgtcatcttgagaaagggcagggtattgcaggccgagcccttaaatctaatcttccattcttttcgcctgatataagagagtacagtatcgaagactacccgcttgcacaccatgctcgtaagtttggtctgcatgctgctgtagccatccgactgaggagtacgtacactggtaaggatgactacatactagaattctttctcccagtcaactgcaagggctgtggagagcagcagatgttattaaacagcctttccagcacaatgcaaagaatatgcaaaagcttgcgaacagtttctgaagcagagaccgatagtgttagtgctactgaaccaatgtatgagaagactaatggaagttgtttaccaactggtaactctgaaagttcctcacatgatgaccagccaatcacagaatctgcattccatgatctatcttcgggtgacaaacaaggagacagagaacctgctaaggcacggagtagctcaaagcgagttgcagagaaaaaacgcagtacatctgaaaagaattttagtctggatgttcttcgcaaatacttttctgggagcctcagggatgctgcaatgagccttggcgtttgtccaacaactttgaaacgaatatgcagacaacatggaatttccagatggccatctcgaaagataaacaaggtcaaccgttcactgaagaagatcgagaaggtcatcaaatcggttcatggtgtggacagatccttgcagtacgatcctgccactggatctcttgttccagcaacctcccttccggataagatgcctacctcatctgcgggcgtaaaaacagtggaggaaaaatctagcccagaaccaggacaggatttctcttcgcctgatggatggcaaagagaaagtagccaacttcatgcctccagtatacctacaagggtaggtgatgaagtccaaatgctggcaatcaacaacgaaggcagcaggaactatgcttctggtatcgcaaatatcgcgcagcattcaaactccgaagacgcacacggtcctttatatcccgtcggtgctgttaattcttcgcgtaccggagaaacaggctacatcgattctccaacctccctccacatggatagcgtcgaaggccaaacaacggtgagggactcaagatctgtacagcaagcagatgtcaccatggccaccaaggagcagacccttccctccacctctggcacaaccgattcttcgagcggcagcgcctcaagtcagcctgctttcaaggggaacccaggacgtgccctcaaagttagcagcagcgatgcactgacggtgaaagctacctgtaacggcgacaccgtgcggttcaagttcctgccggcaatgggctggtaccacctgctggaagaggtagcgaagaggtttaagctggcgacaggagcgttccagctcaaatacaaggacgacgaggacgagtgggtgatcctggcgaacgacgccgacctccaggagtgcgtggacgtcctggactcgatcggctcgcgcagcgtgaagctgcaggtgcgcgacctcccctgcctcgtcagcagctcgggcagcagcagctgctgcttgcaggtggaaggaagcgcctagctcatgacggcaggacggaagcctgggtcatggcacgttgactgttgtagtaggttttagccttctgctgtcgccgtaatggatccatgtctacgctcaatacaaaatggcgagtgcagaaaaggagaagtgtaatactcgtcgcacggctgaaacaatgccgtgaaggccttgccataatctgttgtttgttcacaaaagtcgtggcaataatctgttgccatgaatatgggaggttttaagacgcgacaccaagtttctgagcttgctgtgttccgaattttcagaatctagttctctccggatcccgtcggtctgtatgatcggcgatttgcggctatgatatagcctgcagcgtttacagaaccatgtggacgtgatgcagtttggagtcggtttcgagaaatcttttctccgatatcctacgactacgagtgacagcctgacgttttggctttgagtgcggggagtggaggttggtttccagtcgtgtcgcggcgcctgggcgtgccgttgaaggcgtggtgcagctcgtgagtctggacgggatagctactatttgtattcagactgatcagaagccgtccaacttggaagaattacagttcgcagaaagtttccgcggtagggaacggctgcactgccaattcgcgtgaaactggggaactttgtactatggtggaggacctggaggtagtttaatcgtggtagagaactcgacggctcgaggagctggagtggcttacagtgtaattcttgtctgttgtctcactggccatggcgcttgtgcagcttactctgtctccagtagatcgtacacatggtcgtg

SEQ ID NO: 26049 - DNA, 2743 bp, Zea Mays
cgccagctccgcgcgtccgccgcagtgatgccgcgcgatgaaggccgcacgggagagacgctgggaaagccgctccttccggcgttgcagtgggggcgtccacagctgtgccatgcccccgccccgtccgagacgccgaccacgacccaggattctcgcttcccgtccacgtccgtgattttcccagcgaagctgaccacgcctccctgtacgcacctcccgacatcctcgccgacatgctcgcactcctgtccccgtctgagatcctcgcgtcggcgccttcggtggaagtccggaatcgcccggctctcctccaccgcgccgccagcctcactgagaagagttcatctgcctcctcctcaacgcttgaccccaccgccgctggatccaacaccctgccctcgtccttcttctccgacctactcaccagtgacgacgtgggcaccctggccagacgcacgccatggacagcaggtgggcaggaacaccttctacgtggatcctcttctcccgtgctcctcgacgcacgagagcgagctcggactggatcctctcctaccgctccatgcagatactgggtaacaggaatgcatgtttatgattttcgttttgaccttgcattgcatctacaatgaccagaggatgcagtctatggatccagttaatgtgtatggaaatccaatggaaggtgacatgattacaacagggacacctcttgttgtcccaccacttattgacatgattagcaatgacccaatttttgcccattgctgaagatgggatgcaggaggcctctatcaagtaggtcaattacctcattaacagggacacctcttgttgccccaccacttattgatatgattagcaatgacccaattttttgctcattgctgaagcatgggatgcaggaggcctctatcaagtaggtcaatttcctcactagaatgtttggttagagtggaatgtaaaggtctggacactctatgaattcgatgatctcgagagcatcattgataggacactaaagcgcgattttgacaccgaggaagcactctggttgcttaagataggtcttgtgtgcatcccggatagccctaagatcaagccctccatgtcaatggttgccaagatgctgcaaggtgagtgtgctgtgagtgacaggatcatgaggcctggcctgatcacagacgtcatggacctgaaagtcaggatggtagagccgatttagttcagcttgacatcatgctcgagcactgccgcaccggaccttgttggggatttcctcgattaaaatataagctccttgatatggttctgtaacatagttctgcaatgctcctttatttagttctttactttttttgttaagatatgaggtgtagcgatacaatatgtctactaacagcgtttgtgttcttgatagttcatttaggattgaatgaagttactggtatgaccttgtcgagactgaagtaaggagggatagagctaaaaactctcttggcacaactataaagttcaagctatatgggcgtgtttggatggcagcctcccatgcaactgcctggcaggcaaatgatcctagccacaccacaggcataggaaatcgaacggtcggcattgtttcctgggccagctgataaaatccattgaagtgcaagaggccgataaacttaggcgtatagtgctggatgctccatccactggacatacacttaagcttctgtcagtttctgattggattgaaatgttccttactttgagcattaaggcaatgcaagtgcagtctggcacaatcctggtggtttggcattgagttatgttttcttttacttgataaaacaatcttgttccatcacttagtcaatagctcaatatgtccaccagttctgatgatccatgtctgcgcagtgtttcttttcacagtttgcgcttgcgaacatccgaaccccgttttcatcttgaattcaacttatgatgtatatcggacagttccaccacattctggcgccgccttcgtctgatcctggaggcaattggagccgctgcaagtcggatcctggtggatgcagcgcaacacagatcgcaaccctccaaggactgagaagtggaatgttgacatctctgagacagtctgaaagcaaaccgaaggcaggggtgttcatcaactcctgcttcgcgcattgctagagtgagctacaggacacatggttcgcaccaaattctccatccatatataacaagaaaattgcagaggtggtaggtgattggtactttgaaagaggagctgacgtggagattgactgcgcctatccctgtgattcacagtcttgtcgcaaccttataccaattgataaggaactgaggatgtattaggagttcggcagacgattatactcaattatcatcataataaaaaacactcttctaattgttgatgatgttatgttacttgcatcagatagcaaaccaccctattgtacaatctgttggtggaaacatgtttgtgttgtgtgttccaggttgtctgtttcttggtagccttttttggctgaattggtgatatacacaaaatctatttacttgttagactatactttgtattgcacccctgatatccaggccattgcttgtgttttctatgattcgttttaactgaagttttcacgctgtgaaaattttctaccgtacagtggttaaaatttctcaccacgcactggaatgtgtttcattatggtttttg

SEQ ID NO: 26050 - DNA, 421 bp, Zea Mays
gaaccggctctgacaataggccccaccctcacggcctaacctttctctttctctctctacctcctcgcgcgccctcgtcagaccagccacgcgctcaactccacgggccttgagctagggttttcttcgccgctacctccctacgaggcgggcgtgcagccatggcgctggtgcaggcgggcatgggccttacccgggtcgttatcctcgtcggcgccggcgttgccggctccgtcgtcctccgcaacggccgcctcgccgagatcctcggcgagctccaggagatactcgacaaggggaagaaggtgaaggatggaggagggggagacggggaaaccgatctcaacgaggctcttacctcgcagattccaggccatcccaccagttctgccacccaaatccatctcttcaccaccatccg

SEQ ID NO: 26051 - DNA, 1225 bp, Zea Mays
atggccatggcctatgaacgaggcgacggcgtcgtcgaacatctcctcgacgcccttgaattccgccagccccagcgcgcgggccttggacgtgtcgaagccgtacgactgctcgccgtaggcgcggggcaggctcctcgggacggggtacgctgggaaccgccgcgcgagcagggcggcgaggtcgccgcagtccagcaccgccgcgctgcagatgtacctccctcgggcgcccgcggcctcgtacgccagcatgtggcacctcgccacgtcgtcgatgtggacgtaccccatcctcccgtacgtcgtgaacttccccgtctctccttggaacaggccgaggacatcagaagcggtggggccgagctcaggagacagagtaggtccgacaacgaaggtcggaagaacggtgacgaggtcgatcctgtgctctccggcgaactcccaggctgccttctcggcgaggatctttgcgacggcgtaccatatctaagggagcacgggaacagcacattgtcacgcaggtacggtccaaatcactcttctgacgaccgtacgctcacctggagactttcgcagaactcgatggagctccacgacgattcgtccagcagcacgttagggggcaggtcggcttcgtccttgatcctcactgtcgacgacgaggatgtcaggacaaccctcttgagcgatgggttcttcttgcacgagcgtagcacgttcatcgtgccgtttattgctgaatcaagcatctcctcctgccaagtggcaccaacatgtttcaggtcgctatatgtccaggcctttcctgaagctgcaaatatgagaaacagaattggtgtttagcatgccttggaattagatccggtgacgacgggcgatgcggtgtggaagacgccctcgcaagccatcacagcgtcgtcgaagctcccttcctccaagagatcagctctcacgagctgcagcctttcctttgcgccttccaggccccagaggacatggtacccagactcaagaagccgcttgacgagccaggaggcgatgaaaccagacgccccagtgacacagaccttacccttagcagtgttagccattctctcagactcgaggtgctcctgtatttgatcccagctagtttatattgtgcacattgaagtacccagtatggctagtgtgtcacccctttttggtgactcggttgggcaggtggagagttggcttggtc

SEQ ID NO: 26052 - DNA, 915 bp, Zea Mays
tttcatcgtccgtgactatgtggaccgctgctcgtctctccctcagaccctcacgacatctgctctcccacgcgtcctgctcacacaggatatcactccctcagttatttcttcctctaatatctcacgagcttggctcgcctcgcctctctgctctctccttgtcctcctgttgccgtgctgcaaaactatagcacgccggagcaatggacgggctcaactacagcaagttgcgctcctcgctccggcctcggctccaagcgttctccggcgtcctcttctccagtttgcgctccctagacgggctcctgcacatggcgtctgtcgccgtcttgcagtttgtccacgatccgcacgatgatccaccagtgctaggctgcgtacacttgactctagctcgcgtatatgccttggatcgagctcgctctctttctctcgtcaaggaccacttcacaaccttgggaaaagacctcaccgtcattgggtactgctgcgatgatgctgaaccccgtcgtcgacaactccagttctacgtcgccgagtccatgtttcgggtagcaggtgcgctagttgagcacttgatgcgaagggccagagctgagtcaaccacaagatgatgttaagcatgggcttcttcgcaaggtgatgctgatggatgaacataaggatggatgacttgaacgagtaccaagacaaagtatgatcgtcaagtggtcatctgctaacaacactaacgtagtttttatcccaagcaagccccggtgtatttgccacctccttctgttttaaaaagttttatcaccttgaatgatgcatgcattaggtgataggagttgtgtgatcaaacagttgatgcatttccatccttgattaaaaaaccctaatacctgttttatgaaaatttaaaaaagaaaa

SEQ ID NO: 26053 - DNA, 2383 bp, Zea Mays
aaaatagaaatcctttcaaaaaaaaaaaaaaaactggtttcccaaccagcgaaagggtggaggcggaagccacaaaccaaaccctcctgcgtcttccctcctgcttcgtgcttcttccactcccccttctcttctgcggcgccaagctcgagctcatcgccacggaggttagctcgatcttgggttttggtctatccgcgacgaaggtgaattagttggagactgcgtgatgtctggtgcgaaagcgggtgtagacgtggaaacaagggacggcggtgccggtggctccttcagtgaggagaggctcgttgataagctcaacaagctcaacaacacagcggcgagcattcagacactttcacaatggtgcatttttcaccgcaagagggccagaagggttgtagacacatgggaaaagcagttcagtagtgcaacaaaggataagaaaatatcattcctgtttctatcaaatgatatcttgcaaaacagcaagcgcaaaggaggtgattatgtgcatgagttctggagggttctacccagatcattgaaacatgtctacgaaaatgggggagaagatggaaagaaactggtggctagactaataggaatttgggatgaacgcaaagttttcggaacccgtattgaaagtctgaaatacagcatttttggtgacaaccctcctatattcgataacaatgggaataaaaataattcaaaccctggctctaaccccttaaattccaaagttgcaaggaaggattccagtacagtactaaaaaaactgactgttggtggtatgcctgaaaagattgtgactgcataccaatctgtgcttgatcaacattttgatgaagacacagttttgaacaaatgtaagagtactgttagtgttctggaaaagataaagaaagatatagaagatgctagtaccaaaggtgatcagcctgcctcaacaatgatttctgacctcccagaacaggaaacaatcctgaagcagtgcattgcacaacttgaaagcgtatatgtggtgaggatattgctgataaatcaattaaaagaagctctcgtcgaacaggagtcaaagtcagaagttcttcgcagccagttgcaagtcgctcgttcagaggctgaacatgccattcaacttaggcaacgatttgatggtgccgttgtctcaaatggcacaggatctaattctagcctgctaatgattaccccaacagaacagacagctgctatgatacagggttctggagtaaggctgacgtctcctcagttgcaatcactgaatccagcaacctcgcttgcccctacagtcagtgcagtgggagatgagccgaagagaacggcagcagcaatggcagacaagctgacatctttgtcggcacctgtgcaggttctgagctccattttctcatcttttgttgccgagcatggcgcctcgctatcttccaagaacagtggaccggcttctggagaactctccggggaaccgccgggcttccagattgaaaagaggcctaggcttgagaaaaccgtgcaggccagtgacatgggtgctcctccctttcctgtgcaagtaccgcagctgcaacaacagactggagcagcgcccacacagctaccaacacagatcaaccaagcaccgggtccatttgcaccgccactgccgtctcttttgccaccgtttctgcaacagttcggccaaagtactggaggaatgatgggagtgggacctttcgggatgatgtccggctctatgccacctccgcctccattgcccaacattatgccggcaggttttccaggaccaagcggtccacctccacctccgcttccaccggcccagaaccaaccccaacagcagcagcagtctcctcaggcaccacagcaatcacccacatcagcaggattcttccagtcatcagcaggcatggggttcttcccaccagtgcaggtgcaacagtctccgtctgcccaacgacaatgactcaacggtggcatggcattcatcgggctataatggcagcactttgtgctaacttctgtacattaaccaataatcacctagcgtcgagcttatacgtggctgatcctgcaagagaggcgcaggaccgttgtcacggttagaaaaaaaaactgtagaataggcttttgtgatgactctcgttttggtcagagttgtttaactcttccttgttctgtgtagtagttagatgttgtgtctctgtcccccgtttgctttgatctcctgaggcaaaagaaagtggcactggaattgttgcccactgaatcactgatcgtgctgtcattgacatgatgtaaactgcaaatacttgttctattgttgtttaaatttaattatttattatgattatttttt

SEQ ID NO: 26054 - DNA, 1148 bp, Zea Mays
cgtaattcaacaactagctgcatcgtcttctccaccgaccttgccgccgtcgccccgccgctccatccggtaagacatggaggagtacctggagagcatgaaatctctccgctcctacatgaacgatctggaggacgacgccgcgaagcggtctgtcgaggagcagcagcagcgtacagccatcgacgctcacgacagcgatgtcgcgctagtgatggcgcaagcaaagcaggcgagcgaggaggccgagcggctggccacagcgagggctaaggtaggcatgcagatggccgagaagcagggaaggattgccacgctggacatcgagtgcgccacactgaagcaggttgccaaatctcagagcaagcaaaacttcattgaaggggagaaacatgtcatatttaactcagaagggagcctggataagtttgttagtatttactctcctccctcccttcccacaactatgcttttcagtttttaatcaaacaggaaagtgatgctcagaacaagcccgggaaactctacacacaactggtgtcagctcagctcaagatccaagacatcaaatcacaaagatcagcgcttcttttagaaatcagcagagtatatcaattaggacctaagcttctttattattatatgtacctagtgagactaacagacatgaatatacttttgcagatcaagcagattctggagcaagagaaaaacataattcctggttttcccgctgcactacagcagatggatatgaagtcattggaggaggaatacaaagctctgcaaggggattttggatcctgtcaaatgccaatgtggactggagtacaacttaaaacttgatggtgaagccatggatataagctaagcaagaacgaccacatacgcagatgcccatctccaccagatttcgtgcattttagatctgtacagtgtgagagatggattattctttggaaggtacagaatcttctcgcatgtatacgggtggatgctttgggcagagcttgacagcgtcatcgcgaataatatagaattctgatgttagaactatctggagcttgaacggactatacggccatagttttgttcaataattgtttttccttacgctcaaccgcttgtccagattgcagacataaaag

SEQ ID NO: 26055 - DNA, 2169 bp, Zea Mays
cccaacccgcccaggcacacttagcataaccctatctccgcccagtgaggaggcggcacgcgcgcgccgtcgaccacgcccatgccgaaatctgcctctgtgggctgtggctgccggacgagcaagcgccacgcgcgcgccgtgcctgccatgagccgtcagtccgcagtccgcagtccgcagccacacttttgctaaaccctagtaaatatacgatacgaagcgcaaacgcttgcctcatcctcgaattcgccatggcgatgcccaccacctcgtctgcttccccatgccaggcaccgtcgcccgccgggctgcccatttcccctggcgcccgcgctaccatcctctcattcagccgccgcctccgccgctcccgtggcgccatcatttctgcgcccactggttgtctgtttcttggtcttcccaagtcgtgctgttctatcgcagcctttggtgaagtggcagcggtttctgatgattatgtagaaagctcgccctcaagcagtggatatctgaatagtactatggatgcttcatctcatgaagataatcaatcagaaagggttgctaaaatgaaccaaaactccagagacaataacaaaatgatcaaaatatgtgataagttaattggcgtattcctggtggataaacctacaccaacggattggagaaaattactagcttttagcagggaatgggacaacataaggcctcatttctttaaacgctgccaggaaaaagcagatacagagctgaaccctgagatgaagcacaatcttctcagacttggtagaaaacttaaagagattgatgaagatgtacagaggcataatgaacttcttgaagtagtaaaatccacaccatctgataaacttggttctattgttgctaagcggcgtaaagatttcacagtggaattcttcaaccacctttactatgttgcagagtcttgtcatgatgaaccagaaaagcaaactgagttggcaaagcttggaaatgattgtgtagatgccctacaagctcatgatgatacaacagggagccttgaagctttgaatgctgcagaattgaagttaaaagatatacttaattcaccttcggtggatgctgcttgcagaaagattgatgacttggctgagaaaaaagaactggactctgcactagtgttgatgctttcaaaagcttggtcagctgcaaagggcactgacatcacgaaatctgaggcaaaggatataatgtttcacctatatatgactgcggtggcgaatctccagagacaaatgccgaaggatataagaatactgaagcatcttataatgatagaggatccagaagaacggtcaagtgcacttaatgacgcttttactcctggccctgaacttcaaggggacaatgttgatacattatacacaggcgctgcacacttgggcaagagctatagttgatgcatattataacagcagagaaggcactctcattgggcaagcaagagacatgatgaatcctaaaatcattaagagagtcgaagagatagtgaagataatcaaggacaagtacctttaagttttagtcatcataaaatgggggtttaacatttctactgattgtacaagtcttgtgcgatgatggtcttttacaggctgctcccgtcaaaactactgccatcgttccagttggaactcctcagcactgacgaaacaatcagtgtttaaaggaaatgcaagttgttgtaactcattacaatgagaaggtgtttgtagcatgtggtatcagtttagctgctacatagatattagcggagtacttgtagctgtcctgactctaacagtgttgtaactgtactagtatcgaaccaggagacatgtatgtgtccaagcattcttgtaatgagctagtgatctcaaacaattctacggcttatgctgactcaaaccatttaagggcttgttcggttagctcctaattcatatggattgagtggaattgggtgtgtttaaatcctaagtaagtcaaactcctttttaattttttctaatcccattcaatccttaaataataggattaaccgaacaaggcctaaagtaagccaaatgtttctggacatatttgaactgaataatgtaagaatacctggtttttggtgatatttacagccgcacagcttccagc

SEQ ID NO: 26056 - DNA, 1393 bp, Zea Mays
aaagtccagtctttccttaatgaagcttgaagctatgtacttcaagtgattttatgccagctggaatgaagcttttaccaactggtagaaagagttctcttgctattttcacttactcttcacttgttggaatgacaacatattttcttcactatttgtcgggtatgctgcgctctgttcttgtggaaattgggattgctgaagacatgcataatcctcttggaatattcgttctcgtatctgtcatcttagctggagcctggtttggttattggggtgtccgtaaatttgtcctggcagaagatggatctgttgacgagggtgtggcttattttgttgagtgggctatcttgattgtttcagccgttatgatcctccagagttctctggactatctctttgcatttacaactctagtattatgtggaatcatcaaagtgattgcaagaattgagggaaagtcaaaagttttacgctatatattcgggggactttctgatggtacctctcgtaattcatcccgttatggagattttgatgaagactattctagcatgaatgaagatcgccaagatggatttggcaatcttcatggtggataccagagacatgcaccgagaagaaactcacctcttgcaggctcagcaaagacattatcgcaaggtgttgctatggatagcttctattctacatttcacactaccccagagaggatggaattcacaaaagaggaatatgaagcattcaccagaaaggagacgaagaaagctatgaagcaactgttgtcatcaccggatttcaacaggtgggcattggctaatgcagacaggatatctgtggctccaccaggaggaagctacagcagtaacaacagccagcagcggcatcgtttcttgggactgttttgagctgtgcctgcgtgtgtgtggtgtgctttcttagcagcaataggagtgctcattgctcagtgatgattccatgtgagttgattagcaaggtttaggataacatctgagtgttccactttgaggtggcagcaaatatgtagaatattgtagtttaggcgcatcttaggtccaaagtccaaatggcatctgtatcttgtaacattaagtggtactgtacagtgcccgaggtgagtgtatctcaacttgttgagctgaatttcacgttcgatcatcattatgacagtttgaatttattcaaatcatcattatgataggatgaaaagtattcaagtgttctatgcctgcatagaaagtaagttgtgttgaattgtcgtgtgcggtaagcagtggtttgggtttgtagttgattttgtaagggactctattctcatcaccgcctgtaaactaatgatctgctctggtttgttcaatatgcatgagtgatg

SEQ ID NO: 26057 - DNA, 1109 bp, Zea Mays
acgcgggcagacgaggcgagacggctgcgtggtgggccccacgtgcagcctcacgagccgcgtcatgtccccagatggggcttcgggcttcggctattacctggcgcggagaggagagggagtgagtcgagatccattcccaactgcacctgcgcgcctcgactggtagcccgaaccctagctagcaggtcggaggcgagagagcagccatggcgcggtgcctcgcgctcgtctccctccttctcctcggcctcgcctccgccgcctccgctgccgatgcgccctttgtcgtcgcgcacaagaaggtttcgctctcccgccccaagccgggcgtcgagcgcgtcgccgtctccctcgacctctacaaccagggatccgcgactgcctatgatgtgtcacttaatgacgactcttggccaacacaagcatttgagcttgtcactggagagaaatcgaagacattggaaaggcttgaccctggtgccactgctacacacacatatgtcctggagaccaaaacacagggcaggttccagggttcaccagctattattacgtaccgtgttcccacaaagactgctcttcaggcctactcaactcccatcttcccactggatattctcgctgagagacttcctgagaagaagtttgaatgggctaagaggcttgtggcgaaatatgggtcacttgtgtctgttgtctcatttgttggattgtttatctacctcgttgcgagcccgtcgaagagcagctcaaaaggaagcaagaagagacgttgatctacttatagttcggcgcagttgaagttgtagctggtggtttttgcctggaggaactcttggtagtttgagctgagcgaaagctttaaattttacatttactcaccacaccatgaactgcaacgaagtgagcatctgttagaaaagtggaccagtaattttggttggttatttatttcctgtttctctgtcagactcttaactcggaggacctgtaactaggaaagttacttttgcttgaaagaacattttggtatggttggtgttcctgtgcttcgtgtcgtgcgtgggtctgtgaatttgagagcaaccatttggtgggacgcttcc

SEQ ID NO: 26058 - DNA, 1929 bp, Zea Mays
gtaaagctgcgctgagttaccataaaaagaagagaaaaaaacagtctatcctgagttctcgatcgcgccattcaatcggataaagctgtgttgagttgcagaaaatcagtctttgatcgtctgtgttttcctgattaaagcagcgctttgttgctttagatagaggtagagccatgtgcggcgcttttcaggctggttctttttcgaaaaccggtttcccccactccacaccaccaccaccaccattgacgacttgactacaaagcccagatccattcctcggggtcgggcggccgccaatcccgccgcataccgctggccgagtcctcgtcggcgccggacggggtgaagtgaaggccgactgggagaattttgtggatcttatctggtctccatcatggaacatgacggcacaacgaacctggctgtcactgaggctgtgcgctcggtgcagctgctcaagatcgacggctactgcgccaccgctaccatgggggcatcggagttcatcaaattccgatggcacatcgatggccacgagtgggaggtccgtttctatcctgattactggtacttcttcgaggacgaggactgcttcggcacttatggcgacgacgatcactccgagtgggtaggtctgaagctcatccttgtcagtgaaccccagagggacgacgacaaggtgagggtgaacctgagctgccggcttgtatgccccagccccaccagccagcggccgcatctcgatacctgctggtccgaagagaagagggtgtcccatgtgtttgccagcgactcgaaatgctcgcctgaacttctcctcatcctgaagcacgagctaccatcgtcaggttatctcgtggacgattcactgaccgtggaatgcacggtcaccgtgctacgcgacttggacgccgccacggataaggcgctgtcgtccctgccagtgccgccaccctcggacctacaccagcacctcggcgacctcctgcagagcgaggacggagcggacgtcacgttccgtgtctccggggagtccttcgccgcccacagggccatactcgccgcaaggtcccctgtttttaaggccgagttcttcggaggcatggaggaacgcagctccgcttctgtggaggtcaaaggcatggaggctgctgtgttcaggtccatgcttcgcttcatctataccgacacggctccagagctcgacggtgcccaggaccaggagcctgaggcggcggtggccatggctcagcacctactggtagctgctgacagactgaagctcatgtgcgaatgcaagctctctggcggcatcgacatcggcacagcggccgcgacgttggctctcgccgagcagcacaactgctcgctgctcaaagccaagtgccttgagttcgtcaccaggtcgcctgagactctcgatgctatcctggcgactgacggctacgagcatctggtggcaagctgcccctcggtgctggctgaactgctgagggctgcgcgtggaaggaagatctgagctggacgatgatttcatattatggtttgcctaagatgtgtgtgaactaaaaaccatgcatgatgaactagtagtgcttgcagttgatttcctgcccctcctttcagtttgacctgcgcttgtcatacatgtattgtatgcacatacacgagacgggcagctagcattttctgtggttagatctcgtctcggctttgtgcctgtcatttgggggcttaattgtaccggttgccgtttctcgttcttctcatgcatgtattgtacgcgcagccacacgcatgacatgagcagactgctgctgcttcagtcgcaactagtacacaagattcagaaaactcatctttagagcagtcagtttctgggggaacagggcaacaggcaactccaaaactcgatcacagttgtca

SEQ ID NO: 26059 - DNA, 1573 bp, Zea Mays
cctggatggatccttggctttgtcctgactgaagtggcttcttctttcagttacctatgtgctctatacatggggactgcctcctttcatcatgttcccatgacttcttccgcactctgacgtggtggatagtgccgtgcctagccgtgaaggtgacccgggaggtctcccgcttcgcgcacatcctgcagcaggggtcgtcgtcggcctggacctggagggcctgcgcggtgctgttcgcgtccgtggcgtcgtggacgtacctgacgacgatcatcctgtcgtcctgcatgctcttcaacctggtgtgcagcctgcaggtcatccacttcgacgactacggcaagctgctggagcaggacgcggacccgcttgtgtacctcaaggagcacctgcagctccgccacaacctgtccaagatcagccacaggttccgcgtgttcctcctcctgctcttcctctccgtcaccgccggccagttcgccatcctcttcaagaccacggcgtacagcgggccgatcaacttcaccaacggaggggacatcgctgtggtcggcctcgtcctctgcctgcacgccgctgccaagatctcccaccgagctcagaacatcgctgcgctggctagccggtggcacgcgctggcgacgtgctctaccgactccacctacgtgaccaccccgaacagttccgggaacctcgcgcctttccccgcgcacctgttcctgagagactactcggggagtgacctggagtccctggacagcgcgtcggttcagggcagctcccacggcacggcccagctggcctcctacatgtcctcgtaccacaagagggagtcgcttgtgctgtacctgctggccaacccaggcggcatcacgatatttggctggatcgtcgaccgggcgttcctgaacaccatcctgatgctcgagctgacccttgtgctcttcgtgcttagcaagaccgttgtgatcccggccaagacactggtgcacagttacatcggctacccatgattacgaccagattcaggttcaggttcagttaggcgatgggatttgatgacaggcaggttgccggggtttgcacgctacggtgaatgaaactggtaggaatggtgggtctcccccctcaagcgcagatcatatgcgctggcaatccaagcatgccgcaggttgaaggcaggctgagggctagggtcgtgacgtgtacagtttttttggggaaaaaaatctctacagccggttgcagaaagcggtcctgcaggttgcaaagcaggttgcttcagatttacacttctgcaccaatcaatgatcagagattgtttttctctgcagccagttgaagagaatttctcccggtacatatactactaatactataaaccaatatatgtattattgtacgtatacacgcacgcaatgtatatgcactcttataataatataaactaatatactacctccgttcacaaatatatgataccattaactttttttcaaaaattttgactattcgtcttattcaaaatatttattaaaaaaatataaattttaaatcaaacacagactac

SEQ ID NO: 26060 - DNA, 3649 bp, Zea Mays
ctgacacctgccacgattcacactcacacacaggtccactgcaggctgcagtgctgcacaccgccgcctggaacgaagcccctcttcggaatccacctacacgccccgtcggcggtccctcgcccgcatcgctagttcggcacacggagtttataaacccctctgcagtctgcacgaataatccccaacccggctctcggctcctctagtccttttctcgcattgcatttactgcggcatctttgcgtcggattcggttcccctcgattcctctcccgttgattgcctcgccgggtccggggtcaccggccggcgggggttgattgggtcggcggttatggggaaaggggcgaggaggcgcagccgtgcgtctggcgccggcgggggtggacacgggagcaagcgcccgcggcgggccgaggaggaggaacaggaggaagaggaaatggaaccgctggtgggggaggaggaggaggtggcggcgctggagggggaggactattgcttcgtctgcaaggacggcggtgacctccgcgtctgcgatttcaggggctgccagaaagcttaccatcctgcttgcgtggggaaagatagcggcttcctcaattcagatgaagaattcatctgtgaatggcatacttgctttatttgtaaagggcgttcacgttattattgcttttgctgtccgtggcaagccttttgtcaaaattgcgtgaaacaagcagaattcgtcccagtcttgaggaagacaaagggattctgcaccaactgtttaaggatggcaatcatgattgagaagaatgttgatgttgactccgatggggagagggttgatttcaatgacagggcaacttatgaatttttattcaaggagtattgggaggagatagttaaaggcaaggagagcatgactctggataagcttgaaaaagcatatgcttttctgaaagaaaaactaaactgcaaacaagatctagatttagaaaaggttcatgatgaagaacacagttcagatgatgattttgtgggcaatagtgatgacgacgatgacaacaagccatcttccacaaccaaatttaatggaacatcgaatacaatgaaattcttcctgagggaagataggccaatgaagaatggctatgtgggctggggttcaaaagagctcatggagttcctttcctctataggcaaagatacattgaattccctagatcaacatggtgctactgaagttgtgaaggtgtacattcaacaaaaaggtctcttagcaagagataagaaaaaacttgtcatatgtgatgacaagctcaagattttgtttaggagatcaaaagtgaggtacaacaggatatatagcttgttaggtaagcatattgctgtgaatatgacatcagaggatgaaacttttgctaactctgatgataacaatgaaacatttgtgagaaagaaagctcgtattgggaactacagttccagtactccaaagtgtactccagaaataaacaagagatgttttgctgctcttgttcgccataacattgatttaatctacttgaagaaatctttggttgtggatctactaagggagccggatacatttggcagcaaagttattggctgttttgtgagaataaagattgatctcaacgattatagtttctacatgcataaaaaggtgcaccaacatagaaagttgtatcagcttggactagtaacaggcaccagtaaatcccctgaagaatacaagataaatgatgtatcaacagatattcttttatgtatttccagcatacctgacatcaaaatttcaagtttgtcagatgaagaatacgaagaggaagaatgtcaagaccttcggctgctggccaagaatgaatcctttaaaaggcctactgttggggatctagaggagaaagcaagaagtttacgtagggagatagtgaatcattggatcagtaaagaactccagaggctagaaagattaattgacagggcgagtgagaaaggttggcgcaaggaaaagtttgaataccttgataagaaacaactcttgcgcaagccatctgaacaacaacgtttacttgaagaggtgcctcaagttattccagagacagaagataataaagatactgaatttcaagttacaggacaagacaaacctattcaaaagagtactgtcgctttacaaggtgacactattaaggtttctgttattgctaattgttactgaagtatctgtgtaacgtcaaaagcatccagaagttctatgaacataaattctagctgcacttgatattttctttgcatcgtcaattttctttgtggtatatatattttcttcttttgcttaggtttgtgatgtttatgtaacttctgtacattagggttgcctcctcttgtttattttgaatatgaaggacagtaaaagtaggccaccttaaattgtcagaaaggagtctattttttgaattctcttgttcatttcattgactctcttttagtaatttcattttcttgaatgaaaggtaaaaaccgtttattatggtgtaggtaccaatggagagagcattgtttctttgaaaaaaggctcagaagaaaaatgtacatatgtgacaagggcttcttttttgaagagccacacagggaaaaaatccaaaggtactgatggggagagagatctttccttggaaagtttatcggaagaaaaacctgaagttaataaggcccacaccgatggtggtacagctgtaatacacaatcaaaatcggagcactacagctgctattgctgcgctaccaaagtatttgcatcgccatgctgccactgaagccaataatgctggtgatatttcatctgttcaggagctggatggtgaaggtgttaaagctagcacggatgttgatacaactggaacagatgtccagcacgggagcattgaagctactaaagccaacgctgctggtgatgcacctggagcattttttcaaaagcagtgtgctaaagctgctgatgttattaccattgacgacgatgacgaggacaacagtcatcgttgttataaagaagaacaaacagcagtagttgatcttgaagctgattatgctggggataaccatcccgtgcagcttgaggcaaatagtcgaggccataaacacgtgaaggtgaaggagcgcatttggtattacattgatcctcagggtgatgagcaagggccatttacaatgcagcatctgagcatctggtggagcaatggcttcttccccggcgacttcagggtctggagaacaggccaaactagtaatgacgccatcttgctcgtggacgcactgcagatgactaggtaggctagttaggagcctcgtagaagactagatgtatttatgtatcgcggaaaaagcgggggggcttcgaggcagatatatgtgttctgctggggtgtacatccttctgtgttatatgatatgatgatgacatcctatccccaccatcacctcacccaccaatcaaaaacatcttgccaaacaaaacaatggttgtttgatggcaaagaggatttgttgggatgaaatatttgtggactattcagtatccctgtgctgtgacaatgctactgaaaatctggttctttggcatgttaggctgtttaacg

SEQ ID NO: 26061 - DNA, 778 bp, Zea Mays
tcgacatcaggatctggttttaatgttggcttctttctcccttcttgaaagctcagtaagcatgtctgcgtaatttgaaaacaccatcaggttcacctaagcctggtaatgggtcacaatccggcctcaaccccactccaatcctataagttttaaaagtgaacccagccctacttaaatccaaattgatttgatacaactcaattcaatccgtttttcaataccccgacatcctaatccgtctcgatccttttaaaaatccacgggccaatccaagggccttcatatacaagcaagcaccaccacaagttaataaattattataatccatgggctcacaaacaaatgatagaaaacaacttgtaactgtgtagagaaatagaacttgacagccatgatcgatgagaaactgctccatgctaaaatgtttacaaagacgctccatgctaaaattcagtatttctacacagttggtgacattgatgcttgatgagaattataactcaaactgaattcagataactgaacttgacaatttagcattgcagtgacctcggaactcggatgggaacccgcctagttaccacatgcggagaggattcagttccagagctcaacaaatgatcatctgatgatcttgtggtcatcgagtgtcctctttctattcaataaactgttgtgtgtaacctgcatgcaaactatatagactgttaaactatatagactgttatacagagttgttccgagcacaaaatgatcaactttagttcatctaagt

SEQ ID NO: 26062 - DNA, 4284 bp, Zea Mays
cccgaagctgcaacttccagatcgttctcatcccatcgtttcctcctctgctcaagcacggcagccagtccagccaccatttgggtgctcatctccctctgctcggcacccagccccagctcgcccgagctccctgcgccgacctcatcctccccatggtgcgtcaccttctactcctctccttcccacggcacagcagcgcccctgcagctccccttctccagatccatggcgcccaacaccttgagcgcccctgccgctgctcctccaccgggatctcctcctccactaggcgtccaggcttgtcccaccatggctgcccctcctccatctcctccctccccaccaggttacccagattccatggccgccgccgccccagccatctccctggtggccgacctcgcccctgccccagccacagctcccccttcggccctgctgctgcaagcactcagcccctcccatggcacacggtactcgtccagcccctttctactggtggctgacccatctctatggtgctcgacgaaatgaccatgaggagttttgtgttgtgtgcagccccatctgcaacaccgtcgacccccgacgaggtcctgttctcgccctgtcgttttagtactcggcgtcgattaagtagatgctaaccgtgtgtatattcgtgtgttcttgtgaggagaaatcccatgatttgggggaagacgaagtccaagcacaacccccgccaatcgctcgatgaaaaatctaaaccaaaaccctcagcgttttcatgggttccggagggattttatgttggtgttgtgcggtgtgatctccaattccctattgctgatgtcttactccatcatgaccttagggaaggatgttttcctctaaattactcgtaataattatgcttggtgtatgtgttgttttagctacttgatgaaatgttttagttgtgtgcgataatatggttgccgttcgagtggaaagtagatgtgttgtatgacctgagttggagttgaagcaagtatgtgtgtctcgtattacgaaactaattagagatatgcatgatgtttgtagatggattatgtgtagagtgttttagtacaagtatttttttaggtatagttgaaccaattattgtatatgaattgtgcgatatcaaggttgttctaatgttcttttaacatcttgctaataaggtgttagagtattctaaatgccaaacataggataattttacaagccaaatagaagttaaattgaaggtattgatgtttagggctgtaggtatagttttagttatgcagctagtccaataaagtagatcatgttttctgtagaagcgttatatataaaacttgtagataatctctttatcttacttgtgtaaaaatttcatgaccataggtgtagtagtttaggagttatgatttttccaagtccagtctcagaatctgtccgaattctatacaggtttcgaaaattggattgtttggctaagctaaactgagaatcagcccttagtaattatagaagaattgtagtacttttcttaagctttccaacaaattttggagcaccctttttggtggtctagagatcaagttacagctgtttgaactatagagtctgaatctgtccaaatctggacagcgaagtctgtttgtagtaactgactttgatatgtattgaattaacctgagatgtttataaatgaattgtagacaattctattaactttctaaaaagtctaggatcaccggatttggatttcggaaactccagttctggacttttgaagtagttagtcgaattctgtccaaatctggacaaaatttatgtttagcgctgtttgacctttctaaaggtcgaatcttgttgtgatggtaatacaaaagttatagaggactttataagctttccaaaaagtcctagtttactatttttggatacatattttatgaattgtgagctaaacagatagttgttgacttgctgttctgctgtccaaacacatgtctactgtctgaaaatagctcattttgtagttacatttgcatcaggctttgatgattgctgtacaaggatgatatggcctcccgcccaaagctgtctggtattcagaagcaggttttggcgctgtacaggggattccttcggacagcacgccttaaggcccctgaagaacgccgcaggatcgagtctgttatcttggcagagttccgtgacaacgcaaggagtgttgaccgtaggaactttgtacacatagagtacttgttgaggagagggaagaagcagcttgagcagctcaagaatcctgatattactggactcgctacccttgtagtaaagaaatgagcaagagaagaaggaagacaagtcagacaaaacagaagacgagaagaggttcctaccataacacttaagcaaggaatcctgtacacttctctcctggggttgtgacttgtatattgtcaaggatcacttggatgtggtaaatgctatactggacactgatgatagctgcataaggattgtgcgaaaaaacgggaagacatccctacatactgctgcaaggattggataccatcgtattgtcaaggcactcatagagagggatccaggaattgttccgatcaaggataggaagggacaaactgcacttcacatggctgtgaaaggcaagaacacagatgtagtggaagagttactgatggctgatgtttccattctcaatgtgcgggacaagaagggaaatactgctttgcacatagctacatggaaatgggagaattttgggattatgaaacaccgcagacgtggcttcgacgaaacggaggcgtaggcgagggattcgacattatgaaaaaccagagaagatactacactctaaaatggacatgaatcctctattaccagggaaggatgatgtttattacactgaaacagacgctgtctcacatccgttacccgcactagacgcacccagtctttctacagagagaatcgcgccgttcttgaatctgccattcgctgaatctgccattcgctgctgttgtttctggacagtgaagcagtattccggacagtgaacaaaaatctgggaacacatttcattttcactgtcattggctaccagagtccgggaacaaaatctgggaacaaaatctgggaacacaaaaatctgggaacaaaatctgcctttggctaccagagtttattgctcccatatcattcgctgtccatttcactgtccattcgctgaacacaaaaagctgggaacaaactcattttcccagtgaacaggtagcacaatttagttcacaaaatctgggagcacaatttagttcacaaaatctgggagcaataaacaggttgaacaggtagaacaaaatctgggagcaataaactgccatcccagaacaaaattcgcagctcacatttcagttcacaagctagttcacaatttagttcccaggtagcagtttcacaagctatcacacaagctcacatttctgggagcaaaaaacaggtggcgtagtagcagtcgtgtgttcatcttcatttgcagcaacgacaagttcacggcttggtgcttcatcttcatttccagctacaacaacgacaagccacctgctttggcgcggactagggttgtggtcgcagcgccgccgccacctgctttggcgcggggccgcgagcagcaagggagaagacgcggagtttggagagaaggaggtgcagcgccgccgccacctgctttggcgcgggaccacgggcagcagatctccgggcagcaggggaggagactagcaggggagggaaatggagattgaagaaaatgagatggaaggaagaggcttgacgggagagagaagaaccttgaagagagaagaacggctctggacggcagaagaaaacggcgcgtgggctgatagcgacggaagatcattattcgttctcctgaacgactaataacgatgctgtctatcttgtttttcagggatctggaataacaggagcctgatggttgcatcagtagagttgaccacttctcagtattgcgagatgcatcttacatggtcaagaagataattcctattctgaactacttgctcgtgttgatcagttttgcctagtcccagtaccatacaaagatgttcaggtgaacctgaaaattcttctcaatttgacttgcaagctttctgatgcgagcactaaatagtgatttttttgcaattttgtatgagccttgtttgagtgaatctttcctttgggcagcatggatataaa

SEQ ID NO: 26063 - DNA, 1454 bp, Zea Mays
gggcgagcagttgtcacctggaaaaatacaatataactatgaggtgtaggttacgtcaggtagcgtcagacattccagtgcgtgcctggcaagtggcaaactcgagctgtctagtcctcggttcgcgaatcttccacagagaggcagacggcaggactcgcttcaagctcctcatctcgcgcagggggggtcgcctgaggtatcggtcaatcagtaatcaccccaaatcctagggttctagtcgcttctcgtcgtttcgttcgtaggtgcgccccctctcatctgcactaaacctgagtcctgattagggttctacataatcgcttctctttgcctgattgatttgataccctacatccgtggtcgccggttgttccggattagccggatctgttggtctccggttcgtgtgtgctgtaccggatttggggtatgttcgagttgcttggtagatttacgttggtacatacggttgcacagaagatctggatttactgagtagtaggctagtagctgcctacggcgtacacatgacttgtgtatgaatcgtgtatctggcgtgtcgatgcttagtacgcgtagtgctgcaccatactgaaactgaatggacattggctgtgtggatgatttatgcggtgatgcattcagctacgatcacagagacaatggtgaaggcagttgctgtcctcgccggcactgatgtcaagggcaccatcttcttttcacaggagggggatggtccgaccaccgtgactggaagtatctctggcctcaagccagggctccatgggttccatgtgcacgcgcttggcgacaccaccaacggctgcatgtcgactgggccacacttcaatcctgttggcaaggagcatggcgcaccggaagatgaggaccgccatgccggtgatcttgggaatgtgacagcgggagaagatggtgttgttaatgtcaatattactgacagccagatacctcttgctggaccccactcgatcattggccgagctgttgttgtccatgctgatccggatgatcttggcaaaggtggacatgagcttagcaagagcacgggaaatgctggcggacgtgttgcctgtggtatcattgggctccaaggctaaagcagttaacctccgaggcaaacaccatagaaggtcgaagcgagcacctcaggatgttgctgttccatttcccctgtattggcaacacaatttgagtactccaaataagcgcctgatccatgatcagagagcactattcatgccattttgtatatgaacaatgttgcgcacctgcttaagtgtctgttccaacaaatgcttaagaagacactactggaggtgtactatggagtactaccagcagcatctaaacttgacgaaaccaattaaccatctatggtgacacgggatattacaacatcaggcggggggatggggcgtaggaaaaaaaaa

SEQ ID NO: 26064 - DNA, 243 bp, Zea Mays
ctaacctgtctcacgacggtctaaacccagctcacgttccctattggtgggtgaacaatccaacacttggtgaattctgcttcacaatgataggaagagccgacatcaaaggatcaaaaagcaacgtcgctatgaacgcttggctgccacaagccagttatccctgtggtaacttttctggcacctctagcttcaaactccgaaggtctaaaggatcgataggccacgctttcacggttcgta

SEQ ID NO: 26065 - DNA, 1155 bp, Zea Mays
cttttcatgtttcgtggaagcgtcatggcaatgttgctattcagcaaaaaattaacaggttccttgcatacagaagggctggaaagagctttaatgctgaagtgcgcaacaggaaggactacagaaatcctgactttttgcagcatgctgtgggataccaagaaattgatcagatagggacctgtttcagtaaatatgtttttgatccttatgggtacgacaaaggcgactactatgatgagatagaagctgaaatgaagcgtgaagttgagaggaaggaacaggagaagaaaaggagcccaaaagttgaatttattactggagtacaacccccaatcaatgcatcaataccgaagatcccaggtttggctggtgtctgtacactaccggtacctacagaaggtgtacagaaagagactagaccaaacaagaaatcaaaatgggataaggttgatggtgatgttaagaaccatgtggttcctagtggacacgacaacttatcagcaactactgcggcactcttgacttcagctaatgttggtgctggatacgctggttttgcgcaacaaaagagaaaagaggccgaagaaaagaaaaacgatcataagtcagacagaagatcgtagcaccaccttttgtttcattctgagcagtcagcgtatcatttattttttttcagtgacatagttttgtaatgtggatagagaaaagaaggaaacaattaaaaccaatcctagggaaatggtttcagaaaagccctctgggcaacttggtagtcttgtattatacaggtaccagaaacttaacattttagaccaagaaaaagagaaccgtgagcgttctgcacttctgccgcctgttacagtggtcaattatgtgtttttgcattcagctcattggtctgccgcttgaatgctgggattttaaatcgccaaccatttatttatcatcgatggtcacctaatctttatgtcttgatcgtttatttttatttcatatcgattgggtgcgacatatatatttggacttgatatagatttaaactgacttaattctactcaattttagatcaaaatgaatgaccctttaggggtgttgactaaattttagtctctttattttagtttttaaacataaaaactaaaataaatataa

SEQ ID NO: 26066 - DNA, 2280 bp, Zea Mays
aaggaagggacggggttgggctgagggctggaggctggagctggtacaagcccgtcctcccccgcggttttgatcgcctcctcgctttccttcaatccttcttcacctggtctctcacgcaatccgcggggaaccccaaaccctaatcctctccatccgaaccgctggagacagccgtgtgggagctcagttctcggggttctgcatcgatctctgttatctggggttctcagatgggcgatctcaaggaggttgatcatcgtatactgaaggctatcgcagttgagcaccgtaaagatgttgattccgcggtggttactgtccttgatgaagtcatgccgtccatgactggttcagctggaactttgtttacccataaagaagtgttgccatctatggatgattctgttgggaatttgtttgctaatcgcagcacacatgaagtgggtagttcatcatgtgcaggacatgagatacatatcgatgagattgatgtaagtgttcaccctgcacaacacacttcttctggggaggctaaaactggcaagcaagaaaacataaacaatgaatgtgtgggaagacttgcatcagtcgaaggggtcagtgagcaactaaatctacattctgatcctataccaaatggcagtcagcatgatttgattcccaaccttgatgtgctatcatcaaataccaatccagagaaaatgttggctaacatatataatgaagttggatatagtggattatcaagtgaatgtttttctcaacaactgactgggaaacatggtggtgatatcatagctccacaatcccatgatcaagatcctaataagatgcttccagttggggattacttttcccagaacagttcaatggagttcttcagtggctatgaggacatgcattttgatggtgaccttttgcctcctggttctaatgataaagtatcttctggaattttgggtactgaaaaagattcttctgtgcctgtgctggatgttcctggtcgaaataaagaagaatcccccgctgggacttctggatttatagaacagaaggacaccagcaatgttacgaatatgcttcctgatcttaatttgtatcatttggcttctacggcttcaactcactcaagccattctgttagtattgagtctcttgaggattctgttgctgatgccagaagcaataagaatgatctgttaccttctttggagttggttacaaaaatgatagaggatgttgagcttcttgaagaaaaggctaaagtagccaaacgtgaatcatctgttgctgggacaggcattctaaccaaagttgaggagctcagagaaatgttaactcatgcgaaggaagcaaatgatatgcatgctggcgaggtttttggcgagaaagctattttaaccacagaggcacgtgagcttcaatctcgacttcagaggctttcagatgagaggaataaatatctggtgataattgaagagatacgacaaactcttgatcaaagattggttgctgcacagcaagaaattgcagcagccgagaaagaaaagcttgaaaaggaggttgctgctcagacactactcaatgaacaggaaaatatgatgaattctattgttgaagaatcgagaaaactgcagaaagaagctgaggagaacctgaagttgaaggaattcctggttgagcggagccaaattgttgatatgctgcaaggcgagatgactgggatctgtgaggatgtttcgttgctcaagcgagtggtggatgagcgcctatcattgagcaagttgcagccctcagctatgtcaagcctctcttcttcactgcattcttctcatcacaagagctggacttcctctgataggaccaccgaagccaatgggtgtcagatggcaacgacactggtaaaggcgttttgaagcgtgtggattccaaggacggcgatggatgggagctttgctgaaggtgttcaggaatagcgcggttgcgagtggatgctgaagcatagaaattactataaactagtaataatggtgaataaacgtttactagtgcgttgctaatctagtcgtaatgtgggaactgtgtcgtggaactgactcactagctcaccgcagtagtatgtgggatgggtccaactgcagcttgacgtggtatatataaatgtgaagaattcagctgcccctgctcctgtctaaattttatgttgtttttaattttgttctaagttaatattctttgacttttactacgttttctaaaaaaacagtaacgcctata

SEQ ID NO: 26067 - DNA, 885 bp, Zea Mays
gccattctctaccgagtgtctttcattgtctctggtcagttttcgagttgaataccctgaggactaccacaccttttccgaggaagaccgcaaggattttagacatctgttagtgatgtgctacttgatgcaactgaagttcttgggggtgactcgacgctaaaactactttccaccaagcttgctcaggcatatgggagctgcaacaatgagcagaactccaagtggcaacctgtagaggctaccctgttttgtatacaagcaattgctagatcagtctcaattgaggagcgagaaattttaccacagattatgtcactgcttccctgccttcctcaacatgagcagttgctacaaacagtttgtttgaccattggagcattttcaaaatggattgatgctgcaccagctgaattatctattctaccacctctagttgatattctcaataagggtatgagtacatcagaggatacagctgcggctgcttctatggcctttaagtacatatgtgaagattgtaggacgaagttctcagggtccctggatggcctcttccagatataccatattgcaatcagtggagttggtggttataaagtttcttcagaggactcgttgcatttggttgaagccctaagtgtgattatcacaacgcttccaccagaatctgctagtagagccctggagttaatctgccagccagtaatcaatcccttgcaagaatttatccagcagggtgatcaagttcttcaacgagtccctgctcggcatttaactgtacatatagaccgactatcaagcattttcagtaatgtgaaacaaccagaagttgttgctgaagctgtatatagatattggccgacactcaagagtatctttgat

SEQ ID NO: 26068 - DNA, 906 bp, Zea Mays
ggccgatagcctaggtgccagactgataaccaggatggagccgttagcctctccacccctgtccacaacccacggtgaccgggtatagatccaccgccgtcggccccccggcccatcccctaccccgaccacctcctccggcggccccaccccaccccagattctgcccctcaagtccattgtcatcagatctctctggatctcggtcgcccgcgccgccattaatcacaggcgggatccggcgctattgtggccagatctgacgcattgaagcctggggaccaccctgtgggcgaccatctctacagacgtgatgacaagacatgggctacaggcggcgagtcgaccaacatctctacgcgcagatccatgtcttcaatccgccccagaacacttatggcgaatctccttgccaaatcgacaacaatactactcggctggagaacgacgacgccgactcgatatctgtctcttataggcacaggaagcgagaagtccctcaggcatgaactttcaattcgtcagactctaggagcactcctcgccccgtcttcaatgcttcccttcaaggtaggatgagttgttcccatatgaagaagctccaatggtcttgacgtcgtcatcatgttcttgcttagatgagttgttcccatttgttttcttgcttgacatgctgcacaaggtctgtatttctcaaaacagacatcggttagtcctaacacatgttctttctttagaagcttatgaaggttctttatcccaacttatgctagatgacgatgtcatagccaacccatatttgttttagcaagtagacatgcatctagatcggtattctctttagtaaaatctactaaataaagcttgcaattagatacacctttaaatgctaatgaaccaccactt

SEQ ID NO: 26069 - DNA, 816 bp, Zea Mays
tcgtcgccgcaacatcgaccttctccgtccagtctgaaaacagggacccttgaatgaagaattcaaatgaagagaagaaacctaaggaaaggagagcagaacaagattggtacctttgctgtgcctggccccactgttagctctctgaagagttaaagctgcgacggaggctacaacgacaaagcctaatctcacaagcatgactccgttcactcatcactctgctggcctcaaccggcaggagggccgagacggggagccccctctactcatcaaaaaatggtgacccggagttagagcagcagggaggaaagaacgcctcttcgtggctgctgctttggcccggccgtgaagtacagagcgaaagacttgtggcttggaagccggtaggcccatttgctatgcacgggatgacgagaatgggtggtgctggcctgctgggtatcacaagaaaaatgacgaggggagttatcaggctcacaggatggagcatgtcgttaccctgacatggatcagtctagatttgtttcatccaaagcaatactggatttttttttcttgtttcactgtatacgctggaaaactaggacagattttgactgggcgtaattggaataactgacctagttaactgctactgcctctttcctgaattataaggtgttctagaggcgcatagaaagagctaaaagcctaaacatcttataatttagaactcatggcactatttacctccggtttaaattcaaatactgttttattatattagaagaatattttgttgcataaactgaattgcttgccatggtaggcgcg

SEQ ID NO: 26070 - DNA, 1468 bp, Zea Mays
ttcaggggcagcaatggagttgagaacaacagagaggaaagatcctggttacatcaacaagaatataagagattcacaaaatcaaagagacgatgaacctttgttgaagatgggtttggacagtcctgaacttcttgatggtaattggtctcgcctatgtataacatgcaaaattgtcaggcctgtacgctcaaaacattgctctacatgcgaccgctgtgttgagcaattcgatcatcactgcccttgggtatcaaattgcattggaaagcggaacaaatgggacttctttatgttccttatcctagaagtttctgcaatgattattactggtgtaatggccatcataagaagtgtaggagacccagcttccccagcatcatttggtggatggcttggctatacagctataaaccattcttgggtggtgtcttttgtcataatggacctcctccttttccttggtgttataactctaacagtaattcaagcatcacagatatccaggaacattacaacaaatgagatggcaaataccattaggtacagttacctcaggggaccaagtggcagattcagaaatccatatgaccatgggctgcgtgagaactgttctgacttcttgctgaaggggtacaatgaggatattgagagcactgtacagacattgcaatctgacgaggaaatgggaccaattcagatgagcagcccagtctcacagaatggcgagagcattccaccacatgtgaatggcactgaccatggttccaccatttcacatgccaactcaaaatcccatcgccaaagtccatccaattgtttgggcctagggctgggcactgggcataacaacccctctagccgttatgcgcgatctcttcttcccttatgatttgtcttgaggatatccagatgtgctcctttatatttgtgcatacttgttggacaaccagtcaaccacagctttgtttgggctatttcttcatgggtgctcggtgatttctctctggttgcacaaacgtgaaggcttcagaaacatcttcagcttactgcacctatgacacacgatagaaatagtgtcaatgtcaaggttttgttcttgttttcttggcaaaaggcaccaaggctctatgcctactatccaatatgtatgtacatggatggggctagtagttcatgcactaacccgttttgacttttgaggcatagttgtacgcttagggctgataacggcctataatttttgcactataagatttaagtatcaaatcgggttaggatcggactctatttctagtcatttttgaattataatttatttagggcattgatattttttgaagaaccatttggatcacgatccattaccacccatatgtacgctacgagagttgtaaaatgtacagtaacagaactacatggcatgtttgttcctgcatacgtatttatagaaaaaaatgatttgtct

SEQ ID NO: 26071 - DNA, 939 bp, Zea Mays
caagaatacacggtacacaccactggttgtctgcttgcttctccccgtctctgttctccgccagaccaaacctgaccaaccccacccactggaccggcccgcgcccgcttggtccagcgccggccctgcctgcagccagccaccgttgtccgttccctcccgcgatccactcctctcgagctctaggggacggaaggaatccggcgggggtggggtgcgagcagggggagggagaagagcagccgcccgccccgcgagggggcaacagctgcccaagaacctgaccggaagagttgtgggagcggcggcggaaagatggggcaggccctgcgcaggctcttcgactccttcttctccaccagggagatgagggttgtgatgcttggtctggatgcagctggtaaaacaacaatactgtacaggcttcacatgggagaggttctttcaacagtccctacagtcggttttaatgtcgagaaggttcagtataagaatgtggcattcactgtgtgggatgtgggtgggcaagaaaaactcaggtcactgtggaagatgtacctgagtaattctgatgcactgatctatgtcgttgattctctggacagagaaaggatcagagacgcgaggcaagagttccagaccattatcaaggaccctttgatggcaaacagcataatcttggtatttgcaaacaaacaggacctgagaggcacgatgagcacggacgaggtcagcgaagggctggggctgcacgacctcaggaacaggatctggcacatacaggggacctgcgcgctccgcggcgagggcctctacgacgggctcgactggcttgcgtccaccctgaagcagctgcaagaatcgggccacgcgacttcggtcgctggcccttccatctgatccagcgcaagtgcctcagccaactgacagcaagcccac

SEQ ID NO: 26072 - DNA, 253 bp, Zea Mays
cgacgattgcacggagtagttcccgaaccaccgagacgtgcggtccacgatgggccttgcgctccggtgagcgattctccggacccaagtgacccacgcatccgaggaaatgcacggacgagaaccatgaacgccggcggacctccgagactcatccctaagcatcggtcatgcgcgaattcggatgtcgagtgcggcggcaattcccccctttctctcgtgcttctcgttctccatgattccctttgtgcgg

SEQ ID NO: 26073 - DNA, 2488 bp, Zea Mays
ccttcatttccaccccacgccttctcttccggctttcatttcatccacgacgatgatctccttctcctctcgctccgcgccccgtcgccgctgacgtggcgcccaccgcacgggaaaaaaatatttcagatattttccccaccgctccttcccctctccccttctcctcctgcgggcctcctcgcccagcggactcctactctgctgcgctccgctccgttccgttccgctcccctcctcgcggcagcaatcgaatgtctcccgacgtagacgccgccgtggcaaccgccgtcgctcccgggggaggctgcggcggtgacggagaggcgggcgccggcacgtcgtcgtccccggcgtccgcggcgaacgggcgggcgttggtgcggtgggaccagatcctcccgcgccgctccctgcgggtcctcctcgtcgagcacgacgactccacgcgccaggtcgtcaccgcgctgctccgcaagtgcggctaccgcgtggccgcggtcgcggacgggatgaaggcgtggggggtcatgcgcgagcgcgcctacgcgttcgaccttgtcctcaccgaggtcgccatgccctccctctccggcatccagctgctctccaggatcgtcgccgccgacgagtgcaagaacatccccgtcgtcatgatgtcatcccaagattctattggcacggtgctcaagtgtatgcagaagggtgcggtggacttccttgtgaaaccagtgagaaagaatgaactgcgtaacttatggcaacatgtgtggaggcggcatgcaatgaattgccagacaaatggatcagaaaataatgcagccagcaatcatattagtgccaacgttgctaatgggtcaaagacaggagaaaacagcgacgaggaaagtgatgcccaaagctttggtagcaagagggatactgaaattcatagtgttgaggcggtacaagatattcgtagagatgaagtggctggctcatccaaaaataacgaactacaaaataagtcttatgatggagtaaacacaaaagtggatgtgtcaaaatataccaatggtgctccaagtggaagtgagaagaatgtgcggtccaaatgccttaacggtattacttctgcaaaggtggctgagcaaattatggataatgccttgaggatcacggatgcaagttcacgccgtccaacaaatcttggcaatggtttggctatgactgagccagcagctgacagaaaatgtcaatcttcggtcatggaaaataatgctgtcacagaaaataaccctggtgataagtcgaagggtgctgcaataggtcatgctgattcttgcccctccgaatttatggtgaccaacttggggaaggaacaccatcttaatggttacaaaaaccaagaattcagggaaaaagatatctttaatcactcgaattcctctgccttttcaagatatggcaataaaaggatagaaccatcaggtgagattcagtttttcccttctccctgcgtcattgggcaagggcatgttaatggcaagaacccagttttccaacccaatggggtgttgctgcctcccaatgaacataatacaggtgagagtacaaggcaagctcgaatttctctggacagtaggacagagggtgctgccatcctgtgttccactagtgccagggaagatgctggtgcaaatagttcttcccatagaaaggacagtatgagccatccctcatatgggtttatacctgttccaattcctgttggtgccacgatgccgtaccattatggtgcgattctgcagcccgtatactacccacagagtcctcttatgcactgtgattcagctggaatcaacaaggcagcaatccagcatgcctctgggcaacctaattaccatgaagctcccggtaaaccatctcatgttcttattgaacacaaacagtcagaggaaaaccaccagttgcatcattcaagacaaattcttcgggaatcaggagaaccaattgacatggcgagagctcacgtggatcgtgctaaccagactgcaagctgcagccaaggtatctgtaaaggaagtggatgcacatgtagtggtgaagccgatatcaacgcaaacacaatggttgccctagagagtggcaacgagagtggaatccaaaatggtgacaggtctcgccgtgaagctgcgttgatgaagtttcgcatgaaaaggaaagatagatgcttcgagaaaaaagttaggtatcatagcaggaagaagctcgcagagcaaaggccaagagttaagggacaatttgtaagccaaaagctgaactcagctacaacaacagacgcagaagctgactcgtgaccggcgtcaagtcatcactgtaacttattcttcccttcccaccaggtgtgggcaatcggacttgtaagactgaaggctggcagaagttttttcccttccatgggacagttgttgatttgtttgatccaatccaatcatccagcgttttg

SEQ ID NO: 26074 - DNA, 2667 bp, Zea Mays
atatatttaattagatagtgattaatcagttgcggtatgcgttagctacggagaaaaaaataccgagttgcagaggtgttggatcgaagcaaggtagcggcaggcgcaaccgggctggagacgagcagaaaagaaaagaaaaaaagccgcgagcagacagcagacaggaaacgggaccggacgggacgtttttcaccgcaggggaggaggcaggagggcccaacgtcaaagaaacaggaggccgcataaaacgcagcctcccgcggatccccctacttttctttcttctttctcatctcagttgcagttcccctctctctcctctgccgtagcgaggcaggcaagccaccaagtccgagcctcggaggcatcgaccaacgccggcggcagcggcgccatgaggctgctcgtccccgacggcgcgcgccgccagcggttgctccagtgcgaggcgcccccgtcgccctcgccgccttccccgtccccgtacccgtcgtcgtccccgtccaggacggtcgtggtggggatcaggcgcgacgccgccagccgcgagctgctcacctgggcgctcgtcaaggtcgccaatgctggggaccgcgtcgtcgcactccacgtcgccaccgcggccgccgccgacggtttgctcgtgagactggatgagcgcagcagggccgcggactcgctcgcctccgtgctcgccgtctacgacggtttctgcaacctcaagcagattaatttggagctcaaggtctgtggagggtcatctatccggaaaactctggttaaagaagcagctgcttgtggcgcagcacatctcatccttggtgtcacgaacaattcccggtccttcggatcctccttgacatcagttgccaagtactgctcaaagagagttccagccagctgctcggttcttgcagtgaacaatggcaaagtcgtttatcataaagatgctggtcacgggttgcaacatgaactgtaccaaagcaataccacgatacctgagacaccaaggaggagctaccggaagctcttgtcgaccatgataggggataaactctgggatgagaatggaaaagacagaaggtgtgtgtctcgtgccgtcaccatgccaatgaggtctcccgcacggccaaaagaattttcactggcattagtcccggtgaagggttgccaacacgaatcgccagcggtagcaactggctggcccctacttaggaagaagttcttgccagaccggaaagcttctgcgcctgacaagtccaagatgtctgtggtgcagtgggcaatgcggctcccaagcaggtattcagcagtatcgccagtccattcagaatacagaaccacaaaaccggactccacgagcgccagccatatcctccgtgaccgtgtgattgttccctcaaggagcaattctggaaagtcttgtgtagtgattgaagaattggagaaggaaactccagaggaactgacgttgctcaaagagaaattctcatccatttattcttcattcagttacagtgaacttgcaaagatcacctctgacttctcaccagagtgtgtagttggacaaggaggcactagtcaagtttacagaggctgtttggcaaatggcaaggagctagcagtgaagatcctgaagtattctgatgaggtactgaaggagtttgtatcagagattgagattgtcagttctctcagccacaagaatgtgatatccctcgttggtttctgcttcaagaatgatgaccttctgttagtgtatgagtatttgcaacgaggcagcctggaagagatactgcatggtaaaaaagaatgcaagagcatatttggttggactgagaggttcagcgtggctatgggagttgctcgtgctctggattatctccatagtgataacaacagtcgtccagtgatccatagggatgtcaagtcatcaaatatcctcatttcaaaatgctttgaaccaaagttatcggactttggtctcgcagtctgggctgctgatgtgacatctcagatgacatgcaatgatgttgcaggaactttcggatacttggctcctgaatacttcatgcatggcaaggtgggcaacaaaatcgatgtgtatgctttcggtgttgtacttctggagctcatctctggcaggaaaccactttgcactggttgtccaaaagggcaggagagcctagtgatgtgggcaaattccatcatacagggaggaaagctcagacaacttgtagatccaaacttgcccactgaaggccatgtcgatgaagttgagaggatgacccttgctgcgtccctctgcatcagacaaacacctcagaaccgtcctgaaattgatgctgttctgaagcttctccacggtgacaatgataccctcaagtgggcaagatcacaagtcgggttgtcatgcgagagcagcgatatcgatgaatttgtgatgacaccgccagcgccgaggagtaacaccaacatccagtcctacatcaacctcgcctttgatgtcgatgacgactcagcctctgtcagcagcaacgacttcattgcagccaacacctccttggaagagtatctgaagggaagatggagccggtcgtcgagctttgactgacggacccatggacagcgagggaataaaaggctcaccatcatatcgtaaga

SEQ ID NO: 26075 - DNA, 1724 bp, Zea Mays
ttcaaagagcagggggtagggttttgggttctaagtatcaaacaaggtccaaatcatactaaactttacccaaggcctctaaataatatttagagttcatataaaaagtttggggatttttggaattataattaattcccaaaaattctagaagcatggtttttggttattttaaatgctccaaaattcccaattggaactaaaaatcatagatctatttttattaacttctattgaaaattaggaagctagcaaaattagtcttacatttttaggatttttctacaattttctagaattgttttagctctggtagaaaaagaaaaagaaaaatgaatgaacagtcctgggccaaaaccagcccaggcggcccagtcagcacaggaaacagggatgcgcccacgcgcgcccgcgcgcgcgctggttaatttgcaccgaggccctcgctatatgaataatttgttaagaatccctagccactatttattctctctctaacagctgcacagaggtccctggaattttgtttcttctccaaatagctccctaaccgcggtgcgctcactgttcatccccaacacggcccgtactagccatggccagcgatggctgccaagtctagctatcggggaggcataaccgaccaagggtgacctaggaacactcgtcaatttgacatgaaccccctaagaacggtctgcccacgtgcacggcggaaaccgtgaccacgagctcatgttcccgcttaatcatggccgaattgaacaaacggttaccatgatgagcttcctgggtgtacaaagctactaaaatggcacttggaatggacagatccttactagagtgggctggccacggacgagctatccacggcggcgtaaagacccgagttgggggaaaatggtgtcgtggcggctctgggtgaaattggtggtggagcttggggctatacgaccgtaagggactctagtttcaccgtgcacactcatttgagaggaggggtcagagacagcgtgaatttgggcttcgatcgactcactgggtgtgaagtgttcatacctcgccgtggaccacggtgctattcgtagccacggcggtccggcgatcacttcacggccacggattacttctttagtgcatgcctagcacgtagaggagaggtacagtgaggtaggatcatggtacagaggacaccacggcggaaacgactgagtcggtggccgccggtgaataactccggccatgcctggctggactcgcgagatggtgccacgttcgagttatctattcccggattgattctcagcactggatcacgcaagttcatccgattcaacagtgcccctgttcttatcgcgatcagatattttcagagctcgatctttagttcttgtctgaaccgaccacctccttccctctttatctctggatttttgttaagaacagagctatctcccttaatagaatttgttcactatacatcagtctacaaccttactataggattcttggatcaaaaccgaacggattcaaagatatagcgcgtccaaaatggctccattccactgtgaccatttctgtcttcagattcagtttcagccatttgacacaagtctgacagagcaacgttgggcttgtttttctccaatttttgtgtaacaaccaaaggggatgtctgcatcaaagttattctcctataataggtctacaaaattgatgtggtg

SEQ ID NO: 26076 - DNA, 1931 bp, Zea Mays
gttattaccctccgatacaaaatcccatgccatgcgtgacgctacaccttccgttattaaacggcacggccaaggaaacaacaagaggaaaccttggacgcagacacgtccccatccactgcatgcagcagcagtccgcggtcagcaagcaacttggcagcaccgcgccgccgcagcccctccgccacgccagccatcagtccatcactgcgcgtctgccccttgcgcagttgcgctcgcggcccgcccgcacggtcccgccgcctatttatcaacgccgcccccacccgccactctctcccctctgtcccagaacgcgccccagcctcccacctagaactccgcgcccagcgctttccgtaaccaccaccaccacagcgggcacagtgacaggttgaggagacggccgccatgggagaggagaagaagacgggcaagggcggcggcggcggcggcggcgacaagaagaaggacgccggcgctggggccgcgccgcagcccatcgtgttgaaggtcgacttgcattgcgccggctgcgccaacaaggtccgcaaggccatcaaagcgcgcaccaggcgtggagtcggtgacgccggacatggcggcgggcaaggtggtcgtgaccggtccggcggacgcggtgcagctcaaggagcgcatcgaggctagggccaagaagcccgtgcagatcgtctccgccggcgccggttcgcccaagaaggacaaggagaagaaagctgacggcggcgagaaaaatgcggccaaagagaagggcggcggcgatgcagagaagaagaaggccgacaagaagaagggaggcggtgatggaggagagaaaaatgccgacaagaagaagggcggcggcggcggcgataagaaggccgacaaggagaagggcactggcaaacccaaggaggaagaggaggaggaggagaagcccaaggaacccaaggaggagacggttacgctcaagatccaactgcactgcgacggctgcatggaccgcatcaagcgccgcatctgcaagatcaaaggtgtgaaggatgtggcgttcgacgccgccaaggacctggtgaaggtgacgggcaccatggacgccgccgttctgccggcgtacctcagggagaagctcagccgggacgtcgaagtcgtcgcgcccggcaagaaggacggcggcggcggcggcgacaagaagggcaagggcgcaggagacggggcagagaagaagaacaagaagaaggacggtggggccgaggggaagaacgatagagccgcggccgcggccgcggccgccgcctccgcatcggtggcgccgattcccttggccgacgccggcggcatgtacctgatgcccccgcactacgggtacatgccgtacccgccggctcccggcggctactacggcgccgctccaccgcccaaccacgccggcttctacgccaacgccggtgtccattacccgcccccgacagcctacggctacggccccgcccacctccacgcgccccagatgttcagcgacgagaaccccaacgcctgctccgtcatgtgatctctcgttcgttcgctcgctccgccggtttgccatcggcgccccttcttccgtcattgtgtcagaccaagaatcgtggcttgggttttaacagtcggtttaattaattatcagttagtgttagccagtttaatcattgctccgagttcattaccagcagacctgtgtaaatgacagcagcgagtctcgctccgccccgttgtaatgcagcgtcatgtgtactttagccggacccgacaaaattttgcccctttgtcatcgcgaatcgccatttgcgacgtcgctgatggtgctcagttaactgttgaactgaatgcggtgtcgcgtcgcgtcgccggcgaggtcagcgacgtcggcagtcccctgtcatttcgccctc

SEQ ID NO: 26077 - DNA, 366 bp, Zea Mays
gccatgcatagcaagaccaagcaatggcatagaaataatgtaacatgcttacaattagctgcaataccttgatggaatacaaaagatctgaaaaattttcacccaaacgctggcgcttcttagcctccttttgctctttttccttgagcctttcaagctgatcatcatagataagctgcaaccaatccagcaaagtaaaacaataatctggaaaaatgcaacagataacatatttagatatcaatcgaaacttccaatcaatatgacaccttgatgttgatggttgatattcctttaagagcatcatcctccagaatagcagtttggaattcctctaatgtccatgatgttgtcataggaatctaa

SEQ ID NO: 26078 - DNA, 2015 bp, Zea Mays
cgctaacacgggtgcccagccgccgcagtctttcgaactgaggaaccctaggcccagcactcggcgacggcggcgcgccaccggcgacgggatcagcggcatcactcccctccttccccggcgcggcggcgccccgcacctaggccctagcactgcagcactcgacaacaggatcagcggtcgcgcccccctcctccttccccggcgcggcggcgccctgtagctgcagatctgccactgtccgcctgccggtcatggagcacctccggtggcgccccacagtgaacgagcgcgacttcattgagtgtgcgctccagtctgacctccgtgttgacggccgccactcctttgacttccgcaagctcaagatcaccttcggcagggaggatggctcgtcagaggtgcagctcggggagacacacgtgatgggctacgtgaccgtgcagctggtgcagccataccgtgacaggccgaatgaggggacgctggccatattcaccgagttctcacccatggccgacccctcctttgagcctgggcgtcctggggaattagcaattgagcttggccgagttattgaccgtggcctcagggagagtcgagctgttgacatggagtccttgtgtgttgttgctgggaagcatgtctggtctgtgcgtgtggaccttcacatcttggataacggagggaatctcattgatgcagctaatatcgctgcattggcagctttatctactttccggaggcctgaatgcacggttggtggggacgatggtcagcaagttacagtgcatgatcctgagaaagctggtggagagggtgtcatgtcaagtgttatcatgcagtgtttaagaattgcttcggtaaaggctgctgatataacaagcaaaataaagaaagcagtagactcatacaccaccgagaaagccctaaagaaagtaaaacgtttgccaacctcggttcctcagaaaattaatgtcactaatgtaactatggacggcaaaggtgatggtgaattggaaaagcaatctgtgcagatgcatagtgatgttcagcagataagcaaaggtgatgagaaccagcaaagtataaaaaggaattcacccttgactagggaccgaattgcaaaacacaaacaaacatccacattcattggtggcccatcaaattggtagtgattggtctgatgttttgtttcccaatttctagatatttagcataaacatttgctcgacacaagttttttttgccaactggtccttttttttttgccatgtagggacccatattctaaaggagttacattaagatccctcaaaatttctgatttgccggatccaccaactatggtcaaggccagcagccgtgaggatgcccaaccaatgactgaatcatctaatgctgaggtgaacacatcaagtgctgtggctgctggagagtctgagtcccatgaaattggatcgccgaagagtctaaaagatgctatcaaaccaaaacataaaagaaagaagaagaaaagtgacaggagttagtttagttgcaagcctgtaattttgtatgccccagataaatcaacgacagtctacaacacctcaaactcctgattgattaggtttcatccggggtgccatacatgggttttttgtgtgttttcaatcgtgactggtgctagtagtgacaggcaaattttgtacaagctgtagaattgtattttaggaatggttcagttaagctttcagtcaactttgcagctagttctgtgatgcgtgatgtcccagcactcttacatttcattgtactgctcaccgttaatcttccattgtccaaacggtcgtaaggattgccatatttgttccaacagtcttcagttgtggtctactggtcttagcttgaaaacaacattaaatcttgtctttgctacttctttcagtctgttttcgtgaggagagtaaattaaaactgtgcataagtgtaagtttgaaccataatcgttggcttcaaacatatattcagac

SEQ ID NO: 26079 - DNA, 2366 bp, Zea Mays
aaaaaaagttaattctgggatcggaagccggagcgccggaggaagaaaacggaaaacgacgcagcagcgaaaagaacccaatccgctggccccgccagcccgcccacagaaaagccgttctcccctctttctcgattcgacgaggggaagactcgtcgagccgccggccagcccatctcggcgcattcccggagaatccctccggaaaccggtcgatcctgggtcatccaacacacagcacttcgcttctcccgcgtccccgacccgcgcgcaagccctcatgcggttagggctgtaacgatctcgtctcgctaccggcggccggctgcggaacgggccaccccacgcgctcctctgagttcgttcgactaatctaccgctgactgtactttgggctgtcgccaccagaaagccctcacgagtcctttgcctcctcactccgtcaggctcgtcgccacagggttttgttcctaactttttagcttcaatttttgtcttgaatggcaacacctctggatgttccactggatgatttgattaagagcagagctgggaggggaacaggaagaggcaggggacaaggagggggtcgaggcagaggtgatggccaaaggttggctcgtggttcgtggcgtgggcgtggtactggcaacttccgtgaaaggggacttggggtgtcttcgcggaggccacttggtgttaatacttggtcctcatcatttgctattgccaaggcaagcacacaactataactgtttttctgttaccttcgagaatccaaattgcagtaggtacctgatgagaagtggctataaacttattaaaatggcacagcccaactgttccattcagaccatatctgtgaccatttaactgtggagcttcaaagaggatccaatggctttttcattgagacctgtctcttctctgccgagtatgtagggtggtgaggcatatgttggtttgtgctggctattgcttcaaagttcaaactgataactttgtctctactcgtgagcaagctgatggactacttaataatctgtggataaggccttttcatgtatacagaaatagcaccattatgtggaatgtcattcaataaagcaaaggattttgtgtggagacatgatctctttgaggatagcatggtagcagctgggctttctgggatagaatctggaacaaagctttacatttcaaatttgcactatggagtgacaagtgaagatctacaggagcttttttcagaaatgggtcatttgaagcactgtgctgttcattatgacagttatagacacccaactggttcggctgaggtgatattcaccaggagaagtgaagctctcgcagcactgaagcgatataataatatgcgccttgatgggaaggccatgaagattgaagtaataggagcagaattgggtctatcagctgctgccgtaccccagattagtgttgttcctggtgcaagcagaagagggcagagagaagttgttatgatgcctggtggaagtgggtttggacaaggtgcatctggcccatctagttcgcttcctgggtggaagcgtggaggctttgttcgaagaggacaagggcgtgttagttttcctcaaagagggcgagggcaagtgcgcagccgtggccgtggccgtggccgcagtagctttgttcagagccgtggacgtggctatgtgcgcaggggtaatgcagagaaatcagccaaacaattggacaatgaacttgacaactacaactctggtgcgatgaatgtcgactaagttaatccatcgtgacatcattcaatccaacctggaagttggaactatgttgaagctaagcttgttttctgtcggtattctgtcaaatgtgcacacttctgtcatgctctagtggcatcagttgaagattagatattccattattcctactgcaatagtcttgtgatatcagaatttgctgtaattgaatgatgaattatgttttcaaccgttgaaaggtttgctgtcaaaatttcaatattatcctagttattgtcagaattttcagtaggcattagccaaaaagattggtgctgactactggtatatcagaatttgctgtaattgaatgatgaattatgttttcaaccgttgaaaggtttggtgtcacaatttccatattatcctagttattgtcagaattttcagtaggcattagccaaaaagtttggtgctgactacaggttgaggtgctcttcaaaaaaatcctaatgtacctagaggtgacaatgagctttaaattttgggaacatattcggtgcacccaagccttggtgcgtatatgatacacatgaattaataaagttcataaaaaatctaaaaaaa

SEQ ID NO: 26080 - DNA, 1146 bp, Zea Mays
gccccttaagctcctcatttttttctttgtccggttggttggtgccggtggtgcacgaaagcttccgccttctctctgttttctcgtacgaaatttgatgccgatatgccctatgattatctgcacgcaagttgtctgcatcctcttaatggatggccatcttgagaactatactagcgactacaccctacaggtgttgctccggggcgtggccctggtagtcttcgccgccactgctggcgcttcttcgtgctatttcctgtcgaagatgattgggaagccactggtgttcacgctgtggccagataaactcagcttcttccagagacaggttgctaaaagaagagagaagctcttgaattacatgcttttcctcagggtgaccccaacattgccaaataccttcatcaacttggcttcaccgatagtagatgtcccctaccacatattcttactgggaactctcattggccttatcccagcttcttatgtgactgtcagggctggaatcgctcttggagaattaacttcgctaagcgacctttacgacacccagtcgatagcgctgctattcctgatcggtgttgtttcagtcacaccagcattgttgggcaaggacgaggcacaagaaaaaccatcagaaatggctgtaggcgcgtcgtgatcaccaaagcaccgagcacctgtacatatcaacatgcagccatgcagtggcttcattagttcagatcgacgggcccgtgtggctggatgacaaaaacggttcgcatggctactacacagcttggataggccattcagcacattatgattatgaacgattgaatgaatctgggaagcagaatgcccgttccacaagctgctctgatgtgtaaacgagtagtgctgttcggataggcctggcatttagtctaatccctgtttatattgaccagattcattcaatccatattcagtggttcaaagataatgccctgtccagctgctgtgttcctcaatgtctttctccatttctaatttcccttctgtgcctgattgcctactggttcttttgtgatccgcatcacttaggcatttggcaagtgatgatgcataatgccttccggtcggtaggaaacagtagagcttgtttcctccctttccatg

SEQ ID NO: 26081 - DNA, 3073 bp, Zea Mays
gagcccagtccgcccgggacgcgtcgcgtctacgtgggcacgcggtcagacgtgcagtgcagagaccacgaaacggatcccctcgagtcgagcgaaccgaagccgaacatacccacccatcgtctcgtctcgtcgctcgtgggcgtggcgctctctccccccacctcctcttttaagacgacgccatcgccagccggccctccctcgccgtccggcgccgtcctccttccctctcatcacagtttccacctcgcgaggggctcgcgcgcgtgcccatcccggccgatcgactcacgaattcgcgcgcgatcatattcgtgcaagggcatccccgcacgggcacggccggaagcacggaatcacttccccggccgcccccaattcccgggctcctcggcgccgatccctcgccggtgttcgctttccggcggtttccgctgcgtgtcgcgggcaggcgcaagcggcttggctcggctcggctcggttgtttcctcctcgtgccatccatggaggcgaagcagcgcccgcggcacggcggggagaggaggccgccgccggcgacggacggcggcgaggagtacgacccgtggacggcgtggctctacaagccgcgcaccatctcggtgctcctcgtcggcgcctgccttctcatctgggcaagtggagcacttgatcctgaaggtactgccgctcacagtagcgtgacatcaatcaagaggggtgtctgggctatgattgcagtcttccttgcctactgcacgcttcaggcaccttcaacgatacttattaggccccatcctgctgtctggcgcctggtacatggactggctgtcgtttacctcgttgctcttacctttcttcttttccagaaccgtgacgatgctcgccagttcatgaaacaccttcacccagatcttggagttgaattgccggagagatcttatggagcagattgccgcttgtatgttccagaaaaccctaaaaacaagttcataaatatttatgagacattgtttgatgaatttgttgttgcccatatccttgggtggtggggcaaagctgtaatgatacgaaatcaacttctactttgggtcttgtcgattggctttgagctaatggagctaacgttcagacatatgctgccaaactttaatgagtgctggtgggatagcattatcttggacatattgatctgcaattggtttggtatttgggcaggaatgcacacagtccgtcactttgatggcaaaacttatgaatgggttggactgagccgccaacgaagtatcatgggtaaggtgaaaagatcgttgagccagttcactcctgctcaatgggacaaggatcagtggcatcctttcatggggccactgcggttcatccaagtgctgttcctctgcgttgtcttcatgaccgtggagcttaacacattcttccttaagttttgcctttggatccctccaaggaaccccttggtcgtgtacagattgatcctctggtggctgatcgccatcccaaccatccgcgagtacaactcctacctgcaagacaggaaaccggtgaagaaggttggagccttctgttggctctctctagctatatgcatagtggagctgcttatctgcatgaagtttgggcatgatgctccagccctaaccgcgcataaaccccgcgccgccgctgccgcctcctgtcccggtcggatcctccgcgccgctcgcgccgccctcatcttcccagccccaacgcgacgcaccacaagggccctcgccatgtcgaagaaagtaggacgagcgaagaaagcagcgggcggcggcgagctgtcccgcttcctggagtcgcatctccagaccattagcgacaccttccagatgatggcggagtcggctccgggggccttggagcggacggagtggtctgaggtcgttaagctcggcgaccaggtctccaggcaggccaccgtcgctggaatgctctggagcggtgacttgcctgatgtagagaccctcaaagagaacatcgttgcttatttcaacatcctacagggatttcttttggtttgccacggaagcatggtcggtgctgggcctactctacacaagtccatctttgggtctgcaaaagacgtggttgactctagcttctcattgttcaagcatgctgtctctgcttatgaatctcgcagctctgaccgcaacacaactataccccaggtcacaggaactgtatgggaagcttgtgctgctctcaagaaggtgcctgcatcaaactgcattgccataggacgagccatgaccaggataggtgtgtgtctgaaagatgttctccgagaaatgaatgagctccctattggtggttctggtgatagtactgctgagaagtcttccaatggtgttgtcgacacaacgagttgttctgatagagatgagaggtctgatcttgatttagatgatgacgacgacgatgagttcactgaagaagaggttgctgttgccaagttggttattaacgtggtatctgattccttggttgtagtgaaagaggcaattcgtttcattactggtttgctcaggagctctggtaacaaagacaaagatggtgctaatgaggacagagttgagccaatggagaaattgctgagccactgcaaggagatcgcagaccaggtcaacgatcttggggcttctgtatacccaccacaagactcgtctgagatggagctcgctataaaaagactgtacaatggcatcaacgggatgcgcaaggaaatagggaacctcggtggcgcacctgagagcacctttgcagcccttgaaggattcgaaaattgccttggatctctgcgggccaggttagctgatgatgtggtgaacgagatggaaggtcttaatattagccattagcacgtactgttcagattttccatagcagtgttgtgccagtatatcttctggttttgcacgatggaaggagcttctgtggtttcagtaaatgaggcgtccggtctctgtactgatggcgttgttgcgggtcatcgattgtaaaggaagtgggcctggatttctgtaaaaac

SEQ ID NO: 26082 - DNA, 1185 bp, Zea Mays
ttcaggcctctcgtggtccttaccagtgaactgccaaaaaaatgaaatatgcatacagtcaataatggggtctcaagtaaaataaaagggaaataacttgattgctgtttgaagctaccattggtggaaagaaatcctttgcctcaatgcatacaacattgcacagtctgcatgtcagaccaagctgttcgtctagcacgtagtcatgaagagagtgctctcctccttttcctaaatcaatttaggcggtggtgaccaatctgaacggcgcacactcgacatggccattgctatggcactaagggagagcaagcccgtgtacctcagcatcagttgcaacctccctgggctacctcattctacctttagttttatgttcaagtacatgattatcgggagaaaccaagatatggtctgtgcgctgggctgaaggcggacgcgcttgctcatcaaccgcgtgcggtcgagtgctagagccaccgattcaccgtcgagtgcatcacccgctacatcgctgggctacagcagaagtatacacaaagtggtggagtccgctccctttggcttcgaacccgacaccaataagccagcgctgtaccagaccgatccatcgggtaccatctctgcttggaaggccaatgccatgggaaggaactccaactctatgtgtgagtttctgaagaactacaaagacctccggcaaggagaccatcaagtttgctatctgtgcacttctagagattgtgaactgaacttaaatcatgcattcagtattggtctctagagaggaagctctgccaagcattactaagaactgatcaggtatacttatccatggtggaaagaaaaggtgattgactcagacttgaaaagaaaagatggcctttgcccattgacgcctgaggagactactcttgtcctcagagcacttgacatcgatagaagtatgcaaatatacattgctgctggggaaatatacggtggaaagcacaggatggcttctctaacttcagcatacctaaatgttagccattcatgctgttggacgccttggatgaactaccttttcttcaacaaagatggagctcatgcagattgatttagtccatttcttgcaatgtaacatatatgtttcatacgaattttgtactcccgtcgcatcgcacgggcactcacctagtatat

SEQ ID NO: 26083 - DNA, 2790 bp, Zea Mays
ctcggaggggtcgttttcttggaactcatcctttgccgtggccatgggcaatcaaatcgaaagtcagatgttggagctcaggtaatagccacccatggaagcaatggaggccgaagaaggtccttttctggctaatgatgccaagttgcacgcaggaatttgtagagcatttcatccttctgtatctaaactttccaccattttcccctttatcgaagcatcaagacccagaagcaagtctggtatacaggcattgtgttcactacatgtggctcttgataaagccaaggggcttcttcaacattgtgcagactgcagcagactctacttggcaatcacttcggaaactgtgcttttaaagtttgagaagtctagaagccagcttcaggagagtctaaggcgcattgaaagcatagtaactgaagatatcggctgtaagattgtggagattgttggtgaactggagcaaattgtttttacattggatagatcagagaaggaagctggtgatgagctgatcaatttgctacagagaaacaataaaacaaatggttctagtgataatggggaacttgaggtcttccatatttctgctcttaaattgggaattacatcttctagggcagcactcaccgaaagaagagcccttaagaagctaattgagaaggctcgttctgatgaagacaagcgtaaggagcttgttgtgtcatacttgtacaatctcatgaggaagtactcaaagttcttcagaagtgagactggtgatgatacagattctcagggatcgtctccatgctcgccaacagtattaggcgtggatgatatgtgtagtccatacatcaatggccgtgcatttggtagacagattttgagcagtcagtcgttcaattcaaggtttggatctttcaattctaggctcggatcattcaattgcagacgtgctgctggtggtggtccaaggtctgggaatatctcagtccctcctgaagaacttaggtgccctatttccttacaactcatgtatgatccagtcatcatttcatccgggcagacttatgagcgtatttgcatcgagaaatggttcaatgatggtcacagcacatgtcctaaaactcagcagcagcttgcccacctgtcattgactccaaactactgtgttaaggccctgattgccagctggtgcgagtcgaacgattttccacttcctgatggtccaccaggaacttttgatgtaaactggagacttgcttcctctgacactgaggctacaggttgtgtgtctgttgaaagctttgattgtaccagtgcaaagagcgtcaagattgtcctgatggaggatgctagaaaagaggagccagcaaacagcgtatctggaacgctggatgacggttcttgtaacgatttcgatctgaacgaaggctatgggagcctgctgctcttgcttcatgaaagaagtaacatggacaagcagtgcaggctggtggagcagataaggtatcttctgaaagacgacgaggaagcaaggatccagctaggctcaaatggctttgccgaggcactggttgagttcttgaggaatgctgtggatgatggaaatgagaaggcacaggaagtcggtgcaatggctcttttcaatctcgcagtcaacaataacagaaacaagggactcctgttatctgccggagtagccggtctacttgagcagatgatatcgaatccacgcctatctggtcctgccacagcactctaccttaacctttcctgccttcctgacgcaaaggccgccatcggttcaagccaggcggtgccattcctagtcgactgtctgtatatccaagacgccagcgacacaaacggcagctccagcaagcacgacgccctgtacacgctgtacaacctgtcgagccaccaggccagcgtgtcggcgcttctagccgcaggcatcgtggacgccctccaccgcctgctcgcggagtctgcagcgcctccggaggaggggcttggctggacagagaaggctctcgcggtgctcatcagcctggcggccaccgaggctggcaggaaggagatcgtgtccacccctggtctggtcagcacgctggcgacggttctggacacgggcgagccgacggagcaggagcaggccgtgtcgtgcctgctggtgatgtgcagcgccgacgacgagtgcgtcgcggcggtgctccgggaaggggtggtcccgtccctggtctccgtctcggcggccgggacggggcggggcagggagaaggcccagaagctcctcaagctgttcagggagcagaggcagcgggacaccgcgccggcgccgcaaccccagcagcagctgctgcagagccagctggcggagggcgggaatggtggcggtgctattatcgcgtgccaccaccgggagtcgaagccgttgttcaatgtcaagtccaggaagctgggcaggacgctgagctctctgtggaagaacaggggcttctcgctgtaccagtgctaggatgcatgctagagtagtatgtgtttttgagttgatcagtgggttgtgtacatcgtcttctgccttgttttccgcttggtccttttcctcttctctggggtattgttctgtttcggggtaagaaagaggagagtgaaaacattggtgttcttcccccacctcctcggtggggtgatgtagggcattttccagtttggctttggccttgtcaagagctgtgtacagttgtttcttctttacaggtcttcggttctctgtcagtgcccccgttttcagatcagacg

SEQ ID NO: 26084 - DNA, 960 bp, Zea Mays
aagttctacctgaagtccacagcgtggatgtggtgatccttatgttcctgctggtgctaaactcctccccagtctccagagtaatatgttccagagctatacacactgtcttccttggtctggtgaccgcaccccatagattctcttacctcaccatggccaagtcatctggagcagttgtgcatctggaacagggccatgccaccgtggtctggcgctacggacagcctccacgccggccgagcgactcacgctttctccggccgtcttcacgcgagcaccaaagtcttgaaccaagacctcccgcttcctgttgcccacgtcgccggtcagcctgctcggccactcatccagcagagctggaaggcatcttcattttctcccattcgcttcaagccatggcctttaactactaccgaagcacttggtgtgggtctgctgcagctaataagaacaatgaagaaattgaagcatgtgctgttttggttgcaacattgaggaagaagcggcgttggggagggtctgttgttggccataagatgaaaaatcgcgaccgtattggtggcgacattcaactgaataatgactactttattgagaggtcgttgttcaaccctgagcaattccgcagaaggttccgtatgcaacaatcccttttcttggagattgaagataaattggcagctgcaaataagttctttagacaaaaaagaaatgcagctggtgtgtttgggattctccagtagacaaaagtgtactatggcttttgcggatgttggcttatggaggtccagcaaattttctagatgaaggtctgcgtatgggagaaagcacagtccttcaaactatcaaggagtttgctaaaacagtccttcaaacatttttctgcttagcttgtttcttccctcctctagatggcagtagtgattcctcagacgtcaaatgaaattgggaagacct

SEQ ID NO: 26085 - DNA, 2491 bp, Zea Mays
tatatgaacagcgttgaagctaacaaattaattaaaactagggatatagcattaagtccataatagaggatttttatggctggacggacggagtacaagtataaaccagtttccaagttccagccgccttgcagctactgcagaaacctatacgaccaagaccctatagactcgacactcgacaacttaggagaaccatggagcaggagcaccatggagagacccaaagcttataacgacgcttttctctctctctctctctctccctctcttttctcagccctacaggtttatttattcttcagtagaaccaattggtcccgtcgttcctctgtgccgcgcctgggtagtcgacgccgctagacatgttgaaaccaggaccgaacctgaactccggcgcgctggcggcgatgtcgcccatctggctcacgaatggcgtgtcgtcgcggatgaagaactgctgctgctgctgcactggcgcctgctgctgctgctgctgcatcatgctgttgttgacgtcgtcgaaggctccgttgccctgtacgaagaaaccctcgtccatctggatcctctgctggggcatcgcgtttggcctctccatgacggcgacgctgtcgctgctcgggttcttgttcggcacgaagttgttgtcgtacatgttcatcagctcggcgatggacctctgcccgtccatgggcaggctgaaatccagactgttcagtgcctggttgggttggctgaaggccggctggaaggcttgtggctgtggcggtgctgacggcggcttgttctcggtgctctgaggggttggatccttgtgcttgcaggtgtactggtggctgttgcgggcattccggtccaggaatccgtagctgtagtcactgcgcgggcactggacgttgttgcaggtgtacaatcggttgtttagcatcagctctggctcggctgcagcgggggcgttcctcttctggatgaactccacgtcggcggtctcctccttcatcggcgtcggcacgaggaacttgtcgcttaggatagcggcaccaaggttgaacgcggttgggtcagtgactgccgtcctctggttaccggcctcgtcccccttgcactcatcgatgatgtccacatcatactcgctcgagctggtgttgaaggatatggcacttgcgatgccaccagtagacgccggtgggcgtgcgcccgggttcagcttctggtacagctcctcttcctgcttgacgaccgccagccaggttgagatctccttggcagtcatcttgtcctggaggcacttggactggcgaaccaggcgacggatcttctctatgtccggtgacatgtgcttgatgacagcggtgagcacgctcaccttccaggccttcttaaggtcatgaggcttcttgtacgggggtgggccctggtccttgggaatgccgagttccggccaccactcctcgtcgccggtaggccaccacggtggaggaacgcccttctcgagcgggtagcgccgctgtgggggctcgcagtgctgcataagcgctgagagcagtgagcccagcgtagtgtcctgcagctcctgcaaggaatgggggctggcagcgcccgaggcgagctcgttctcggcgccagggacggcgttgtcggcctggtacttggcaatggcggccggtccgttgcggtcgaagcggaccttctccttccaccacgcacggaggttgtcggaggcaccactcactggcttgcccttctccggaatgatcccatacacaaacccctgcgcgcggcacacctccatcatcttgagcatgtacttgaggatgccgtcctgcgcgcgcgacatcttcttgcgccgggcctgctcctgcgactgccttggcttggacgagccatcagccagtcccgcaccgctagccaacgagtccttgccgcgggtctgctgcagttccctgagccgcttcagcttcatacggtcgcgccacatgcggcgctccagctcctcgatgtcctcgacgtcatcgtcgctgtcgtcctccccggcgtccgggaagctatccggaggcgggtccacgagatcgccctcccccatcacgcactggtcgccagaggacgtctgcggcatcagagacccgaagcccaggttcttgtcgccgttctgctgcaggagatccacgaagttgtggacgccagggaacaccacgctctgatccaccaacagcccgcctcccatcatcgtgatctcaacaaacaccacacccaacaaattcactcgcagtcacgggcagactgactctcttccttctactgctacttgtaaactcaccctagctcttcctgtttatctcccacttgctattttcacgggtgctccagctttgccatgacctgggagacgagaggagggaggggcgagtccagagagaagccgcaagagggaggagaaagaaaagaggaaggggggataagagcagctatggcagggccaaggcttctg

SEQ ID NO: 26086 - DNA, 941 bp, Zea Mays
ggagatgcctttcctttgtccttggtcccttgcagttaaaatcgatctcccgaatggagcaaactgtcagtcattgtgtgccctgcccctacatagtgctacgcctgtctgtgaaagtaaaacatctggagaaaaaaaagtcaccttttcaaccacatcttcctgcggagcaggagcagcagcgaggaggaggagctggtggaggagtgcataaaccgggcggagtgcctgacgctggcggtgcggcggcggagcaagggcgtgggcggctacctcgtgagcacccggtggcagaagaacttctggctgctcgcctgaccggtccacgaggactccccctcctcatcctcatcctttgacgcaacgcaagagttttacttacttcccgggctaatcgtttttacaaagtccaataataagtaaccaccaccaccaccactactgcatctgtttgttgatctgtaacctccagtgtcctagggtgtgtgccagccagtgtgcgtgtgcctgatcctctctctctccccacgatgtggtgctgtattctatgtatcgtcttggtttagctgtgctgctgtagcctgtagagtgtaagctagctgttgtgtagtgaaggcacgcagaagctgagccgatccgtttgccctgtctgttctgcgggaatctgtctgttttgcagagcggggatgcagaggcgcgggacggggacgtcagtacactgcgttgcgttgcgttgcgttgcataaactacgacttgtgtattgtgcttgtgcgatgtgtttgtttgcttgcttgcttgctacaatggttggtacagagttccataatgaagtgatgatgcgttttgactaactgtctcccccttgcgctctctctctctgtcaaaaaataaaaataaaactaggccgaggcattttgacaggtagtacaagcaagcaagc

SEQ ID NO: 26087 - DNA, 2093 bp, Zea Mays
tgccgcccgcatccgcgccgcaacccgcagccgccctgcaggcaaccgcccgcatccgcggcagcgccgcggctgcttccatccatggcgccgcggcttccatcaatcgccagcgcgtcctccgtactcctgtcatccgaggaaagccttccatccatggcgccgttgctgcaattccccccgcgatccacgctacctccattgcccacacgatccgcgctccctccattgctaccgcgatgccccttcccaggaacccttccatccatggcgtcgttgctgcaggtgccccgcaatcaactccattgccgccacgatccccttccaccgacgacactcaccttccatcgacaaaactgatcttcctccattccaccgacggcactcacctctcagatcccgtgctcatcaccatcgtgcccctcgctcgccgcccccacctcaccaagagccttagccgtccctagagaagacacggaggtgcagtgccagtgctttcctcaagtgcacctcggattttcggtaccggccagattgggacgaattcaacattcatcggctccaccaaaacactgccactatgatgtgtatgcttgcgtcaggacaggagacccaaaagtacttcatagatgaatgtgacattttccacaagaacgagatacgaaatggccaaggactgctgacgatgatgacgacatggccaccatcgctgccctcaggctgacattctggctctccaacacagttgtcctcagggagataattgtacaaacttttggcatctcacatcaatttactccatccatgatgaatctgagcatgaatggtggtgccaaaaaacttgatgggaaatctatgacaatgctgtggagaaacagctacaatggcatgcaagccaagtttgctgcaaggcagatgccagatgattggcaggaaacaagtacacttttggctacattagagaagattgagtcttggatattttctcgcattgttgagacaatatggtggcaggcactaactcctcacatgcaaaaacgagtagaaggatcatcaactccaaaggctggtagagtgctatgtcctactttgggtgatcagcagtagggcaccttttctgttaacctgtggaaggctgcgtttcacgacgcattcaacagaatgtgccccctcagtgctggcggacatgagtgtggctgtttaccaatattagcaaaactggtgatggagcagtgtgtagcccgtttgaatgttgccatgtttaatgccatccttcgtgaatcatcaagtgagataccaacagactctatatctgacccaattgttgacccaaaagtcctaccaattccagttggtgatctaagctttgggtcaggcgcgcagctgaagaactctattggaaacgggtctagatggctgacagataatcttggcatagatcatgatgactttgaggacataggagatgttgaagacgaaagaagagttgcagctgaaacgaaatcgtttcaacttctcaatgagctaagtgatcatctattttttagtttttcataattttcctttcatggcctccttacatgtttgatttcctatgatccatgagctgccaatcatgataacgcggtttcactatgcaggagatgaacaaggatgcagtcacaactgatgctatcggcagtatcagaacttgatggtgcttgtagactgttcatggtgcttgtagggatgatgtatgtctatggcttactgagctccaaccaactatggcaggagcgttagctaggacagcagtcagtctaacaattgtggacaaagttcagtctaccatacactgaagcgcacccttgttgctaaagctgcaggtgtgaacaactttgctcagcagaatggaggatcattgtcactagcagcaagacctcgagcccaggcagttaaccatcagtttctttccttctttctttgggccgagagagcaaagaaggatgatgcactttccaacctgtgtagcacgttgggacaactcaagaaatggcagtggatatggacatagaaattgacagtttgatggaggtattttatctcgcttctag

SEQ ID NO: 26088 - DNA, 4479 bp, Zea Mays
tggaacgggaagaaaggagagagaaaaaaacatttcccatttcccttccttttcctctctcgctgggtcatggtcatggggctctttccggtctcacgcacgcacaccaccaccaccaccaccaccccgaacccgaatatgctgcccccagccgcgccggccgcgccctgatcccctcacccgatgcgccatccccgccgcctccccctcctccgctgccacgccgccgccggatccgttcccgcccggccaccctgcgctctcggcggcgacgggtcccgctgaccgccctgggcccggcccgctgcccccatcgtgcttgccccacccacctccgcctcgcgccggcgcggggtgcggcgacggccgctagggtttccggggctgtcgcctcgcggtcccctccccccgcggattcgcgcccttcccctacgggcgcgcgtcgcgcttagggtgtgcgtgggtttggacttctcctcagcttggcttgcggtcgcgcggtcccgaggagctccacggaagcttgatttgtcaggtgggggggtttcgaggcagagacgccgatctgcggctgccggcgccgcggcattgcgccgcttcctaagtccccgagtgtccggagcctccgattcggctggtctgggagctgggctgcgacgggtgctgccttcagctcctcttcggcatcactgtaagcgtttcagggttctcgcttctggctggggctacctgatattggagggaaacatgtcggagaacattgatctggtgctcgagttcctgcggaagaaccggttcgccaaggcagaggcagctctccgtggggagctcaccggacgcgctgattcgaacgacatggccacgcagaggcgcgttgctgagctgaaagaaggcgaggagcagcaggagggcttggtgggttccaatgtagggcccaagggtgctgcggcagcgaggagtgcggactcgtcgagggagttcatcgtgaaggagattgatgttggagccctgccgaatggttcggatgggaagaaggggtccgggattggccagcctcaggataacgtgggggatctgtatccttggaccttcagcattgcaaacagcactgcagaacagctagctgagctgctggtgtcggaggaggtgccaagacataggcgtggtgcggtgctggcagagaagagggatcgaggtgttgggaccgagcaacctggcccggtgctggagcaaaaagtctcttttggaagagggaaaggaaaagttgatgctgctgggaggactgagaacagtgaacagtgccattttagggataaaagtctagtaccagaaaaagaggagatgctgaatggttgcacagttaagacggtgcttccattccccacggaaaacccgtcatctagctacaatagcacacaccatgaaaatgagaggaaagaagtaaagaggagcagtaatgcagatggtgttggaaaaggagcaaaaggacatcttgatgaggggaacaggcaatactactttgaaaaatccctagatacagatctggtgtctgaccgatgcttcgatttacagcttgttggagatagtcagcgtgaggagcttccgaagttacctccagtgaggctcaagtccgaagataagctagtcaacatgaactgggaggaaaagatcaatcaccatggatctggggccaagcaatctagtgctgatcatgcttttatgattgggtcttatctcgatgttcccattgggcaagagataacatcttcaggtggaagacgtacaatcggcagtagttggttgtctgtcagtcaaggtattgcagaagatacctccgatctggtatctggttttgcaacacttgctgacgattcacttgaatatccaattggtgaatactgggattctgatgagtatgacgacgacgacgatgttggctacacccggcaaccaattgaggatgaaacctggtttttagcacatgagattgattatcctagcgacaatgagaaggcgactggccacacaagagggaacgatcgtcatgatcgccctacaaaggatgaagatgatgaccagtcatttgttgaggaagattcctacatatctgcctggcagggctttgtatcacagaacagtgagctaggtatgctaggcaatgggaaattccttaatgattccgaacgacctcatcctgatgacctttttgtggaggatgatcagcatggctctgttaggtcaattggtgttgggataagcagtgatgctgctgacattggcagtgaggtgcgagaaagtctgattggaggtagcagtgaaggggatattgaatacttcaatgagagcagcttgagcgttagtggaaaaagacatcctcatcaggatactgaaaagaagagagtaggtgctaaaggagtaaaacatgaccaaatcatttacgctgctgatatccagaagggcaatctaccaccaggagcggctgatgtaggattttcttttcctccacctttgcattctgggaaaaatcatgagtctgatgctaaatctttgtggtcaaagaaggatgaaatgtattgcattaatgatcctgatgactgtcaaaatggcatggtatcagatgatatgcttgccacatggaggaaaaagaacagtgagtcttctctaaggagctctagagatgaaatgacgtctgatgttgttagatcaagaaattcaagtgcatcctatgacgaaacagaggacacatcgaatgctcggcaccacaaactagatgacgcacaagaagaagacactggaaccaacttggatgatgaggaagcagcagcgttgcaagagcaagtcaggcagataaaggcgcaggaggaagagtttgaaacgttcaatcttaagattgtgcatagaaaaaacagaactggctttgaagaagacaaaaacttccatgttgttctcaattctgtcattgctgggcgttatcatgtatcagagtatttgggttcagctgcattcagcaaagccatccaagcacatgatttacatacaggaatggatgtatgcgttaaaattataaaaaataacaaagattttttcgatcaaagtcttgatgagatcaagcttctgaagtatgttaacaagcatgatccagctgacaaataccaccttttgcgtctgtatgattacttctactatcgggaacatttgctgatagtctgtgaacttctgaaggcaaatctgtatgagtttcagaaattcaacagagaatcagggggtgaggtttacttcacaatgccaagactccagtcaatagctattcagtgtctggaggcgctgcagtttctgcatggtctcggtctaatccactgtgatttaaagccagaaaacatattggtaaagagctacagcagatgtgaaataaaagtaattgatcttgggagcagctgctttgagacagatcatctatgttcatatgtgcaatcacgatcttaccgtgcacctgaggttatactgggcttgccttatgacaaaaagatagatgtatggtcacttggttgtatattagcagagctttgcaccggaaatgtccttttccaaaatgattctcctgcaacattacttgctcgcgtgatgggcatcattggctccatagaacaagctatgcttgcacagggacgcgacacctacaaatatttcacaaagaaccacatgttgtacgaaagaaatcaggaaagtaacaggcttgagtacttgattccgaaaaagacatccttgcggcaccgattgcccatggctgatcaagggtttatcgagtttgttgcgtaccttctggaggtgaacccaaagaagcgcccaagcgcctcagaagcattgaaacatccatggctttcttttccttacgagccaatatcttcatgaggctaactgctattggatcctgtgtggctttagcatttgtctcaacacctaagcaccatgaaattttgatagatcaagacggaagattttctaccacgactgagccatggcatcagccgaaatcccaaacgcaaatgcagattcggttcgatcatgtcttggtgccacaatcagctggtcttaggcgccatgtaaaatcaatgcatgccatgtgttgtgcttgtaatataacttgttttttttacccttcatttccagccccgatgtaacaggccattttggttttctaggtacttggtgactcatttctagcaatagggctgtcatgttgtacatggtgtgatcattgttgagcggccccgtgccatgctgtgcacctgttacgcttctaacccaagtcatgaatgccgttcgtcgtgcttgtctttgaaggagcttaatggtcttgcatgccttttaggactgccaacgagtcgtatagagactgtatatgatgatgtataatcatgtatctagggaattctcaaaaaaaactagaaaaggtcgctaggtggtgtacacgttccggat

SEQ ID NO: 26089 - DNA, 2836 bp, Zea Mays
acccccgtccccccggcatccccgctgcccgcgaccataggccgctccgctccaccccgccgcgactttcgtcccagctccgccgcatctctcctcctccacctctaccccgccgctcgggccagctagcaggcatccactgcgccgcaaccgcgcgcagccagcagccagccagccatggagaagcgacggcgaggcagcggcggcgtgccgtccttggcggtggcggtgctggcggcgctcctggcggcggcctcgatgccgtcgccgccccgcgtggcggccgcgctgtcgccggactactacaaggacagctgcccgggcctggagtcgatcgtgcggtacgaggtggcgaggaagaagaacgagacggtggtcaccatcccggcgacgctccgcctcgtcttccacgactgcatggtcgggctgatctatatggttcgtgcgtggctgcgtgctaacagcagagtttagttccccactctcaccatcctctctcaggctctcaagcttgctctgttgtggaggaaatcagaaccattctctgtcgccgtctccttttcctctgttcaatccaggaagccgtcattggttgcaagttgcgcactgctttttccagtcagataacatgggctgtctgtcgcctgcctctttgcttcccagccagttcctctcctccattggcttggctcaatcgcgagccctgtgctgctcttctgaatcgtgctgaaaagaaagaaaaggaaatggggcttgccaaaagctactgcacgggccgctacagggcaagggcaggcagtgtttgtttagctggccggccggggacgcaagcgaacaacagctcgagagccccgcgtggtcgtcggttgcgcgcatgtgacgacgcggcttttcacccgcccttccggattatcaaatgccagccgagcagcggcagcggcagcggcgtgccctgccttctcgtcagaaaccacgccccccgaatcccgagcgcgtcgacccgccgaaaaccatctgtttgccgggttctgaaaatcgtcgcagttgctttggcagccagatctcaatcatgtttcaccaactcacttgcagctgtggactgtggtttggtttcggtttttcagactggttgtatgcagctcgacagctggttccatcttgcatgcatggtgccaagaatatgaccaagatgctgcttgctgcctctgcctctctctctcacacacacagctgctagtggcatcctgacaagcaagcagctggcatcttcttcttagtccagtctttttctctcacccttttcttttaatcttttttttttctggtgacgcgtgacaagcaagcagctggcatcttgaaatcgttatcgcagctattacattgcttttgtaataattcctactaagacaatagaaaagaatagaaaaagaaacaagtaaataatgtgccctgccgttccccccacctccacccacctcaaccgcagggctgcgacgccgccgtcctgatcgcgtccaagaacaacgacgccgagaaggacgcgccggacaacgagtcgctcgccggcgacggcttcgacaccatcaaccgggtcaaggcggccgtcgagaagaggtgccccggcgtggtgtcctgcgccgacatcatcgcgctcgccgccagagacgtcgtctacctggcggatggcccctactggcgcgtcgagctcggccgtctggacgggctcgattccagggccagcgacgtcaaggggaagctgccggacccggacatgcacgtcaaggacctcacgccggtgttccagcggaacggcttcacggaggtggacatggtcgcgctctccggcgcgcacaccgtcggcttcgcgcactgcagccgcttcaccgacaggctctacagctacggcggcgcgcggacggacccgtcgttcaaccccgcctacgcgtaccagctcaagcaggcgtgccccatagacgtcggccccaccatcgccgtcaacatggaccccgtcagccccatcaggttcgacaacgcctactacgccaacctccaggacgggctggggctcttcacctccgaccaggtgctctacgccgacgaggcgaccaggcccatcgtcgacatgttcgccgccagccagaaggacttcttcgatgctttcgtcgccgccatgctcaagctggggaggctaggggtgaagacggggaaggacggagagatcagaagagtctgcactgccttcaaccattagtagaggcctctcctgcgtgcagcagcgtttgtaatccagattatctcaagctcatgctgtttggagttcgatcgagatgcgtatactgagattgatgattgatcatttttctttttcttctttttttgttgcatacacttgccaaagcttgaaggtgttctttctcctctgtttgtttcttccttttttttcttttcttctttaataacctttttaccttacttttttttgggtgcaatttttgtacagactgaagagtgtaataccatgaacaacttgaagatttttaattgaaaaaggttaatctgactatatgcacggccaatataataaagaaaaggttactttggctcgggctcggttttgtctaagtgcaatgctgccacatgatcttatttttaattttcttctgaaataatgatcatctgcagaataattgaggtcgataaaactgcaattccaaaagagaagtggatgttgttgattaattggttggccagtttgaagaactttggcacatgaaagagaagagaacaagatatcagagcatgtttattgagtaaaccatatgccgcgtgattggac

SEQ ID NO: 26090 - DNA, 1485 bp, Zea Mays
cctgcgcatcgttgggccccttctctctcgctgccccggcatcctcggctttgctcgtttcgcagctcgagagaaggccatggtaatcgatctagagttcataagagctattgtaactgcggacgaagtcctgctgctggaacctcttgctcaggaggttatccctttcatcgataaattgaggcggcattttccattgaagagcctggaggttgatgttggggccacacaagtgggtaatgtgaatggcaagcatgctaaaactgctgcagagtgtgagctccccctcccctttgagtttcaggtgttggagctcgccctagaagctgtatgcttgtcatttcattcaagcctatctgatctgaataggcacaccatctttgtgatggatgagttgactaagaatgtgagcaccaggaaccttgaacgtgttcgaagtctgaaaagaaatctaacctccctgctcgctggtgtgcaaaaggtcagagatgaagtagagcatcttttggatcataatgagaatatggcacaactgcacctatccaggaagcaaataaaatgtccgcaggatgaaattctactggcttctgctgctttaaatagcaatcttccttcaaaaacaaagctgggtacaccaaattctgttgttaaccaagccatgggcattgctatgactgcgccactggccgacaatgtaggagacctagagatattacttgaatcttatttcatgcagctggatggaattcgcaacagaattatgatggtccgaggatatattgttgacacagaagactacatcaacatacaacttgacaaccaacgcaatgaactcattcagttccatcttgtactgatcattgtatcatttggcatagctatgaacacattgatagctggagcgtttgccatgaacatgcctcacaatggggagatgaagaagtttgtaggcccgttttggccatttgttggggccacatcatctttctgcttgttggtcagcgttgttttactgggatatgcaagggggaacaggctacttggcagttgaaggcggcgttagataaatctatgcaagatcatcttcacattgcctcctgacttggcggaaactaacgtggcataatatgggtgaaggcaagtgcctggtccatctgtatattgatgctttccaatcatacccttttggagtttgcatcgggcattgcatgccatatatgtataccgacactgtctactactattataacaatgagagacgcgacaaaaaattcctgtcattagcacaccagaactcaattgtctgattcttcagaatggtgacatagaaacaagtgattgataacagcatgttactttctgcgtttaagatcacaacattttcttgctctttcctcttctttttgtgtgatctgttcttcgtttaggtgacagacatgtatccatgtctagttgtctctacatggatattctagtgtcgtatgg

SEQ ID NO: 26091 - DNA, 178 bp, Zea Mays
caggggcggacccagcacccaggcacctcaggcggtggcctaggctgactcgcaggttctgatatatagaagcaagtataatgcgtagaaacaagcaagcaacgtagcatgtacacagcaaaagtataagcacaaaggatcacagtgtaatctcatctaggctgtctctaaatcctgg

SEQ ID NO: 26092 - DNA, 1575 bp, Zea Mays
ctcctgtcgtcccccaattccaggttctggacggacgtgggaggccccgcggcgcccgtacgtatatctagcggcgagacggcaagctcccgccccatctccgccgcctccgctccccgtcgtccggctgcgctgttgctgctcatacggatcaagctcggctacacccgtttctgcgagcagatcagaggacgccatcgtcgggtcggtagggatgggacatgttcactccgatcaaaaggcgaagaaattggcgattatttgcgaacaaagagttataattccaaacgggcatggggagaagcttgttggtttattacatcgaacaagttcaaagaatcttgtgatcctttgtcatggattccaagccacaaaggatgacagcatcttggttgaccttgctgatgccatcacaaaggaaggaattagtgcttttcggtttgatttttctggaaatggggaaagtgatggtgaattccagtatggaagctacagaaaagaggcagctgatttgcgctctgtagtattacatttctcagaacagaaatatgacataattgctcttatcgggcatagcaaaggaggaaatgctgttcttctttatgcttccaagtaccatgatgtccctgccattgtgaacatttctggccgctttgcattagagcgaggtatggagggacgccttgggaagaatttcatgaggagaataaacgaagatggatacattgatgtgaagaataaaaaaggtctagcctttctttacttgattaataatacgtcatttttttcatgttaatcttattatgagtctgattcaatggactatcccttagttttctaatcaattagcacagggtcatcaaacaaatgcatgcgtctgatctggtgtcaatcttgaaactgtcaaaaactaaactataggctcggtgtttctgctcactctttccaagccaggacacatggcaatgcgattgtaaagaggatcatgcatcgcgttgttttggtggttgtgcaggggagttgcagtaccgggtgtcgaaagcgagtctggatgaccggctgagcactgataccctattctccagccgtgccataagcgaaggctgcagggttctcacgatccacggcgccaaagacgagatcgtcccggcggaggacgcccggcagttcgcggcgaacatccgcaaccacgagctgcgcatcgtcgcagatgccaaccaccgttacaccgggcacagggaggagctggcctcgctggtgctgggcttcctcagctcccatccctaccagatcacgtcgcgcttgcgtccgagactctagatagagtagagcacacccacttgaccgtttgcgaacaaaaaaaaatcccctgtaccaatctaagagttgtgggtgtggtgatgtgtttatccagaaccagaacacgagcacctgccgtccaaatcagcgtgactcgctctcgctctagaatttcaaaaaaagtcagtgccaggcatctaacagcaatctcctcatcattgcgttgcgtccaaaagaagtgacaatggcaggtgggccccgcatggcaggccatcc

SEQ ID NO: 26093 - DNA, 1540 bp, Zea Mays
ctatcacctaaaatctaggatatattattccccccaaaacaaaccctaaccggccggcccaattctcacgcgctcgccgcctaggagcattcacgttggcggcgggcggcggctcggttcctctcctccaccgcacctccaagaatccacctccacgactgagctgacggctcggtagcgccatggcagttcaccggctccaaccttccccatccggcctacagtgctccaccgcccggtcgccagtgctcctccatgggccacggctgacgggtgcacgcaccggtaggagaggtggatttggtggacctagattcgatgtgcagagagcgacttggaggtggctgacatcttcaagcactgcatcatgcagttacaactactgttggccatacagggaaatgctgggcctattataccaattgttcaaagcatggaccttgtataattacatgtttttatcatagatagattaatttctgaaatgcccatagattggtatatttgtggaaatttgtggtataagatttttctgttgatgtttgcaggttatttttccagcacttgacattcgagtgaaaaatgtcgcagggacatattctcttgaacataaaggagaaaatgatctcttcgcacatcagacaaggcttctactctttcagaagaaagtcatttttaggagaatcgtgaacaaaatgaccagatgtttaggcctggttggaaggacatttttcgaatgaatcagagtgagctcgaggctgagatttgaaaaggtctctcgagattctactcttgatccaaggaggaaggcctatctgatccaaaatctcatgaccagccgttggatagttgctcagcaataatcaccacaaccaagcgtcgaaggacataatggatgtacacgatgacctggatgtgttccttcgtaccgagacccagggaaacaaatatttgggctgtgagcattacaaaagaaactgcaagcttgttgctgcatgctgcaataagctattcacttgcagattctgtcacgataaagtaactcaagaggtccacttattgactcttatgaccatgtaattggtgttaatacaactacattaacatgtaaaggttggtagatctggaaggtcttgatggtctaatacctatctatgagtacggaagaaaaggcgggagaagtcggtctctgcagcatcgcgcgtgaaaaaaaatcagccaattccacgagcattgatgttgtcatgacttcaaaagaggagagaccatgctaagaataatgcattatgacatttgtcaggcttacatatcgactgtttgatatggatagatgtataggtttatgaccaatccagttcaaagcaattggagtatagaagaaataaggagaaacaggaaagctctgtacatcttgcattttgctgttgtttgtcgaagtttcaatgtctgtcgcgtgacaaaatatagttgtaatttatattttggcatgcacgaaacaggtgtatttattcatttttgaacgaaattttatgtcaaatcc

SEQ ID NO: 26094 - DNA, 256 bp, Zea Mays
gaaatctcgatatctcccttttgttggtgatcccgtaaaaagtgataccgaatggctatgtgtttagtgcgactatgttcaactggtttatccgccatgcggattgcactctcattgtcacatagaagaggaactttggttaaatttgtaaccgtagtccctaagagtttgcctcatccaaagtagttgtgcgcaacaatggcctgcgacaatgtactcggcttcggcggtagaaagagcaaccgaattttgcttc

SEQ ID NO: 26095 - DNA, 1538 bp, Zea Mays
atttttgcttcaaagatgagtccgatagattgttaggtgctgttgttgtaatagcagcgaatgctggcggtgcatggacaccaattggtgatgtgacaaccactatgttgtggattcatggtcagattacaacattgaaaataatgcagggcttgtttattccctccactgtttcgttggctgtcccactggctctgatgtccctcaccagtgaagcaaatgggtcatctgagaaatcttccagcttgctgtcatcagagcaggtggctcctcggggacaacttgtactaggtgttggaattggagcattaatgtttgttccagtctttaaagctctcactggtctgccacctttcatgggtatgctacttggtcttgggattctctggatcctgacagatgcaatacattacggagactctgaaaggcagcggctgaaagttccacaagcactatcacggattgatacacaaggaattttattcttcttaggtattcttttatcagttggcagcttggaatctgcagggattttgaggcagttagcaaattatcttgatgccaatattccaaatgctgatcttattgctagtgcaattggtgtggcatcagcaattatagacaatgttccacttgttgctgcaaccatggggatgtatgacctgacttcgttccctcaagactcggacttctggcagcttgttgcattctgtgcgggtactggtggttcaatgcttatcattggctccgcagcaggagttgcttttatgggagtggagaaggtggatttcttttggtattttcgcaaggtgagcggttttgcctttgcaggttatgcagctggtataatctcttaccttgctgttcaaaatctccatctatcccttcccacgtcgctggttgagatcccttttatttcgggatcataaaagcttggcctttgtggtcattttagaatgatcacactctacatatggaggtgaacatcattattgtttccatatcttatgtaaggtccagtgtgtcggcatgtagagtattcagaatttgggggataagacagccctgagcttcaaggccagacatcagttttggacaggcttatctcgtgctgatgaactttagggtagggttgagctccttactagggggctgtttggttcgtggctaaatatgccacactttgcctaaggttagtcgttcgaattgaagaattaaccttaggcaaaaaagttaagcaaagtgtggcaagttagacatcaaaccaaacaagccctagaactgtgggttcgaaccaaagtatgccactctggatatttgtgaacctactcggcaaacaaaggagcaacttagaaatgtgcaattttgtaagaaacaatcccttgtaagctaagagtgtaataagatacagaaatcttgtataactgctgtctggtaatctcattgatggtcttgttaggcagctgcatagttcaaaacttcataccacatcactagggatgagttttgcatctgacatggatacctggttgaacaag

SEQ ID NO: 26096 - DNA, 1528 bp, Zea Mays
cgcccccgcgcgcacgacttcgcttcccctccccggctacccgtccccgcggctgactcgtccacctcctgtccatattttcccctcgtgtccgccgcacgcaccgccggaaccctagcctcagccgccacaggcagccgggatggagaaaggagcctcggaggcgtcggccccctgcgctcgctgcggcaagcccgcgcagctccaatgccccaaatgtgctgaacttaagctaccgcgtgagaacgcagctttctgcacacaggactgttttagggcagcatggagctctcacaaatctgttcacccaaagcctggtgcactggcatcccagcagtctccggaaggttggaaatattgtttgagaaaagggcggggacgtgcattgcaacttcctcgttttgaatggacaggggaattcccaagatagaaccagatagtgacttgcagaaaagagtagagattaagacccctgaactaatagaaaggatgagagaaacatgtcgaattgcaagagaggttttagatgcagctgctcgtgtaattaaaccaggaattacaacagatgaaattgatagagttgtccatgaagagacaattgctagaggtggatacccatctccattgaattaccatttcttccccaagtcatgttgcacgtctgtcaatgaagtcatttgccatggaattccagatgccaggaaacttgaggatggtgacattgtaaatgttgatgtaactgtatactataaaggtgttcatggtgatttaaatgagacatattttgttggaaatgtcgatgaagcttccaaacagcttgtacgttgtacctatgagtgcttggagaaagctattgcaatagttaaacctggagttcggttccgagaggtcggggaaatcataaatagacatgcttcgatgtcaggtttatctgtggtgaaatcctattgtggccatggcataggggaactgtttcactgtgccccaaacattcctcattattcaagaaacaaggctgttggtatcatgaaagctgggcagacatttacaattgaaccaatgataaatgcaggggtttggaatgatcggctctggcctgatgattggactgcagtcaccacagatggtaaacggagtgctcaatttgaacatacacttttggtgacagacacaggatgcgaagttttgacggcacggttaccctcatcaccagacgtttttccatggttgaaaccgtgatcgggcaccccaacagcaacaagaaagtgatactgacaaaccggggctgcaaaatttttgttctactctttatcagtcagtcaagctgaatattttgaaaattttcagaccaaacagtgataagcatgctactgctggacagtcgccctaattgtctgtcctgcggaattgtttctgggagtgtattgttaagtcggttttctccgagttatacgagacatatggcttgagttgtgtcaccaatatgattatgccataggactatcagagtttacttttaatttcagag

SEQ ID NO: 26097 - DNA, 1375 bp, Zea Mays
accgggagcagccggtggcgcccctctccgggagccgggatggcgtgggccgtgggcgtaagcgtaagaaggcgaggcggggttggggggtttaagaagggggttggtttggaggggttttggccaacccacaccaccgcaccacgcacctccaccaccagaagaaaaaaccaaggcggagggcggagaggagagcaagggggcagaagggaaataaaaataaaagaggagaggcgaagcaaggcgaggaggaggagggagcacccagaggcaggggagggggaataattccgcaggggctcgagggatctcgtcgggtctggccggagcagcacggcgaggcggcgatccgagggcgagcggaggcgggcgagcgtcgacgccggcgagatttgggtcggggacaagccatgaacaacgcaaccaccagttgttaactaaccctcttttaaacttcaagcaaccaaagccaagagcagaaatggttttccaaaagtggtcgtcgtcgtcagagatggagtcgtgcggtggaggccaagtcccggagatgccacgcgttcccaagtccgcgaggggcaagagatcggtcaggaagaaggaggcccagagcccggcccagatgtctgcaatcgaccttctcgcaaccgtggcagggaagctgtttgacgagggggcggggtcgctggggaacacgagcgccggtgccccggccttggctgcgttcgcaaaggatgccctggtgaagcaggagcagtgtgatgagcaaatgaagctgttcaagcatgaggcgacggatcaggatagctgcaatgagagtgcaatcctcccccacattgtgctccagcgggtggtgaataatgctaggaatgaggatcctaaggcgaagtctgaggtccaggacaaggaatcctccatgatcagctatacgaaggctgaattgggttgtaattttggtgtgatcgcagacaggtggtcgcctgaatccgtggaatcaggagccttcacaggagatgcagtggcgagactgatgatgacggccccggcaggatttcataagaatgcacccgaaatgtatagtttgcttgattcaatggatgtggatgtcaagccgcctcctttggtcagctctgacagcaccggcgagatgccattgcatggcgataaaattcaccgctcaacctccttaccgagggccccaaagggggtggggttttttgctgtagatagagatgatgacgacgacaagtcctctgggtgcactcatccgagcaccgccactaacaaggatttcacatccaattgtaaagctgagtataataggtaacactacattggtggaatttgtattcaaaccagctccatgtaacttgaattc

SEQ ID NO: 26098 - DNA, 1183 bp, Zea Mays
ggtttaaacgtaaatatttctcgaaaatagaactgaaaaaaaaatcgggcataattctcgcgtcgtttcctgtgacctgtgtgggctggtggcaatcacctacttttgcttggccatctgacatctgtgaggtttagttgcatgcgagatgccacgttcttcatctaggcggcacgtgttggacggctggctggctcatgagccgcgagcccgacaatataaagccacgttcattcccgcagagcccgtcacgcagtttctcgcgccatctgaagtcagctggggcgacgaagaaatgtcctctagcgatcaaaacccagctgccacacccgcgtcgtcgggccccgccgagccctcgccgccgggcaggccaacggcggtgtcctcgcgtgtcctcgacatgggcgcgcagctggcgcaggcgctgaagccggtgcggcagatgaagcagcacgcgtgcagcttcgcgctgtacgcccacgacttgcaccgccaggtggaggtccaccacttcgtcgcccggctcaaccaggacgtcctccagtgcgccgtctacgactccgacaagccctcggcccgcctcatcggcgtggagtacatcgtctccgacaccatcttcgagggcctggccccggacgagcagaggctgtggcactcgcacgcgtacgaggtgaaggccgggctgtggaccgacgtcggcgtgccggaggcgctgcagagctcggagatggcgagcctcgcaaggacgtacggcaagttctggtgcacctggcaggccgccgagcccggccgcgtgcgcggcgagctggtgcgcggccgtgacgagaggtacgggatcgacagctcggcaggggggctcaaggcggcgagggtggagatggacgagccggagtggatcaacccgaacgccgactactggcggctgcacggcaaggggttcgcggtagacgtcgtcccggccgagatgaagcgacacgcgcccttcccgtgagctgccggtcttcttgttgtgacacgtccgtaaggagcataaagatcgttcttgtatccagaggcgtattttgaagaagaagaaaaagagcttgtgttgcgtgcctgctgttgcttctctgtttgcagctgcagtctaaaaagagcacctgcgtggctgcgtcaaccccgattttagctattggctttgatt

SEQ ID NO: 26099 - DNA, 418 bp, Zea Mays
ggcgggccacaacctcttctcctctgcccgacttggactccagaggattaaaggggttctcgtgaccaccacctcttccctactcgcctcgccgtagtgaccagagcacgtgtaacacaaaatcgtgggtgagagaagagggctcgcggccgtgctcgattcgccacggtttaccggatcctgctgtcgattggaagcgggaggtggtcagggaagatcgcacgatcgtgggtgtggcgtcttcttccgcgaaggggcgtcgattgctcgtcaattgcttaccgtggcggaaaatccccgccggaccgccaagcttcgtggacgggcatcaccttacctcggctggccactgacgagcaacccactgtggaacctgagcttcaacaagtagagatagctgagcaggagctcgttgaag

SEQ ID NO: 26100 - DNA, 1006 bp, Zea Mays
attcaaacattattgaagccccctgcaaccaacaccgcaaacagagctgccaggagtccaggacatcaggccccagaaaaaacaccggagcacaatcaaggattccagtccagtcctgccaatggagtgcgttttgggcttggttggccgcgacttcgcggtggtggcggccgacacctccgccgtgcagagtatcctcgtccacaagactgacgaggacaaagtaatggtcctcgactcgcacaagctgttgggcgcttcaggggagcctggtgaccgggtgcagtttacggagttcatacagaagaacctccacctgtaccagttccgcaacaccatcccgctgtcaaccgccgctgccgccaacttcacacgcggcgagctcgccacagcccttcgtaagaatccatacatggtcaatgttattctcggtggttacgataaggatgttggcgcctcactgtactacatcgactacattgcgaccttgcacaagatcgacaagggcgcttttgggtacggatcgtatttctgcctgtctctgatggacaagctgtaccgcccggacatgaccgttgaggaagcggtagacctcgttgataagtgcattaaggagatccggctgcggctggttgtggcgccccagaacttcgtgatcaagatcgtcgacaaggacggggccagggagtacgcgaggcgtgaactcgtcggcgacagtgcacctgctgaagctgcagctacggttgccgcctgaggcatgaaacttgtttgtgttagttgtttgtttctcagcgaggctactatgtaatcaaatggatactggtgggggtcccacagctgttttttaatcaattttagcccagacatgtaattctgtttctgcactaattcatgtcttcgccgagtacaagttgacacggagtgtgtggcgcttgacattgctgtgcaccatttctgatcactgaaatgaacataaaatctgtgccaacgtccaacggtgcgcagc

SEQ ID NO: 26101 - DNA, 4772 bp, Zea Mays
attccgaaaaaaatcactaacagaaggacggttcaggaagcattgacagatagaagatggattgctgatatcacaggatcactctcggtgggagtattattggattatcttcatctttggaatttaatttcagattttgagctgctgccagatatagaagataaacatacttttagtattgctgcaaatgggacttattctgctaaggctgcatatgatgggttgttcatcggggctgtgcatttcggtcactatgaaagagtttggaaaacttgggccccctctaaatgccacttcttcctctggttatcggtgctaaataaatgctggacaacagataggttggcaaagagaggacttgatcatccggagaagtgtccgctttgtgaccaagagtctgaatctttggatcatattttggtttcttgtgtttttgcgagagaattctggttccggctgaaggttgatgtgcattttcagactacaaaatctggctcctacacctagtacggtgtcttttacgggttggtgggagatgatagacaatggctccggagatatgattatgaagggtgtcaactcccttattgccttgggagcctggattatttggaatcatcggaatcaaattgtctttgatggaatctcccctagtgtttctgcagctctttgtcaggcaagggaggaacaacagttgtgggaaatggcaggagctaagggtctctcctttcttgccgcaaccatcaggggcacctagctgcctggtttatcgctgatgggctggttttgtttttcaggatctgtttgttctttttttgtttttttctcttcttttttctttggtttttttatcccctccggggaggtcttttgtactttggtctattttggaccctcttttccttctacttaatataatgatgtgcagttctcctgcgctttcgagaaaaaaaaacgtcatccgcggcctcaacgaatgctttgccaacattggtcttcacctttgacgtgggcgcctttccccacctttttcgatgcttgctctgagctccttcttgaagtgctcaggccatcagggcacctccattgacccctactgcccttgcggcctctatcattccgcctgctcccgctagtgcgcccttggtcttcggggcctgacctctggcttcctctcgtagtcttgtgtgctttgtggagcgtcggggggctcaggcctagggcctttaggtcccgtaggtcatgagtgggactcaggcctaggactcgactcgtcggtcgtgggtgggaggcggactggctccttcctacaccgcggctcggtgctgggcgcagttaatgtggcgtgcgtagtattgatggtgagagcagccctagggccagatgtggaatccactcgagtggctctctggcggttcgtctgatctccttgccaggcttcgcctcgtccgacctctggcgcggtgcataggggtcatctgggtgcagattcacataggcgagcttctccctatcttatctctcactcgtggtctcgtgggggcccggggatccgatccccgacactcgggatatggatcgccgacgtggggaaaggaggcgctggggtggcagctacacccgcgggaggctagggaggcgtaggccgagcgccgatggccgggtgtagggggatgccgccgaccgcaaccgagaaggggaggtctgtcaccggaggaggaggtgcggcagcggccgtaatcgcaatcgtccgcgcgatggctgcagcggtggttggtgcagtggacgttcgtgccgcttgcgtggggagggaggcgagcacatgaaaaggagaaagggagggaggcagtcgtggacgccgagaaggtgcgggcggacgcggtgacgatcgctctgggagatgcaggggaaggagagggaggggttgccggaggactgctccatgacggtggcgatggccgggggtgcgccgacggctagagtgcctggtggttagggaatgtagaggcttgataccatgttggaatagaaaaccctaaccagagttgatagtgcattaatataatagagttaggtgggtctgaggcccattacaatagaggcattacaatagagcatacagttacgctaacagtatcaaatgcctttgaaatctctagcttcaaaaggatgtatggttctttacttttatgtagggtctgagcaagctgctgcacaagtaagaaattgttgtgaatattcctcctaacaaaggcgctctggttgttagaccagcttaggcagcagggtgccaagcgataagcaaaaatcttggttaccaactttgcaaagcttgagttttaggacttgagctttacaagatgagtttacagcttggacttgatcagatcccatctgaggaaaaggatctccagttttggcacttgaattatcaccattgtcgaatagccaccctaaaatcaaagtatttaatttcttctgtgactgctaaaaggttgaaataacttttctaaaagaaaattgcttgtccatgggagacccctgggcattttttagtttataagttagcaaattacatcctgattggtgattggctaggaaaactagctaaatcagtttccagggaggtaaccacaaattgctgagtcctggatttgagcacaggtggccttcctctcaactgggaagtactttctaatttccttttcagatgtagatgtaatatttccaagaagtacaacccttttccttttttccttgcaccaaaccttttgtaactttgttcccagataccgggttctcggtcttgttagaagtatattactaaacaatctatctgcctacactgcattgttcagcagatgctggattagataaaatgtgattttaacaagtactccctatgttccagtttattaggtggtagtgcatttttgagaaagggcagattgttaggcggcatacatagcaaggcattgcattataaattcctgtggaagaaacacagccgttttatccgacccgatccaacaagtgaatgcaatgcaccagatcagtgtggcacctggcgtgaattaaatcttgctcacactctggtgtgtgtactcttagcgcctttaaattgggtgtggagggagtgtatatgggtgcaaaaataacatagctttgtacaagtaaacaaacatggttggacatcacttttacctaagatttttattgaggactaactgtctctgcttcttacatcctagactgaaaattttccattagatgtccacattgccttggaatgtattgattgtgctatctctttcagcatcaacatgggaaataaggactttgtatacatcaggatcatcgagtccaaaatgtgttgttactcttatgttggagattgctccaagtttttggggcagatggaagagaaggcactcaaattttgacaaaagcatcccttttgctttgctcagccaagtagcaggtataagagagtacttcgcagccaatccagccttgacatctgagctgccttcaacagtagtgaagtcaaaagcatctgaaactttgatcatccagagtgaacatgaagattctgaacttggtgatgaattttatgatgcacttactagaggtgaatccttcgaagatggggatagtgatgatgatgatgatgccacaactccaaaggctagaaaagtaaagttgaagaatgtgtcatgggctattgcaggcttggctttaaagacaactaaagctttggttgagacaagtgaattggttacaaattctagtccagttactgttgaccccagccacttccatggcacccttcatagagcgaaaactcaaaatgatcaaaattcttggagtgcacctggtggggagaagtttatgatcagagggaagacttacttaacagattatcacaaggttgttggcggtgatccacttctagagctacttgcggtcgattggttcaaagttaatgaacgctttgattcagttgccttacatcccaaaagccttgtgcaatcagaagctgcaaagaaacttcctttcatattggttataaatttgcagattcattgatggaactgatgcataccgagatgccagatttaaacttataccaagcattgttgagggttattggatggttaagcgtgctgtaggaacaaaagcttgccttctgggcaaagcagtaacgtgcaattatcttcgccaggataactttctggagatagatgttgacatcggttcatcatccgttgcccggagcattattggtctagtattgggatatgtcacaagcatagttgttgatcttgctattcttattgaggccaaggaagagaaagagctccccgagtacattctgggcactgttcgtctgaaccgtgtgaatcccgacagtgctgtatcaatctaattacgtttctagccgatctatgcaaatttactcttatcctcttttattctgagagaaacagcgtggcattttgaaaatgtgaaatagcattactatttgctgatccccaatcgagggtaacatatgtaaattggcatgaggcatgactacgtgacgcctttcgtaaatagaataaatcaatggttatgtaatattaatatcccatatacgcgtgtcataatctatgtggcttaaaagtggcatcaagtcatctagtttcctgtgttaacttcttattccttaggtagtcagacattaacagtgtgtttggtttgaggaatgaagtgatccatctttttctcac

SEQ ID NO: 26102 - DNA, 2192 bp, Zea Mays
ccgacccattgctatcctacctgccagcgaacctgtctcgtctccttgttgcccacgtggcctcgccgtcgccgcgagctccaccttcctcagctctgccccgagcgcgatgtggcgagcgacgaggcggtctccgccgttcctgcgatggctatcgtcggacgcagcctcctctaaggcgccgcggcagcgcgtagcggcgctgtgggggaacggtgactacgggcggctggggctgggctcgctggagtcgcggtggagccccacggtttgccccttcttcctcgcccgcgccgccgacccgcccgcctccctcgcctgcggcggcgcacataccctctttctcacccagaatgggcgagtgttcgctacagggctgaacgactttgggcagctggggataggaacctctgttacacatatgctggagcctgttgaaatttctggatttcacgaaagagttgtagaagtttcagctggcaaccatcattcttgtgcagtcaccggtaatagaaaataattagattctcttaagtgcccggttttattcactataatatggtgaattcgttaaatgataagagcagccggaagggaaggtgccatcttcatcttctatgttactgtatatttttaatggagcagcagatacttcatgcttctcgggtgtagaagttagtgattgtgattccttgcttcttgtttgtgtgggcctaaatacacaacacaagtatgggttgaggaaacattttttttgcctttctggttggttgaatattgatctagtgttgaatgttcatttcaagcaaatttccctttatcgcatgggaaactacatgtgtatggtgttgtaatatgttaattataatattttttattatggccccaattactctactagatattgacaatgggtttgataaaccaaaatacatattgggtaggttgcacgttcaaacaaaaagggccatatggaattatggatttgtgcactctccctaggcctatgtgcgatcacaacttaattgaaatatgttattgctcatttgctaattgagatgtcatatgctctgtaaaatgtattaattttgtaaggttattgtcactgaatgctgcactgcagcatacagcacattacaccataataatgttttactggtatctggataagtataacagaaaagaagtgtgataaccatctcttctatttatttataaaattgatttgtgctgcacatatgtgcattataacaattgtattatcaattgttagagtggacgcactaaccaatcaaacacaaaagcttaagctgttaggaaaaagtaggcaatctacttatacacttcaatactctcactcacgtgcaaccagagagaaaggtgcaaacatgtaaataaaggggcagagacacaaataaagcctctaccaggatttgaactcaagacctctggctttgatactatgttagagtgagatgcactaaccagttcaacccaaagctcaccatatcaaagtggacacactaatcagtcaaacccaatagcttaagctgttagaagaaggtaggcaatccacttatatatttcaacaccaatctccactaaatttttgtatttttactttcttgaacagcggatggtaagctctttgtttggggcagaaactcaggtggccagcttggccttggtaaaggggcaggtaaagtagtttctaccccaacaaaggttgattgtttgactgacctcagagtaaaaacggttgctctgggatcagagcattcaattgctgttacagaggaaggtgaagtcttgagttggggagctgctggttctggtaggctcggacatggccgtcaatctagcatcctgggattttctctgacctcaactgaatatactccaagattgatcaaaaactttgatggtatcaagattaaaaagatagctgcaggaatgttgcactcagcttgcattgatgaaaaaggtactttgttcatatttgggcagaagactgagaagggatttggaagaccgaacgaagaattcagaccaaatattgttgaagagataccattttcagaagaagttgcttgtggaggttaccatacttgtgttgtaacagatagcggtgatctgtattcttggggttcaaatgaaaatggctgccttggtctgggttgtattctgatatg

SEQ ID NO: 26103 - DNA, 2636 bp, Zea Mays
cagcattgtttatttgggtgccgcgtccctgtccgaccaccgggtggtggttagcctccgggttggccgagccaggaaagctaccgctcctcctcttcttctcctccctccctggctccctccctccctctcgtctcctcgccaagaacgcactgagtccattcctcctcttcccctcctatcgcctctctctgcccctctcctccccggagattcctgctcctcccgactcccaagggttatcctattcactctgcctgctgccaaggccaactaggatatcaactaggaggagttgaggaggaatggctgttggcggaactcaaccggtcctcaggaagtacctaggtgccctcaaggacacaacgactgtgagcctggcaaaagtgaacagtgattataaggaattggatattgcaattgtcaaggccacaaaccatgttgagcgtccatcaaaggagaagtacataagagaaattttccattccatttctgctgctaggccacgggcagatgtagcttattgcattcatgcccttgctagacgtctttcgaagacgcgcaattgggcggttgcgctaaagacattgatcgtcattcatcgtgcccttcgggaagttgatcccacttttcgtgaagagcttcttaattatggcagatctaggtcacatatgttgaacatggcctactttaaggatgactctagtgcagaagcttgggactattctgcatgggtgcgcatttatgctttatatttagaggagagactcgaatgtttccgagtgttgaagtatgatgtagaaacagatcctccgaggactaaggatcttgatactgttgatttgcttgatcatctgccacaattgcagcaactcctttttcgtcttcttgcttgccagccacaaggagcgtcatcttacaatgttataatccagcatgcactctcaatggttgctttagagagtgttaagatctacactgcaattagcgatggaacaatcaatctagttgacaagttcttcgagatgcaaaggaatgatgctgttagggcacttgatgtatacaaaagagcaactaaccaggctgaacgactttcagaatttcatgaagtgtgtaaaactatacacattgggcgtggtgagaaattcctgaaaatcgagcagcctccagcatcattcctgcagactatggaggactatgttagagatgctccaacaggtcaaaaacaaaagactatactagcgatagaatacaaaaaagagccagaggaggaagaaaaaccggcctcccctcctcctgctccagaacaggaaccggaacaagagcctgagccagaacccgaaccagtgaaagaggaagcaccagaagccgagccggacttgctgggtctgaacgaaccgagccctgctgcgaccgcgatagaagagcagaatgctttggcgctagcaattgtcccgatagatgatgttccgggagctgctcctacttttgagaacggagtcacaggctgggaactggccctggtgacagcaccgagttcgaccgagaccgccgttgccccaagcaagaaactggttctgtaatttctggtatccaaagagatcatatggaatccattgaaaaacttgtcccagatttagcatctctacggggtaggctctgtccttcttacatggatgaagacatattctggaagatttactttaggttgcttgagtcaaacataaatgagcatagttctgaggaagatatccggagcgtgccaaattctgtacatcacaacaatgagatagagtctgattctccacctcacgtctgtgagatagaaagtgtgaaaagcaaccaagaagggtaccaatcttcggatggtcgtgctttccccaagacaagatctgagcgaagcattgaccaatgggtatttgcaaagtcaaaatctgaagaaagcatggatcagtggtctgaaataccttcagatgtggaatccttcagagaaggtaaaaggtacctcagtagcgaggagctgagtgacgttgatagtgccaacgttgttgtcatggacaaatacatggattcactcctctctgaccggaggaaccttccctacgctagctcctcggtgcgccgggattcagtcagacgaaaacctgcttcgtccgccgattacagccgccgacctccgcagccaactccacctgcatcgctgtcaaagaaggaatcgtgggatgtcattgaagattcggagttcgatatacttgacagttagtaattgagatctttgcgatctcaaggctgtttatccttctattttcttccatgtttccccacacttcacctcgtttgtaaatgtggacgtgcaggtggcgtcagtgatagtgggaaaggactaatgttctttttaccaatatattataacagtgtgtgcatataaatcttctgagctcgcaagctgtgagcctcccaggttaaaagtgtttatatgttggcatcattgtttgtttcagatattttattgcagaacagaaaattgccacctatcattgcgaaaaatctttgtatcattacccttctcacccttatttcattctagtaaagcattgttattgtccagtttggacatcagcattatcgaaagacga

SEQ ID NO: 26104 - DNA, 1216 bp, Zea Mays
gttggaatgtctattgacccaaagctgcttctgtcaaacttcccaatgatctctatgatattgggtctcttgataattggaaagacattgttggttacatttgtgggcagggtatttggggtttctactatagctgccattcgtgttggtctcttgcttgcgcctggtggtgagtttgcttttgttgcctttggagaagctgtcaaccagactgacgatttgcacgaccatattattatattaggctttggacgtgttgggcagatcgttgcgcaactcctgtcagagcggttaattccttttgttgcccttgatgttagaagtgatcgggttgcagttgggcgtgcacttgaccttccggtatattttggggatgctggaagcagagaggtactgcacaaagttggagctgaaagagcttgtgctgctgcaattactttggatacccctggtgcaaactatagagctgtctgggcattgaacaaatatttcccaaatgtgaagacatttgttagagcacatgatgttgatcatggtgttaatttggagaaagctggtgcaacagcggttgtccctgagaccttggagccaagtcttcagctagctgctgctgttcttgcacaagcaaaactcccaatgtcagagattcaggaaagcatcaacgagttccggaatcgtcatctgtcagagcttacagagttgtgtgctacgtcaggaaattctcttggctatgggttttccagagttatgtccaaatcgaagtctatcagctccgatgatgaaagcgaaacagtggatggcgcactagcaatttgaagacgattagataaaatgggatcccttgatagtactagatcgattgcactgttagtagataagcttgttgcatgtagaaaaatggaataaaaattaatgcaagagctgtcacaaaaatcggcgtgcaattttgtatgttagagtacttatatatttcttctctcccccaaaaaaattgtttgcatacaactcttcacaaagaaaaataatacactctagcagtgcacgtgaaaatgagacccttgtaagcagggaagaaaatagatgtcagaatgctgaatacttcccatgcttgctcaaaggagcatatggtacagtcaggccagttggacggttgggacctggctttgggtatgtttagtacaatttttgggtgtgtttgggacagttttttaaagag

SEQ ID NO: 26105 - DNA, 1821 bp, Zea Mays
gtcaccatctccctccctcgccttggatccctgcgcacggctcgagccgttccgcttccatccgtcccatttccactacccccgccctctgccccacctcctcctcccatgctggtggcattgtgaccgtgccaggccccccgctgcgctcccctgccctctgagcctgtcgccgcgcccgcacgcacgcaggcagcagcagccagcacgctgcacgccgcgccaccgccacaccgtgcctgcgtgcagtgccgtgccgtgcgggcttgccgatccctcctcacccctctccagggcttgcgggtggttggaaaagcagaggacgaggaggaaggctgccgctgccgctaccgctaccgccgtagcgcgcgctaggtgcctttggctcacgggttccaggccgcccgcgccgcggcgcgcgcctttttcgctcacacggaaagtgccccgtgcctgtgccggcctgcccgccgccccgcgcggcctggccgtaacatccgaaccgccctcaatggcgacaccacgggctcctcaccctcctacgcattagtagcagcggccgcaggtccgcacccccccactcccacgcacactcgtgcgtctctcctcctcctcccccgcgtcgcgtgcgcgctctgcttcccttgccgccgtgcgctgcgagggtcgactgtcgagcgcgcgctgcttgctgctcgcctggccgtcgatgagcatggggcgcttcgtcaactccatggatccgacgtcggggctggaggtgatcagggactggaacggcgtcgcccaggtcgtgctccgctcgcccaagggagcctccgcgcgggtgagcctgtgcggtgggcaggtcgtctcatggaggaacgaccgcggcgaggagctcctcttcaccagcagcaaagcaaccttcaagccgccaaatgccatgcgaggtggaattcagatgtgtttccctcagtttggatactctgggacattggagcgacatggatttgcaagaaacaggatatggtccctggatgatgagcagccaccactgaatcataatgataacggaagcaaagtttctgttgaccttattctaaagccatctgaagatgacctcaagtgctggccacattgttttgagttccgtctgagggcctctctttcaaaggatggggacttgtcattgatatcacgcatcaggaatgtcaatgtgaggtcaggattgaaggtctggagacacttgattatcttgacaaccttagccacaaagaacggtttacggaacaaggagatgccataacatttgagtcagaggtcgaccgagtctacgttagctccccaaatgtagtagcagttattgaccatgagaagaaacactcgtttgtcataagaaaggaaggacttcctgacgttgttgtgtggaatccatgggaaaagaaatcgaagaccatggtagacctcggcgacgaggagtacaagcagatgctttgcgttgatgcggctgctgtggagagagcaatctcgctgagaccaggggaggagtggactgggaagctggagctttctgcggttttatccactaactgcagcgaccatcttgatcatcctgtcagcatctagcgtttattcccattgtagtgctatatatttgcctcacaagagaagtatgggccccttttgtaaatgagatcaataggtagctctgttatcagttagcagctcgacttgatcctggaaccggcacaatttgtgacctgtttttttaatgtgagtattgaatgatagcagcgccttgcttcatgcataatgcacacaaaatggcaagatttatca

SEQ ID NO: 26106 - DNA, 1058 bp, Zea Mays
ggactcttctagagcctccgcatcgcaactcacaggctcgactcttccagcctccgactccgcatccgcctccccggcggagcctctcgccaccgcacagcctagatccgcccagaggagctcaatctccccctcgaggccccaaaacgagatcctctgcattcctgcataggatgcagacagattgaggattctttgtttgtagaacgccatggatgagaggctgctcatgtttgatgtggttgatgacgtgtggacagtgctaacatgattgttcgagttggatgcacacgagagccttaggtggtttggacatgtcttcgagccaagagttgaaatcttgatgggattatgttggggcagatcttaactggaatacatatacggaacccggttggcagcagaggtagtgccccggtgcgccgcgcgcaggggcacgcgacagctacaaatattcggtggaggactggcttaggaaccttggatgcaagtgagttttcaattctttgtaagagaattcgagttgtgttaatttttgctttgcagactccaaatgtcatggtggcagggtgattggaaggaaatttgttgaggtggagatggactagaccaaggctaatatcaaggggtacctgtgagggaacaggactacactggatttggctcccgtctcaagagtagcactacaactagcaatgtatggatgaattgaaggaagtaaaagaaggcagacaatcttatagaaactctgcatattgaaaccgccatgattggcaaagaagttggatgcatctttgcattggtgtgttcttatcaccaagcagtaatgtgaagcaagttcatttgttgactaagaacggatcaacacaaattagtgaagattttgttcacaagagatgcaggatggagaggtggtagatttcaatatggctttgatactattttttccacttacaatattttgtatggaacaagaaaaaacaatgtatgtggttactattgtaattcaagaatttatttctaaataataaatatatttgtttatattttgtttatga

SEQ ID NO: 26107 - DNA, 1199 bp, Zea Mays
gcgtgctggggagacagcctaaacgcaaccagtagccggagtccgaagtcgggccctcccttctgcccgcgaccgcgttagctaaacccgacccagcaaccaggccaccgctcctttcctctccgatccggatctccccacccgctccggcgagccatcgccgcgtcgcctccacgcgaccgactacttctcatatcaatctatctatccggcttacccgccgccgcacgcaccaaggttgcgttcaccatattacctgtttgcttatcttctcccgagcccagcaaaccctagccgccgccacccatggacatagaggccgacggacgattcggcaacaaacgagtgcacaatcgcctaggcccgggctccggcggcgctccaccatctaccaacggaaaggtctgcaactactggcgtgccggtcggtgcaaccgctttccgtgccccttcctccacagcgagctccccgaggctgcgccgcccaagcgccccactggacccggggggaacgtatggcgcaaccccaacaccggaggacgaggaggtggccatcacaatagatgggggaagggcccaggagggggcagcgggattgcgagccacaagccgcctgagaggccctgcaagtactttctcgccggtaccgaatgtagctatggcgagaggtgccgctatccgcacagctactgcataagcgatagtatcgcgatgcttaccttgctcaagggacacgagcagggtgtcacgggcattgcactgcccgctgggtcagacaagctttattccgggagtaaggatggaactgttcgcatgtgggattgccaaactgggcagtgtgctggtgtcatcaccatgggtcgtgaggttgggtgtatgatcattgaaggtccgtggttatttgttggaatacctgatgcagtgaaggtttggaatatgcaaacagcagcggaaatgagccttactggaccaactgggcaagtctatgcactcgccgttgccagtgagttactctttgctgcaacacaagctgggaggattttagcatggagatttagtgccgcaactaactgttttgagccagctgcttctctagatggccataagcttgctgttgtttcattgatagtaggaggcatgaggctttattctgcttcaatggataaaactatcagaaacagttggagctagtgtgtgaa

SEQ ID NO: 26108 - DNA, 4054 bp, Zea Mays
gaaagaaacccgaaacccttgtggtcgtctcggcacccctctccgcttcgaaacccccgacgcgaaggaagctagggaaccctcgcgagtcgcgttgcctcgcccccgtccccttcagctggcccgccgccgcctcgaatccgccctggctcggagggcctcgcgcccccacggatcggattctcgaggaagtggacctgaggaggacggagggatggtggcgatggagggtaagggggacgcgtcagtgacgccggtgaggactagtgaccggctgcggcagcgtccaaagtactatgctcgtggctatatgtactacaatccagccatgaggaagaaggttaagtctaagaagcgaactgctgcatcacagattgctaagaaactgcttcgcaagccagctgcacggccaccacctgccgattgtgttgcagcaaatttgcgccgttcaacgagaaagcgaaggatttctgtaaatctggagggctatgatacagatagttccagtatggaagatgacgatcttatgagacctagatatcgatcttcaaagagtaaggggggaaacaatgctgcacataatgaagtgtcagctagaccaaagcgccagaagttgtctaactccatacctcgtcgtgaaggtttacggcctagaagatctttgcgaggacaaagactgcatccataccatgaatctgaggatgaccaggaaagctctgatgaacaaggtgcagaagatcaaagagaaaatggcaatgagattgaagaggatgttggtgatgaggaggaggttgatggaggtgatgaagctgaaggagatggagatgacgaagatggtgaggaagagcaagaaggaaggaggagatatgatttaagggaacgttcagaggttcgtagaccatcccctcgtaaggaaggaaagcacagaccacaatctcctcgtagagtactagttcacggaattggtccaaagaacagcaagtatttaaaaaaaggtgggtcgcgcatgcataagcgccctcgtttctctttgccagatgattcagatgattcccttcttgtggatgagccggacgagggcccatccatgccatggatgcgcagtgggaggggaagtatgccatggttgatgggtgggttggacatgcatagtccagcagcatggggcctgagtgttggagcatctggttggggtcatcagggtgacacttctacttcactcatgcctggggtgcaaactgctggaccaagttctaagggaggagccgacattcaacctctgcaggttgacgagaatgtgagctttaaagatataggtggactttcggagtacattgatgctctaaaggaaatggttttctttccattattgtatccagatttttttgcaaactatcacatcactcctcccagaggtgttctgctttgtggcccaccaggcacaggaaaaacattgattgcccgtgccttagcctgtgctgcctctaaagctggccagaaggtcagtttttatatgcgcaaaggagctgatgttcttagtaaatgggtgggtgaggctgaaaggcagctaaagttactttttgaggaagctcaaaagaatcagccgtcaattatattttttgatgaaatagatggcctggcacctgtgaggtctagcaagcaagagcagattcacaattcaattgtttcgacattgcttgctttgatggatggccttgattcacgtgggcaagttgttttgattggagcaactaacagaattgatgccattgatggagcattgcgtagacctggccgatttgatcgtgagttttattttcctttacctggctatgaggctcgagcagaaatactggatattcatacaaggaaatggaaggatcctccaccgaaggaactaaagatggaacttgctgctagctgtgtgggctattgtggagctgatttgaaggcattatgtacagaagcagctattagagcatttagagagaagtatcctcaggtctacactagtgatgacaagtttgtcattgatgttgattcggtcagtgtcgagaagtaccactttttggaagctatgtctacaataactcctgctgctcacaggggatctattgtgcattcaaggccactttcaacagttatcgctccatgtctgaagagtcatcttgagaaaataatggaacatatttctgatattttccctttcctttcatccatagattttagcaagttctctgctctctcctatggatcttccatccctcttgtttatagacctcgccttttgatatgtggtggtgaaagtgtcggactggatcatgtgggaccagctgttttgcatgagcttgagaagttctctgttcactctttgggactgccgtctcttctctctgatccaagtgcgaagacacctgaagaagctcttgtgcatatctttggggaagccaagagaacaaccccgtccattctatacatacctcagttccatctttggtgggatacggcacacgaacaactaagggctgtgttgttgactctgttgaacgagttgccctccaaccttccagttttattgcttggaacatcatcagtggtttttactgaccttgaagaagagtgtgcttccatattctcttctcgcaatgtgtatcaagtggatcaaccaagttttgacgatagattgaggtacttcagtatattgtttgagtcattgctctctttccaaatggaagaatcaagaaacaagtcaaagaaacagaagtctgctattgaccttcccaaagccccgaaagaagtggagggccctaaggtttctgagctaaaggctagggcagaagctgagcagcatgctgttcgtcgaatgaggatgtgcctccgagatatctgtaatcgcattttgtacaacaaaaggttcaatgtatttcacttcccagtattagaagatgaggtgcctgactatcgatcaataatccacaagcctatggatatggctactgtcttgcagcgggtggactctggacagtaccttaccagggcagcatttataaaggatattgatcttattgtctcaaacgcaaagacttacaacggggatgactacaatggatctaggattgtcagtagagcatgtgaactcagagatgtggtccaaggcatgttgtcacaaatggacccatctttggtgtccttctgtgataaaattgcttcacaaggggggccactgcaggctgtggatgatgaagatagagctattcttcaagcagcacctgttgctcagctggtttctggtactagaataagtgcaaggcttcgaaatgtacagcctgaagtaaacctgtcacaaagttatgaagtgctaaggcggcaaaagaaaagtgcagaaaatgaacaaagcatgactagagatgaaaagtctcctgaagatgtagatttgtcgaagccaactgacgcagaagaagctgcaaaagaaccagagtcaaatggcactacgaaagaagccaacgattcaccagccaaagaaccagaagtatctacttcccctgaacccatggagagtgacaacggcaaaattgccgcggctactggcgacgacttgttagaacagctagaagccctgaagcaacgcttcatggaactcactgcaagctatggcgtgccgcagctcgagaggctgtattccaagataatgaaaggagcaatagagttgacaagtaaagaaagcaacgaggatcataggcggttagtagttaggtatttgtggacattcgttgagaacagcaacaatttttaacctggcgccaataagattcttgttttccttgtacatcctctttggaacgaaacaatagtagccgttcatcttgggagttgtccccgttccatgccttgtaacaaatcttccaaatgctctagtgtcagtgacacagttttgccatgaaatgatgtagcaagtgaacccttcctagatttgtacctcagtttgatgaatttatgaggtggaattccctcttaatgcataacatgtgttaccatgcttgttatcttaggccat

SEQ ID NO: 26109 - DNA, 2225 bp, Zea Mays
ggcccaaaagcccagcgaacccagccatcatgttcgtcctgcgaatccagtccgtcgacttccccgacgccgccgtggcagcagtcgccgccgacgaagtcggcaccagcagcggcggcgttaccacctctcgtccgctctccagccaccctcccccctctaccaccacatcgtccatacttactctcgagctccccggcgcaaaccccgtcgcgcccagccgaagccctaggatcctccacacccgcggcgtcatccacctctaccactcgtcgtcctccacttccacctcctcctcctacgcctcggcggtcgcagccacctcttcctcctcatccgggccggccaccccgcagcccgcctccgactcgcacctgcccctatgtcgcggcacgcgcctcctggtgctcgccgttccgacgcgcgtttcgccggaggactttgttcgcttctgcggcccccacctcgagtgtgcagccgacattcgtttcatcagggatgatggagtggaggaccggtacagcgttctagtggagtttgaggaccagagtagcgctgaatggttctacgccgatctcaatggctggaggttctcaacctctgagagtgaggtgtgccatgttctgtttatagctgctgtgcagtatacaccttcctcagaggttgccacaactccaccggctggatccactgaacttccaatgtgtcctgtttgcattggtgaacttactgttttgtatttttttttgtattttggggcctctgcaatacaatttatagtcatatgtacgtgtcaccatggtgtcacatttgaattcaatttgtgatctccgttgaagagatttaggcacctctgttctatcctggccatagttttaactttaaataccattctgtttgatgcaacagcaacccttcatctattattttcacttttcatattttgttggttgtttaagttgtctgccttgtttctggtacacctaactattttctgccatcttaatatgttaatttgtcagaaagattggatcaggacatcagtgggattttggcaactacttgtgatcactctttccgttgctcatgtgtttcagtgtggaccaattcatcctgtccggtatgccagttttgtcagaagcagtctgaaaattctacatgttctgtttgccaaaccactggaaacctctggatatgtgtgatatgtggttttgttggatgcggacggtatcaagaaggacatgcgaaacagcactggaaagatactcagcattgctattcgctagatttggaaacacaacgtgtttgggactatgttggtgacagttttgtacatcggctgaatcaatccaagagtgacgcaaagcatgctaagttcaaatcaaaaagtaaatattctggggatgaatgtgtaaactgctcgtgcaatgatgactctgatatgggtggagctatgttcagcagcaaagctgaaacaattgtggacgagtacaatcgtctcctggcaagccaacttgaaactcagagagagtattatgagggcctgttgtctgaggctaaaagaaacaaggagcaccagatttctgaagctgctgataaagctgtaagtgataagcttgaagagatgcaacttaagctcgagaatcttattgtggagaaaaagaaagttgcagatatgaacgaaaaactcactaggagccaagacatgtggcgccagacactaagagatatagaggaaagggaaagagcacagttgaagtcgaaggacgaaatgattctcgatctggaagaacagataaaggatttcaaattttccatcaaactgcagaagtcaatagagaagaacgatggtgtcaagggtggtacgctggttccactccctacggtttcagattctggaggcaagggtaaaaggtcatcaagaacaagcaagaggaggaattagtatcctttgctgagtagcaattagtcttgactggaacagacgtatacgaaccttattggcatgtatttactagcctgttatgatgaactacagcgtgatgtttgatttgtcacgaaaattagtacgatcataaactgcttcgaagatttgaacttggatactacatgtggaaaatacaatctaaatcgaagtacagccagttatttcgtaaccacatatagccaaatcttgaagcgtttcatgtcaaacggtggaattagagatagatccctgcacctaa

SEQ ID NO: 26110 - DNA, 1397 bp, Zea Mays
ggtatatgggtataaatttagacagcagcggtcaaagttgtcttgaaggttacaaaaggttcttgtggagtacagaaacaaagaccctgatcatgttgaatgggctaaagcattgaaggatctatatatgcctggtttgcgggattatgttaaaaagcactaccctcttggtcctgtctggggtcctgctggaggcgctgttgtttctcaaccaaaggctgctgctcctacacctaaagctccagcggttaaggctccccctccaccagctcctcctgcagcgcctctgtttagcacagagaagtctccaaaatcttcaaagcctaaagaagggatgtctgctgtcttccaagagattagttcaaaacctgtgactgcagggttgcgaaaggttaccgatgacatgaagtctaaaaaccgcgctgatagaagcggtgttgtcagcagcactgctcctgctcctgctgcagctcctgaaaagacttcccgtgcagggtccttctctttcaaatctggaccccctaaactggaacttcagatgggacgcaaatgggtggttgagaatcaggttggcaagaagacccttgctattgatgattgtgattccagacaatctgtctatgtgtatggatgcaaggattctgtccttcaagtaaacggcaaggttaacaatatcactgttgacaaatgcactaagtttggaattgtattcaaggatgttgtagcagcttttgagattgtcaactgcaatggcgttgaggtccaatgtcagggtacgtcaccgacaatatcaatcgacaacacatctggatgtcaattatacttaagcaaagattcgctgggagcttcaattacttctgccaaatctagcgaaatcaatgtgatggttccaagtggtggcgctgatggtgattgggtggagcatgcattgcctcaacagtacatccatagtttcaaggatgggcagttcaccacttcaccagtttcacactcaggagcgtgaatacaattgttactgctgttgtttttgaggtttgtaaacagttttgggtcttgcagcactggactcggtctgcgattgttgttttttgttgcccttgctcagtccgcggtgtgtatgtcctgcatgcacgtggttcctttctgttggtgtttttgtgtgccaacaaaccaccaaacttggtttgtatgtctttagctgatcattctttgacactgaatctcattatatttgtattcatttggacgcttgcttttttcgagtctcttttcagattcctttaacaaagtgacaatggcaaatgctgttatcgtactttaaatctcgacgctgtgcttggatcgtgaaacacgtactagaatacgagaggtggcgcaatacattaggcagaaaaaag

SEQ ID NO: 26111 - DNA, 1760 bp, Zea Mays
tcttcgtctcttccagcccagcacgagagaaagcataggctgcgcggctctcctctgctttcgcgcaaccgagccggcaggaagcagtgaccgtcggggccccggcggccggctgccatggcgacggcagcggcggactgccgtacgcgaaccgtgctcaaggcggcgctgtcgaggaccaccgccgccttcctcttcgtcgccgtcgtcgccgtcggggtggtcgtctcgggtcgctggatcaccgccacaaccgctgcccgagatcaacataaaaccatgggatgccttgaaggaggacttgaaggccggtaataacagagtgagatggatggatagagaaccttatgcttactggaaagggaatccatcagtttctgggacacgtaaggaactggttaagtgtaacgtctctagtacgcatgattggaacgcaaggatttacgctcaggactggttcaaggagagcaaggcaggatataaggactcagatttgagtagtcagtgtgctcacaggtacaagatctatattgaaggatcagcgtggtctatcagtgagaaatatatactagcatgtgattcaatgactctgttggttacaccaagatactatgatttcttttcaaggtcacttatgccgattcagcattattggcctgttcggtatgacaataaatgtgcctccataaaatatgctgttgattggggcaactctcacaagcaattggcacagcgcataggaaagcaagcaagtaatttcattcaagacgagctcagtatggaccatgtttatgactacatgcttcatcttctaactgaatatgccaagctcctaaaattcaaacccactaagccacctgatgctgttgaggtatgttcagagtctttggcctgccaagctgaaggcctcgagaagaagtttcttatggaatccatggtgaagtttccccgtgatgcatgtgatctgcctcctcccttcaaccctcatgagctcaagttgctaaagcagaagaaagaaaattcaataaagcagatccatatgtgggagcaaaaagatttgggggcttaaataacaattttgaccccctgctttttttttcttccaatcgtaggcacacataattggtgtcttataatttggaattggggagtatgatctaactcagtgtcattgaggtgcgaccaaataccaattatttattgactggatcaacttagaagaatctagataaatcgagcagatacccatttcttaggtatttttgtataaagcaaaccatagctacttagctttaaacatttttctgtatttaattttgttttgattggctttactttgtaaagcaactgtaaatgtgacacagaaattatacagaatatataattctgatccgatattcacttcctcattgagattggatatcgtagatatctgtgctgtagctcaaaaagaagtattgcaatgtgagctcctgggtgttattgtaccgtttgaactgtggagagtttgatggagcaggtcaagggtatcctctatgaggttaaatcatggcctccagttaagtaattttacttgaaatgctctctttcactggtcactggcatggtaagcaactctgctgcttccacagcttaacacaaagaacagattcaccagtagttttaccctgcagaaaactcttgaatcgatggtactctgatagaccgatggaaaggaaggtggtgcctggtaaatattgatggtccatttatgattttca

SEQ ID NO: 26112 - DNA, 3061 bp, Zea Mays
ttttattatcttagccctcaagaaagacaggctaccaaaccgccgctcgcgtcggtcacgccaggcctgacgcgagcacatcgcaatcctagccaccaaaacaatgcccggcggcaagcgccgccgcgcacgcaaccccaccgccggcgggcctcagcgtagcgccggcgcaggtcgtcgtcgtcccgtccccgagctcccgtcttttgtctcccccgcttctgtcgccgccgccttctcccccgcctcgggcggccgcagccgcgggcggtgcgcccggcgttgcggcgcctactccgatggcgagtcctcccacgccgtcccctttagctatccttccctccgctcctgctccgcttatccggagcgtgatcaggcgcaggcactggaggtgaccatcgacaccgcaccctgcgccgacccagccgcttccgtcccgatgtactcgtacggccccgccgtgctcggtgagaccgggcttgtgctgagtgcggacgaggaggaggcctgtgatagagggctgcatctcgggttaggattccgggatggaggacacgatgagatggagctcaaattgaaagagctgacagaggaagatgtctccttcaagacgcccaagcggaagcaggagcagagggcgaaggccaacccaggatttttgttgattgggggagtcaggatttacacggaggacatctcatcatcagaatcggatcggatgagcagctctgatgtggatttagagcccaactcaggtgatggggagagatttgagaatgatgatggtgacagtgacgaggaagataggcaaggcgaggagagagattcaatatctgatagcgagtcattaggatcggaatcagatgaagatttgagcaccggggattcttcttcagttgacaatgaggttgttgctgattacatggagggtattggtgggagtgacgagctgttgagcagtaagtggatcactagtatgaatttgggtgatgcagatactatagagcagatgtatacaaatgacaatgatgggtttgtgaagaaggggaaggaaaagcttgagggttatgcactaatgactgcatccgagcagtatgggatgaagaggcggaactcccttgagcagcggaagggaaaaggaatggtttgtgacagggatttgtcaagcatgcaagtgatggaccaggaagatatgttcatggtgaacaatgtctggatgccaaacaggtcaagaaaggggatgaagacaggatcatcatcctctcagctctcacagtcgtggcctaaagatgataggaaaagcaaaaactatcagagcaggccaggtgaaaagaagcagcataggaaggaactcattgcaaagaagcgtcaacaacgagctctaagcagaggagttgacttagggcaaattaatagtaaattgaggaaaatggttgtggatcaggttgacatgttatgttttcatccaatgcactctcgagactgttctcaggtacaacgccttgcatctatttatcaattgaagagcgggtgtcaaggttctggcaagaagagagcccaggcgatttactgcaaggcagcaaggatagtggtttacagaacatctttgcatcatttgtcatgcagtaatagttcaagggttcctgagcagttgtggctgttgcagatcatcctgattacacattactgattctttcaatgaaccattatgacatcatttttcgctacacattcttagtcaactcttgaggtaggaaggtgcatgacctctcccgcaacgagccatttgtcttgtgtggacaatggtaaaggttttaggggcttactcaaaccactccctttgtttgcattggcactgatacaagaaacatgacactgacattcttgtcatgttcattgcacatactgtctgataaggacaaatatgtaaccgatgtgtccctgcatgtagctactaccataacctggttaatggttatattgctagcttgattatgggttaatgagctggaggactttgcacctgccatgaccttactgtgctcattgctgaccaattccttgtgttacatttcaaaattattactaaaactcacaccgatttgtaactgtgacattgactgggcactcttccttgccatctgcagatggccaagttcgacttgaaaagcttttggggactgaatctgagaactctgtctcgagctctaaaggcccagcacgactgaagggccattctgctccaggaaagtgtgtaaaacactgggaatccagtggaaataaatctaccaagaaacaggtctccttcgcagagcgtccagtatcttttgtcaagtgtggaaccattgtggactcccttactgaggcaatagctggcccaagtggtggtgatacctcgtgtgttaaacctgttgaaagtaactccacccatctaggctcctttgaggtgcacaccaagggctttggttcaaagatgatggccaaaatgggattcatcgagggcactggccttggtaaagatggccaaggtatagtgcagccgatacaagccgtgcatcgtcccaaatctcttggactaggtgtagaatttgacagtgtggctgaggcgatcaaagcaagggcagaacccatcaaattaatttcagagctgaggcggaatgtgtgggcaccagagacgagtggcgttggctcctttgagaaacacaccaagggttttggctccaaaatgatggtgaatatggggtttgtcccagggtccggactggggaaggatggccagggcattgccacccccttgaccggagtaaggcgaccgaaatcacggggactgggagccgaggacaaatattagcttacaccattttcgcatttgatgtatctttcttgtcgtgttccttgttacatgcggattacatagtttgctgggagggcgaacctttgagcaccctgaatggtgaaacaatgggttttcacttgtttctttcaacttctcaatgaagttttatatatttgttctatcaatgttatatttgtttcatttttctatggcccttgcttgtgc

SEQ ID NO: 26113 - DNA, 1651 bp, Zea Mays
gcaattttgccattatcatttgtgggcttcgccaagccgtccgccgccactcgaccaccaccgccgccgcggcgccgccgacgccgaccacaaccactcgcggttactaccgcctccgccccccgctgcttctcgtctccgcgcagccgtccgatggccaagcggctcgccggcgccgacaaagaggtgctcgtcgaggtggtgaggttcacgcagaagagcggcctgaggggctgtgacggcggctggaaggatttcctggcccggaacgacaggaagtttggcgcgtcggtcagcgaccccaggaagcgctccagggatgtgctgctcgccttcctgcagaccttccccaaggatttccagaagtacttcggcaaattagtgaagcgtcataatgaaagaagtgctgttcagcagtatgtggctgatttccccgacgaagtttctccccagcagaaacttgttcaactgacggcagagcacccagagtacagaaaacactactgcttcccatcgtaccaggagtgatggcacagaggctgtggtcagagtatgtgttgtagacgacaagcttaaggctaagttggacatacttgtaaacccatcgaagactgttgctgactataggacacacatcactggtgtatctaagaaggatttagaaggagtcacatcatcattagttgatgttcagaaatcgctgaagagaatgttatccaaaggaaatattttgattggccatagcttacatagagatttatgcgccttaaagattgattactctcaagttattgatacagcatacatatttaagtatgcaaatttaccaactactgcatcaccttccttgaacagtctgtgcaaggctattttggggtattcagttcgagaagaaggagaaccacataattgcttgaaggatgcagaagctgcgatgaatctagttcttgcaaagcttaagaatgagtttaatgaccccattgaaattgctgcaagtagtgtaactgaatctgatgtggtgaagttgctcgctcatagaattccagtgtacctgccttgtcaagagctgtgcaaaattttctctgggaaccccaatattgatgacaagattgattcgagaatacgaggtgaattttattccacatgtatttcattcaatgacgtagatgaggtggacaaggcatttgaagaactggatggccaaaagaccaaggactcaggtgggagacttcaaaagcatgtactgctgaagcttgacaatggagatgtcgtgagcttctatgttcggaagatggtatacgattcctggcccaaacagatcgaagttccaaggaagagaccagagcctactgaggatccagagccaaagaaagagcatgccaagggggttcagcaaaagaagagaaataactttgtgagagatactgaggatccagagccaaagaagagaccagagcctattgaggatccagagccaaagaaagagcatgccgagggggcacaggcagacctggaggcgtcggctacggcggcgattccagaaacggcgcggttgagaaggacagcgacgagggaggcgccgccgacgaggatgggcaggccgcggaccagcgtgacgtttcgccggacccaaccctccacccactcttga

SEQ ID NO: 26114 - DNA, 1247 bp, Zea Mays
ctcaaccacttttcccttgcaaatctgcaactgcaatgcccattttcgccaccaaacacgctctctttaagctaaccatcgcgccccccgttctcttagcacgtacacttgcacacactctgcaaactgaaggtgccggactagtagctccgtgtcactgtcaccaaccagagccagagccatgggggccagcctgagcctggtgccggtgctcgactacttcgcccgccgcgagtgcctgcgcgccggcctccaccagaacgccgtcacgctcccgtaccccgacggcggcgccggggcgacctgcaccgtccagtactgggctccgcagggggagcctgagctcccgccgctcctgctggtccacggcttcgggccccgggccgactggcagtggcgctgccaggtggggccgctctcgcgccacttccacgtcatcatccccgacctcctgggcttcggcggcagcgcgtacccgtccgagacggcgccgccgccgacggaggcgacgcaggccgcggtgctggcggcgctgctgggcgcgctgcccgggatggagcgccggcgcgtggccgtggcgggcaccagctacggcgggttcgtggcgtactggctggcccgcgaggcggggcccgccagggtcggccccgtggtgatcgccagctccgacctgctcaagacggctgccgacgacagggcgttcctgaagcgccccgccgcgctgcggaagctcctggagctggcctcctgccgcccgccgccgcggctggtgacgccggacttcctgctccgtgacttcatccagaaactcttcacgcagaacagggagcggcttgtccatctgctgaaggggattacggtcgggacagagaagttccaagtgacgccaatatctcaggaagtgctgattgtatggggagaccacgaccagctgttcccggtggagaaggcgtttgcggttcagagggctctgaacgggaccgctaggctggaggtgataccgaagacaggccacgctcctcagctggaggatccggctcgcttcaacaaggtcatgctggacttcttgctggcttctcacaagcctgacccctcggttagtggtagcgcgcaataatttaccaaggtgcattggcgattggtcagtggtagccgactcgattgtttgtaataagatcgctggacaggttcagttcattccattaaatcaatggtaaatttcaaaaaggaaaaaaatatggtacaga

SEQ ID NO: 26115 - DNA, 1563 bp, Zea Mays
caagtcacaaatgtcatcaattactttcattatctatataatgcagccaacatttttgtttaaggagttgctaaatggttgtcaaatgtagagaggaaatgaggttagatgagaagttgctaaatttaggaagttcatttagagaactgttggagataagtttttatgtcaactaactaaattattgatttagaaagccttttagagaactactggagttgctcttagggcctgtagctattccctaaagggctccttgtaccttttctttcgtgtgtcttaatcctcttcagttgtacattacagtttactccacagctgataagataaatgcattttttcccttattacttcaggcaaggaaatcaagtgcagaaaacggcatagaagaaagcagtatgtggatcaagagccatgcattatgaggggggtttatttcaaaaatatgaaatggcaggctgccataaaagttgacagaaacagattcacttgggtactgttgggacacaggacgaagcagcccggctttatgatagggctgcttttatgtgtggaagggagccaaacttcgtgctttctgaggaagagaagcaggagctacggaggtacacctgggaggacttcttagcagtgactcgcaacacgataaccagcaaaaaacaaaggaaagtcggatcactaaggcgtagcaaggcagacctgttcatgggacagagtgacggcgacaccgagatggccaatggtggcggttcatcgaattccgacaatggcgacgcggggacgtcggcgtcatagatcgctcccaggggttctgccgttgtggcaactcaaagtggagtcctccagcacattcatcccggtcatgcatgatacgagctccgtctaggattttgttctctcaataattaatttccatgtgcataaggccccgttggtctaatcaaatcaaaggttagggaaaccatgccatctcagacgagaattagaggtggtccattgttagaaaacagttcatctgaatagtaatgtataccggttctgaaaactgtgtatatctaccgataggttcaccttacattttgcccagtgtaattagtttaccttataatttaccaaaaaggaataatttttccctttccgttaataccatctctatactagtgggaagaaaatctgcctggaactctgagagtcgtcttttcagtttacaagtttcgaattgatgctgtatcttttttgagtgtattgacccagcttgaggtatgcttgaagttggaaagaagaaacgcacaataaaaggtcatgcagtgtaccagaaattcagttgactacagaatccaccatacacacgagatgccatacacgtccttgtctgagtagggatggcaatttgatttatggatttcgatatccatctgttatccaacctgacggatatgggcatggatatatttttttgactcatggggtagttccatgtcatacccgaagtcggacgggcacggattcagacattacttcccacctgtttagctcatgatgccttaattctatcggatgcat

SEQ ID NO: 26116 - DNA, 1628 bp, Zea Mays
atggccgccctcatttccgctctcctcttcgccgccctgctcgtggctgcccagtacatgctccgcttgctccactccttcctgtgggtccctctccgcttggaacgccgcttccggcggcagggaattcggtggccaccacgaagcctggtctccggtaacgtagctgactaccgcgacttgctagccgccgccaggtccccgcccctctcctccttccgccacgacggcgtcgtcgcccgcgccacgccgcagtacgcgctggtgatctccgacccggagctcgtgaaggccgtgatgactgactccacgggggcctttgataaggcggcctcgggcggcaacaacccgctcgccaggcagctcatcggcgaggggctcgtcgggctctccggggagacgcgggcgcgccaccgccgcgtgatttcgccgacgtttaacatggagagggtgaaggcttggataccaggaatagcagctgtgacatcatctgttctggataagtgggaggccgaaggtgggagccgcactgaatttgagatcgatgtccataaagcattccacgctttgagtgcggatgtcatttcctgtgggcatttggaagcagctacgaggaggggaaacggattttccagttgcaggaggaacagatgcaacttgctcttcttgcaatgaggactgtttatattcctggcttcaggtttgtaccaacaaagaagaaccgaaaaaaggcagaggttaaactaggaaatccaatgctccttgcgcaaattgatcgaaatcaatggaacaaaatgtgaggactcaaaaaatttgctggggttaatgctatcagcgaacctgttgacatgggcaacacttcttcttgcgttgcatcaagagtggcaggtcaaggcccgtgatgaggtccttaaagtgtgcggaaagcatgagcaccctaatgcagaaaacctgagcgatctcaagattgtaactatggtgttaaaagaaaccctcaggctgtatcctccaactacatttatcaatcggactgccaccaggaatatcaagctgggtaaactagacatcccgactggcacacggctggacttccctatcattcacatccatcgtgaccatgaagtctggggcatggatgcagaggagtttaatccatcaaggtttgcagatggcagcagctatcacctaggtgcttacttcccctttaggatcggccctacaatttgcgttggccagaatcttgcaatggtcgaggctaaggtggcgcttgcaatgacccttcagcggtttgcgttcaccgtttcggcgtcttatgctcatgcaccgatgttggtgttcaccctccagcctcagttcggtgctcaggttcttgtccagaagatatgagccttctatgtgacaaagatcataacacttctatatctttttgagtagtctgaaggatccatgaggcctctacttttttctttctttcgaacacaggactctacttttttgtgttcaatcctgttcatgaaagacttgtatattagatttgttctctacaggaatctactaaaggcttcaaacacttgagctaaaagggcatgtgttgtacaaaaaccatctagaacctgcatgaatatacc

SEQ ID NO: 26117 - DNA, 535 bp, Zea Mays
cacctgtcagcctccatacgaagccccctccgccgtcctctgcgtcaaaacgtcgaaaagctagctagcgcaatgcccgccgccaccagcgtctccctcgccgtcgccgacgccgtctgggcggagatcagatccgctggccgggcatccgacgagcacctatccatcctcgagacgctgttcggaaagaacatgctgcgggcctgcaagatcgtcgacgagcgcggcgtcaggcgcgtcaccggcgcgcccagtggccgctcggtctttctggtgatgggggagtcgaagaggaaggaggagtacctttgcttcccggagcacctctgcacgtgctactcattcttctacgacgtcgtcgggcgtggcgagcagctgagctgtaagcaccagttagctgcacggcttgcagaggctgtgggagagcaccaggaggttgaagtgaaagatgaggagctcgcaaatatgcttggttaggtcaagatttttctccatttgcttcttggactcatctgaacttgctgtgaagctccct

SEQ ID NO: 26118 - DNA, 3119 bp, Zea Mays
ctccgacctccccacgttcgacggttcgaagcctcggagggaaaccaccaaaaattctcccaaaacccttcgctcatttggtttccatatgaaacgaccgccaaaaacttccttcccaaaaaatgaggcgccggaacctaattgtgcattctgattccgacgaggacgacggcgagggcatgaccaccgccacaacccccgcctcagtttcagcttccgtcgctagcggcggcgtaagcggcagcggaagcgtcggccggccctcgccccaaaacctcagccccctaccagtccccttcccgtcactctcgctatcttctgcccccttcgtcatctccgatgacgacgaggacgtcgacgagatcgtggaccctgacggggactctcccatcgttgacgcccctgaggtcttctccccgccagctcctcccgcgctccatgctcccgctcccgctcccccttcccctccccctcctatcactaccccgtcccagaccccaatcccgactccaccttcggcacggaccccgaccccgactccgccttcggcgcggaccccgaccccgactccgccttcggcgcggaccccggcctcaatagcgcctccgcacccgtccccgctgagcggccggttgcgcccggtggacgagttcctgcggcggctcgggttgcttctgcggccggactggctcgagtcctgcgctgcggggattcccggcttcgacggcctcggtggtgttgaggcgcaggccaggcggtgcttcgagcagtttctcttcgccgatatgaactcttgcggtgctggggtgctgccggagggcgtcgggggcatgcacgctgagttccttgatggccccttcgtgcttcaggttgatgaagttgtcaatatttcagttcctttaaaggaaaggtatcgtgaagcaccggcaggacccaaaaggtgtttaaaactatcaatgacagatggcatacgacatatatttggaatggaatacagacccatcaaagacctgacagttcttgctcctgctggtttaaagattattgtaaggaatgtacacacaaggaggggtcttcttatgctagttcctgaggctgttgagattcttggtggtgtagttgacgaattggaagcagcgcgtgccagacttgtttctgaagtaaacaaaccacctcgtggcaaaagtaaacagggtggattatctttgtcttcaagagctacgcgagctgcctggccatgtagcaccgatattacaaatggtgttgcgcaggggatctcaatgcaaagagcagttaattcctcgtatccaacaggatcaggtaatgctttccaggttggtggagctacagaaactgtggttgaagagcttgttagccctcttgtagcaaaccgtgtccaagaaatcaacatgcagggctcatatgcttctcttaccagggaaactactgaaacttctatgcatactacccatgaatatgatcccactcatatcactgaaaaaagtacagggaccgtcatggaagaacgtcctgatcctcctattctagcaaacagtgtccatgaacaaatgcagcgagtccaacctgctaacggtgcacaatcttcaaatgttggcaagatcaatcagatggaacagtctttcattctaagcggtgaaaatgaaaaaccatttacatacatatacagcatgcttattgactggggtaggcaacaggacacaaaagcctacattcaaggaaaaatcaagggtctgatcacttctgtaaaaaaatttcaatataaacaacgcaccaagtacgagctttatgtatatatagatgatgggagtttcatttcagaggccttcattgacagtgatattgtgaataacatgcttggcctttctcctggagaggttactgctgcacttgctggtgaattagagtttgcatcacccagtgaagtgaaagaaactttgaaaggatttcagaagtttttggtgaagtttgagggtatgatgcttatcgagttaaacaagaactctcctgttcctgttgttcgtgagttaaatgaaggttgctcaagttctactgcatggcttctgctcggaaggctgaaaacaatttcttctcagaagaagaccatccaaactcaggatattatggacaccactccatgattgtttcgatcctctaaaccccagcgggtacgcagatccgcaatgattttttgttgagccaggccattggccaaatgcatttgagaagtatggttaattaaattagctttacgatacatatatctgttggcttgtaaatcttagggctagtttggaagccacaaaaccggagaggattggagaggttaaaatccctttcttatttaaattgaataaggcctagtttggaaggctaaaacccggagaggattgaagggttaaaatccctttcttattcaattttgaataaggaggggattttagcccctctatccccttccgggtttaaggttcccaaactagcactaaaaaggggattttagcccctctaatcccctccgatttttgaatcccaaactaacccaactaacccttaatgtaattatcgttcatgtgtcctcatgccttattatggtctggaagtgcagcttggtcattgcctgctcctgacattcacagtcatctgttgtggtcttcgcagccgattataatctttcaatgctggtgcgggtgacacaatgatgtggcatggaaggagtgctaccaaaacattctcattgagcctagaagctttcgtccatctcattcattttcgtctcattttaataaccgtagaaaaaggtcctaaatgattggcggagtagaaaggctgacggagaaagtctgacggtgagatcctgaagaccacaaccgtaatcgtcggatggctgcaatgtcagaataagtatgatagaatccgttctcgaatatttgtccgtgcccgctattttatttttggaaaaaagcgacaaataaaaaaacaacagagggagtaatttgtagtagcattaagataattgagtcctttattaatcgtgtcgatgtctaaaggaacttcggtctcatacagctagtgctatccatggccacagaacgtacacg

SEQ ID NO: 26119 - DNA, 1867 bp, Zea Mays
gcctgcccttctctcctcctcagtgcccccccttctgctctagccttcacgactaaatccaccaccactcccgcacacctcacctgcccgcgtcgcctcctcccctgtcctccgcgcgcgttgggcgggcagccagctcccccaccaaaccctaatcactccggcgccgcgccgcgccgcgcggccctgcctcgatccgctccagcggccgcccgccgaggcggctgtgcggtggttgcgcttgcgcttacgcgcgcaggtccccgtgggtctctgcgcgcagcgggacccgtccacggcggcgaggcgcgggcttcaaggcgggcgcaggcggaggggcggaattgctcgggcgatgacacggaggctcgcggccgcggcgtcgcgtccgaggccgtgaatgggagtggcggggcgctgcgggcggcggctgcgtacatggaggccggggcaccgccccgcggctggcgctgtggggtgctctggctcgtcagcgtcgagattgtgttggttctagtctgcactcgcggagctggtgcggattctggtgaaagcaaaggatcgtttctgcaagactctgaagctggagaaaaggatgtctaccttagccactcctgcatccacgacgagatactacatcaacggcgacgagctgggaggaaggagtactctgtcatgccacaagtgtaccatgagtctcgggaggatgcggagcgtgtaagaggacgacacttgttgggcatgtcatcttggcgtgctccgcacgagaatgccaggaagccaatacgaatatacctcaattatgatgccgtcgggcattcgcccgaccgtgattgtaaaaatgttggcgacatcgtgaagcttggcgaacctcctgtatcatcagcaccaggaacacctatatgcgatcctcatggtgatccaccactggtgggagactgctggtacaattgcacccttgaggacatagctgggaaagacaagaggcaacgtctccgtaaggcactggggcaaacagtagagtggtttagaaaagctctagctgttgaacctgtcaaggggaacctacggctcagtgggtactcagcttgtggtcaggatggaggtgtacaactacctcatgcgtatgttgaagatggtgttgctaatgctgatttagtcctcttagtaacaactagaccaacaacaggtaacacccttgcatgggctgtggcctgtgaacgtgaccagtggggtcgggccattgcagggtttgatcctcatgccttcacacattttcgtgatgaaaggaaaaggagacgtggtcaggttactgctcaaagtttggataaaaagcttggaagaatggttactcgtgttgtcctaccacgagttgtcatgcacgcgagacatcattatggagcattttcccaaaacttcactgggttagaattggaagacgggggaggccggggcacctcaggttcacattgggagaagaggctcttaatgaatgagatcatgactgggtcagtggatacgagatctgtggtttcaagaatgactttagcattactggaggacagtggatggtatcaagctaattacagcatggctgaacatttagattggggtcagaatcagggaacagagtttgttatatctccttgcaactcatggaaaggggcataccattgcaatacaactcaattatcaggatgcacatataatagggaggcagaaggttactgccctatagtaaactatagtggggacttgcccaagtgggctcaatattttccccaagccaataaaggtatgcccaaatgtagcataaattattatgtttatgacattaaacaggatgctgaattatattaaatgaaaa

SEQ ID NO: 26120 - DNA, 1706 bp, Zea Mays
ctccagtccactctctcccctcgtttctctcgatctctccagctctcccccctctgcctgcctcttcaacttgtctccagagtccagaaccgccagccgccggcccacttgctcccgagggccgttcgccgccgccgccgctgccgctgccgctgacttctcctgaggagctaactgcctaggccgcttcccttgcagcgccgcgccgaggagcgggggagaccgaaattggcgcgccttcgccgcgctgccgcctcgccgattcgaccgacacgttcctctcccgttcgggcaggcaggtgccgatcccgcgcgccggcctgcgcgggcgcggcggcgcgaggcgtgatgtgcagcggatcggagcgcgggcgtgatcgcgtctccgccgagtagaggccggtgaggcccgcgggtgccggtgtgccaggagggtgggtgggtggggttgttgcgcgtgctggcgtgctgctgcggacttgacgatgtacatagcgcgggagacttccaaggtgtggaggaaggtggccacggaggtatcggtggagctgcagctcctgcgcgagaagtgggggctccttctcgccggtctgatctttcagtatattcatggattagctgctcgaggagtgcattatttgcatcgacctggaccactgctccaggacttgggatttatggcccttccagagctcgggcaagacaaaggttatcttagtgagactatattttcttccatcttcatctcctttgtgttgtggacattccatccttttatttatcacagcaaacgtttctatactgtcctaatctggcgcagggtgcttgcttttttagttgcttcacaatttttaaggattattacattctattcgacccagctcccaggtccaaattatcattgtcgtgagggctcaaaactggcaactcttccaccacccaatagtgtacttgaagtgctcctgattaactgtttattaagttccttgcttggttcatggctataattcagagtctccttataattgcttctcgcaagcactactcggtcgatgttgttgttgcgtggtacactgtaaacttagtagtattctttgtcgacaacaagctgccagaaatgccggatcggacgagtggactacatttgcttccattaagctccaaagaaaaagagggcaggcagaaggaggagaaagacagtaaactgaaggacgagttccacaagttactgaatgggaaccatgcggatcctactgatcggcgacagcgggcacagatgaacgggaggcacgacgaagacatcaatcacgcgctctccgaggccactgccaacggcacgtaagggcccgtcggcatctgcttttcaccgggggctttgtccttggcgctcggaggagaatcctcgcgggggtcgagaaaacctgcctggtgtggtgccccggccgcctttttctgaattatgaagctgtccgagattccagcgatccagccattcacatcatgcatcttcctgaaccgctgttgcgttgcgttgcgcaagaatcagaatctcgtggcgttcctcggtacagtttgcaccatacttcattgcaatgacatttatcagaaaggcacggtggggaaatgatcttgtacatactgatccgctaaaacatgcgtgcattcgcctcggccctgcacctcgatgagcgccgatgctcgatggc

SEQ ID NO: 26121 - DNA, 4425 bp, Zea Mays
ggttctttctccaccccgatgcccctccccctcccccgtgtgatcccctctccagatcgatgtctgccccggccgtaacccccgcggctcaccgcacgaaaccgccgcgagatcttggagctcagcctctgacgatggctacgactacctcgccaacctccgcgagctctgtccccctccctctcctccaccggcggcgggggatccttggccatgttcctcccgaggcgccggtccacgcgcttcggcctccgcgtggtcatcaagcctttctgatggctcggaacagaggtcagctatgcgatgtggcgtggcgaggttaccgcgggcgccgcggaggtggagggggaaggggaggacgagggcacgggcaagagagcgcatcgctgtggacggtctcgtgagagggaccttgggtgatccgggtgcttggtttcttggttctacggctttcgctgctgttggatttgccgagccggagccgacggagatgaccgtcgacgagctgaagctgcaggcaagggccagcggcggccacgacctaaggaccagttccccgtcggcatgcgcgtgctcgccgtcgacgacgacccgacctgcctcaaggtcctcgagaacctcttgttccgctgccagtaccatgtgacaacaatgggccaggcagccactgccctgagctgctgagggagaagaaggaccagtttgaccctgtgatcagcaacgtccacatgccggacatggacggcttcaagctcctcgagcttgtgggcctcgagatggaccttccggggattaacagctgaaaacctcgcccgatttgtaaagaagttttcttgttcaatgcggcattgaatttgggaggaatgacaagtctcatgaaaacttctgtatgccctacacgtgaccactaaaagaaagagttagacaggacaaaaggctgcagcggcagaagaagagcttttacatacccttacaatgctgattttgatggagatgaaatgaatttgcatgtccctcggacggaggaagctcgcactgaagcgcttaattctcataggggttcaaaataatttatgtactcctaagaatgtgatgggggatacttcaatgcaataatgagcttcccacaaaattacccaaacagcccaccatcagtcagatttacctctgaaatgtggcatccaaatgtctaacctgatgggcgggtttgtatctctattcttcatccacccagtgaagatccaaacggttatgagctcgcaagtgagcgatggacacctgtgcacacagtatggcttcgtatactttgtttacatatcttttccccattgtaatgttactcatctcccttttatgtgtatactttttagagagaaaattaccttgtagtctcattgtttcagtttatggtccaatttacaatggcttcactgtaaatgggaaaacaactcggtaggaatgcttttttgaattataaattatttctatttcatacgatgcttataggtatgtgatgagtcctccaatctgagaagtagagcatggtaaagcactccaagctgctctttcatcgggaaatttataggtgacacttgtgtcatacattgaactatggagtcaaacaaattacatattatccttcaacatttttcaccagtgggaactgtagttattgcgtagaatagatggtatattaatcgttgagagccaatgtttacattaactgttatgcagaagacaatttatgttttattttatatctaactgtactttgttgcagcttgtaggtactgatcacagcacattcaactccacacagattgtccatgtttctttcagtcaccatgatttatcactaggtcattgtgtttgtggccaacgagtattgttctaacagttatgttcccatagctagctagattcattgttgtgttttgttcagggtactttcaccacttctggtatggttctgtctgtaatgtgccagggattattatattgtttttggtttggatttggaatggtttggggtccacaacgatgatgcgtcagagctgttccaaggattggatgatttccattcccctgctgccaattcgactaggctcgccgtctccgctctgcccaactggcaccaagcagccaatggaacttgagcagccaatggatgatttccattcccctgctgccaattctccgaactgctttgacccttcaactcaatccgcatgtacccagtaaatgttcaatctgaatttggatcattgctagcaggattctttgcttgctcttctacttctgaaaattcgcaaaatggatagataattccagttaattttaatccattacagcctattgtggcagcaaacagcgactgggtgcggaagccggaagggagaggcgcttggttgacccagaacggacgacaagacaccgccgggggttcgctgcaaccgcacgcgtggtggccggtgtgggaaggagcccactgctcaagcagcgacgacttccgtaacttctcaggccaagttgtagggagggagggcagcaaagaaagcaagcaagaaagaagccgattccactggtggttaaggttttggattaaaggagagaggttgcaactccctgggccaagcagtagcccagcaagttcagcaccaatggcagccatatgaaatataaggcaaagcagataaaaagcttaatttttttcaataaggtaaaggcaatgacagaaaagtgaggagggtcagaggtgtacagataaggatgagggctgaaaagaggagcaggaaggcatgctccatctgtgctacaagggtcagaatggacttgataggacatttgactatacaacatggaagttatttcaagatatccttttttaactatgctgtcgttgctgatcatttgcatttttacatttttcacattatactatagttgaagatacattcctgaggacgaatgggtgcagttatgggcttcctgcttgctgccagcagtcttttggtgcttttatattgctattaatttgtttgaaatttattatggtgatgactgggaaggtctttttgaggctattactggttatggccttggtggctctttggccgtgttggtggtggtatttataccaaggctgctgatgttggtgccgaccttgtggggaaggtagaaagaaacattcctgaggacgatccaagaaacccagctgtcattgctgacaatgttggtgataatgttggagatattgttggaatgggatcatatctctttggctcatatgctgaatcgtcatgtgctgctcttgttgtggcctcgatctcgtcttttggaatcaaccatcaatttactccaatggtgtatccccttcttgtcagctctgttggtattatagcatgtctcataacaacgctgtttgcaactgatttcttcgagataaaggctgtgagtgaaatagagcctgctctcaagaaacaacttataatatccactgttgtgatgaccattggcattgcgctcatgttggcttggtcttccatacaccttcaccatttataactttggagcccagaagacagtgcaaagctggcaattgttcttgtgtgtggcggttggtctctgggctggcttagtcattggttttattactgagtactacacaagcaatgcctacagccctgtataagatgttgctgattcctgcagaactggagctgccactaatgtcatttttgggcttgctctgggttacaaatcagtcattatcccaatttttgctattgcgtttagtatcttccttagcttcagccttgctgccatgtatggtgttgttgtggctgctcttggaatgctgagtaccattgccacagaccttgctattgatgcctatggccctatcagtgataatgctggaagcttaagtctgtatgggtgcatcttatcatttatatgtatatctgaaagcttaagtatttttttaaatagaagatgtctggaaactttagtaacgacatgagtttcaggctttcagctatagcagtcttattcgcttttaagacagagaagatttttatttagagtttagaaagagtaggtgctatgggtgcatgttatcatttatgtggggaacatctctggtggaaattaatcagtaacgacatgagttaagacagagaagcttaagtattttttcagctatagcagtcttattcgcttttaagacagagaagcttaagtattttttgaatagaagatgtctggaaactttagtaacgacatgagttaatcagaagagatggaagggtagtttatcaacatgtatttggcacttcgccgaaaatgtcacttggactatcttgcaaactgaattttcagattggcttcttctgtctgaacattcagttcagtcttgcaggattt

SEQ ID NO: 26122 - DNA, 2390 bp, Zea Mays
ctaccatctttgtgcttcatgacagaattggtacatataaaaacgttgttgggtccaattcatctctgtgcatcccgtgttctgtggatagtcttccaaaccgtgctgaattcatatatataagaggtggtgttaccgagctgccatgcccgtataggtgcatatctgataagtacaagatgccaaactgttacacaccacttgaggaacttatgtatacttttggtggtccttggtctttttcaatcatcctttctttaacagttattcttttggcacttgtcttaagtgctctaagaattaagattggtgagagtgatatcacctaccgggcaactaatgcaatccacaatgatggttgttctttcccctttttgctttctttggccgaggtaccaggggcaagcagggcagaagaaactcagagccatgtccacagaatgtacttcatgggacctaatactttccgagagccctggcatctcccctactcacctcctgatgcgataattggaattgtttatgaagatgctttcaaccgttttattgatgagatcaatttggtggctgcatatgagtggtgggaaggatctatacatagtatactttctgttcttgcgtatccttgtgcctggtcttggaagcaatggcgcagaaggaaaaaaaaccatcgtcttcaagagtatgttaaatctgaatatgatcattcatgtctccgctcctgcaggtcacgggctctctataaaggcttgaaggttggttcaactccagacttgatggttgcgtacatagatttctttctcgggggtgatgagaaacgacttgatgtagcatccaccattcagaagaggtttcccatgtgtctaatttttggtggtgatggaagctatatgtccccatactatctacatagtgatacattgctatcaaatcttcttggccagtatgtatctactgcgatctggaatagattagtcgctggtttgaatgctcaattaaggacagtaagacaaggaagtgtccgttctactttgggccctgttgtttcttggatcaacagtcatgggaatccccaacttgagagacatggtgttcgagtggagttagggtggttccagtccactgcttctgcatattaccagcttggtattatcgtagctgtgaatgagaacttctacaagaatctccgccaccatgagcatgccacagaattttgtgaacgctcaaggaagaacgttgcagttccacttcaggatttcaatcaggcaaatctggatcagccttgcacaagctatgctgtttctagaaagcgattgacaggtggagtcaatggtgggatcataaatgagggaacgctcaagtcactgcactataaaagagactatctctttccattctcattgttattgcgtaattccaggcctctaggctatgcggaaacattgcaattgctcatttgtattgtacttctgggtgatttctccatcaccctgcttatgcttgtacagtactattggatatctgtcggagcttttcttgccatactgctcatcccccctcttgctttgctttcaccttttcttgctggtctcaatgcactttttagccgaggactaaaacgatcttcagtgacccgcatttttgcactttggaacattacttctgttgtaaacattattgtagcaatcatatacggctctttgtatttttggctctcttctttggcggtgtcctcagttcatcaagtatacaacacaaaaagcttcaagagtagagaagacaatgaatggtggatactgcctactatcctttttctcatcaaatcactgcaagctggactagttaactggcacgttgccaatttggaaatccaggactactcgttatttagcccggacccagatagattctgggcaatgtagtcgcctgcagcaagctaagaattgcagaaagcatggtttagtgatcgcaagaatggcaagtattaattattggatgctgaatatttgcgttttgtcccttgcaacgtcatcagcccaatacaatctctgaatctgaaggggtctaacacgctggctggaacttccttctatttatgggaagcgctcctgcgtagtgcactagtgcagatatgttcattttctttttctcagtttttttcccgtcttggtcgtgtgcctagaataggtctgtcgctcggtggggattagatttgtgcattttctttggttcaaattaaaccgttgattcgagtgtacagcaagaaactattgtgattgtcgctctagatgtacatcactgtaagtataatagtagaaccatttcaactgtatacaatcctcaaaggaaagtatgtttctttctattttctttttcctattgtcatcgtt

SEQ ID NO: 26123 - DNA, 1999 bp, Zea Mays
gctgatatccagggtgccctcacagtacagatctcgattgaagatgttatgatggcaatccatctgaaatcatttgactatcgagttcttaacctgttgatgtttcaacttactggtcagcatgtcaatgaattgcatatggacttcttgtcagtttcagaatttttggttgagatatctgatgacctgtgagtttgctctgaatcttattcccatgcatcacagcataacaaaatggtaggaactgcctacttcttaaaaatctgtcattaatgttttggtaaatttgtaaaatctgaggcaaggtagtgcatgggttaagatggaactagtgcttctattgagatgtcggtgttgtatgtaaatggaaaacaataattttaatttaaatgaaattgtgttttagttatcatgtaatctaactattaaaggatctgcggatatagaaacccaaaaacttatgcacttttgtagtgtaccttagtgtgatttatgggaaaatcatcagattagtagcgttgttatatacaatcctgtacctttttccttcttaatcaaatgacatgcagctctcctgcattgtttgagaaaaaagtgtatataagtcctcgggggtcaatataagcctagatgcaccatgtgctggacagacactatgaataactttcagtcttttttttatttgtttcacaaaccatgtcatcaattgaaatagctgtttcacccgtgacttgtttttgaatatcttgcaggtatgattatgaggtaagttgggctaccgaaactgatggtatcgtataatcttagctgtactagtgagtgtaggcctaactgttgaagaagttcaatttgttttgtaggatgacgttatgaacaatacgttcaatatccttcgcatgtttgctgcaatatatggaccattagaggcaccgaatatgctggccaagtgcataggcgaggctgaagagaaatacgagagcttctccaagaaactggatcctagtctctcaggtagttactggagaagatgtgaggaagcgacgaaggaaggcggaaaaacatcaggccatgcatatggaacatggaatatccctcgtgtgataagcaacgaagatgctttccgacgtgaaagacggagcaaacacgatgcttgtgctgtgatcacttgataggcaaatttcatgttccagacttccaggcatcttcaaaattgaatgaagctaggtacactgctagacagtgtcttacttacctgtatgcacgtttccattcttgccaggtgaaatgcagaaatgacctgcaaccgttgatgtaaggtgctaggggtctgctcagtgggaactccttgaggatatagtggtccttggcctaccttgggcccctttgatgctcacaaatgtacccattttcaagtcaaattttcacaaatgcagaaatgacatgctgaatttagtttctgtaaggctgtctccatcggataccccatctcatctcttttcaaacttatctgtaaataatgtcaaacagtatagttttttactgagtccaagaagggaacaagtcggtctggactctggagtgcgccttgtggccacgtgagagcatctgattcacgacgggctacagtgacagatggatatgtatcggtgtatcctgctactcctacccctatactcgtggctgcgcctgctacagtgacagacgggctacagtgattcacattccatgtgattggttgttaggatcagcagatcctggtcgaagccgagatgcaggttgggcttaacctgtatgcattgatgcaaaccaaaataagttctcttgtttggttgtttgtcctcaattagttaggatcaacactgttttaggtaagttgtatggatttagctttaagttgcacgactcaactatatttctaaaattacaatgccataaattataacgccataaattacacaaaatccaaatttatacaattataaattacaataacttatcc

SEQ ID NO: 26124 - DNA, 2171 bp, Zea Mays
  misc_feature (2170)..(2171): n is a, c, g, or t
cagtactgcagtcaatctggttccgctgctccttcctcggcaccgccgcctcgcaatccgctcccgcttcgcccgtaaaaccctagctaaaccctagccgaaagaaacaatgtctctcctcccctgagcgcgctcgtggccgccccttgttggccatggctctccagctccgccgcctcctcccgcacggatacgcccagcgacaccgcgccgtcatccacgcgctatcgctgctgccgccgccgcccgcaatgcttcaattcgaggtgtttcagagatattcttcttcaccctggcccttttcacctttccgcccttgtaaaatgtgtggggttgcatttaggagcaattcaacaaggaaaatatcttcaagaaataattttggggttgccttacagcccaaaagtagtgcctttattactcctcggctctttggcagctatagttctgtatgtttcagagccacagccagctgtggaattgctttaaaggctaataatattggcaattcacgaccattctcaactacatacagtaaaaaaataaggtttcttgttaaaaataagatttcattcagtaatctaaatatgagaaggaaagacggaagtgttgcacatagtttgcttcatagatctgagaaatgccaaagcacattagctacatgtagcaccattgttgatgaggcttcaacatctactagtaacaacagcaagagtgttactgatgctaagactgacactgccaagaggaagagttcaagaggaagcaaaaaggaagttgatggagatatgaaagaaaaggaagtacataccaataaaaagaggatatttgctagaactcgtaaagctgcaacaaagacgtctgataatattagcacgaaccaagaaaacaagaagactgataattgtaaattgaaaaggggtgctgatagtttcaaagagaaaaaagtaaataatagggcaaagtcaaaagcagaggtttctgctgcttcttctgtacctgaaatttgtatgcaatcctctattgatggttcagttattgagaaaaagccactggtgccattgtatcctcccagagccaaatcagttgtggttgtggaatcagccacaaaagcaaaagttattcagaagtaccttggggacatgtatgaagtgttaccaagctatggtcatgtgagagatttagcaggtagatctaaatctgtccgccccgatgatgacttcagcatggtctgggaggtgcctgctgctgcctggacacaccttaagagcattaaagttgcactgcaaagagcagaaaatttaattcttgcatctgatcctgaccgtgaaggtgaagcgattgcttggcacatcaaagaaatgcttgaacaacaaggtgtactgggttttgatgtgactgttgcaagagttgttttccatgaaatatctgaggatgcaataaagaaggctttaatgtccccgagttgcctggttgccaatcagctggacgggtccaatctgctgctttggcccttgtgtgcgatcgagaagctgaaatagaacagtttaaggcacatgagtactggacagtacagacagacttcaaaatacaatcagcagatccttcaaatgccacatgtattccattctgtataaagcatttgaattcaaaaaagctggatcaactttccataccctctcaagaagaagcgcaagctatagaaaagatgattcattcttctacatttgaagttttaggtgttaaaagaagtaaaattcacaagaatcctccattgccatatattacatccagccttcagcaggatgcagcaaacaaactccattttactgcaggatataccatgaagattgcccaaaacctttatgagggtatcaacctttcctcagaagaaacaactgggttaataacgtacataagaactgatgggttccatatttctgatggagctgtggaggacattcgttcactagttaaagaaagatatggtcagaagtacgtttcggaggacattaggaagtatttaaagaaggtgaaaaatgctcaagaagcccatgaagccattaggcccaccagtataaggaggccgccatattcaagtggatgttggcattcctgaaggagagatgaattttcattccactgcatcaaaactggacttcaagggatnn

SEQ ID NO: 26125 - DNA, 3574 bp, Zea Mays
ctcagcgccccgccgccgccacgcaattgccagtcctcgcgatatgggcgcgcaagaggaggcagtggacgagatgctgcgcgccgccgccgccgaggtttcaacctcctcggtgaagcgccgcctccgcatcttccaccacaccctacctcctctcatcgcgaaggccatagagtcaccgtcagatactgtattgttagtcgatctcattttccagacattgccaatatatgacgatcgagcatcacgaaaagcagtagacgatttggttattcaggctcttggtgaacccaccttcatgaagccctttgctgcggtacttgtacaatctatggaaaagaatctaaaggttacaaacccccttacaagcttaaagcttctcagatggtcacactatcttctgaaatggagtcagtttgccacacttacaaaaggcgcctttaccagactggccaatgcacaagcagtcttatgtcaagtccttatggatgggtccttccgtcggcgccggacttgcaaacagttattcattcatctcttctccgagcacagtggaatatataagatgtacatagaggagctcagagatttaaggatttccatgagagattctcctgcatttttgaatctaatactggattttaccattacctctccatcattatccactcagtaccagtcagtattccttgatttgtatgtcaaaatcatcttgagttcaaaagatcggccaccgaaagcagccactgaagcttttaagcctcttttcttgaacattgggcatgaggattttaagaatactattataccatcatgcataaagatgctgaaaagaaatcctgaaatcgtactacagtctattggatatcttcttaagacagtccatttagacctaagcaagtattccatggagtttatgccagttgttctgcatcaagctcggcattcagatgaagagaggaggattaatgctttgagtattataggaacactaagtgagaagtcaagtgatccagatgctctaccttccatggtcaatgctatcaaagctgttttaggaggctcagaaggaaaactatcacttctataccagagaattggaatgataaatgctttagagcagctatcaagatctcctccaaagcaaataggcagacttgccccctcagtatcaactttccttctaacgtgttacaaggatgatggtatcgaggaagtgaaattggcgattctatcagcaatagggtcctgggctttggtatcagctgaagctgtccaaccagatgttgtttcatttattgctgcaggcttgaaagagaaagacactttaaggaaggggcatctgaaatttttacgagttatatgcaaaaactctgagtctttaacaaaggttgcttctttattggatcatttgattcagttgtcaaaaactggcttcagcaaggcaacacagcggttggatggaatctatgcactctttgcagtatcaaggcttgctgctgttgatacaaaagcagatggtgccattctgaaggagaaactgtggacattgattgctcaaaatgaaccctcattgatctctttacagttgcttcccaaactagcagatgatgattgcttagccgtcctggatcttgttcaatcactgtttgtagaacagttcttcagggttcgagaatatttttcaatccattcattgctgcagctgctaatatatctactttgccatccaagctgggaagttagaaaggtagcttacgatgttaccaagaaaattttctcaagctccagtggtctagccgaagatattctatttttattcacagactggttgtcactggttggagagagactgtcaatattgaaacaaggtgatatggatagcccttcggattctcagctaccattctttccatctaccgaggtccttgtcaagtgtttgtttttgattgcaccttatgctgttgtgcatagtctgagatcatattctcgaattattttgtgctcccaccacccttgccttaccagctcctcaagcccagctggcgtatataagaggttgcaaagaaggcttagacaagaacagatcttttttgttgacttaattactcccaacatctctgttatctgcaaggaattactttcacaggatggtctatttagttccaacaatcaagtacagagtgcagcattatgttcgctatcaacacttatgacaattactcccaacgacacatttctagagtttgagaagcacttcataggactccaggagcgcaccttgcacgattccttctctgagagtgatattaagatattctatactccagaggggcagttgtcaaccgagcaaggagtttacattgctgaggctgttgctaacaaaaatacaaaacttgcaaaggggcgtttccgtgcatatgatgatcagatgcaggagacagctcggtctattgtccctgcaaagaatgagaagaaagaatcctcaggcattggcaagcgagaaactgggaaatctacaaaaaggactgctcctatagacaaggctaagactgctaaagaggaggccagagagttgctcttgaaggaggaagcatctgtgcgtatgaaggttgggcaagtgcagaaggatctctccttaatgttggatgctcttggcaagttggctattgctaatcctatatttactcatggtcaactgccgtcactggtaaactatgttgaacctttgctaagttctccaatagtaagcgatgctgcattttgtacaatgttgaggctagcacgttgcacagcccctcctctttgcaattgggcgctcgacattgctgctgcgattcgtgtgatatctgttggtgattttgaaatggttttggatcttacacctgtgatcatggaagatgatagtaagaagccatcatctggcatctttgaacaaatagtaaatgggctgactattgcgtgcaaagcgggtcctcttccagcagattcatttactttcgtctttccgatcatggaaaggatccttctatcttcaaaaaagacatgtcttcatgatgatgtgcttcacatactatctatgcatatggatccaatactaccacttcctcgacctaggatgttatcagttctttatcatgtgctaagcactgttcctgcctatcaaccttcagttgggcctatgctgaatgagctatgcctaggtctaagaggccatgagttagcacaggctcttgtcggtgtatatgcaaaagaactgcatgttaggcttgcctgcttaactgctataaaatgtgttcctgtgcactctgtgcaacgagatttgcaggtgtcaacaagcctctggattgctgctcatgatccggagaaggtggttgctgaattagcagaggaattatgggaccgctttggttttgatgccatcactgattactctggtattttcaatgcactttcccataaaaattacaatgttcgtgctgcatctgctgaggctctggctgcggcattggatgaaaatcaagacaaaatgcaaacatttgaactggacatggacccactgaactaagatggc

SEQ ID NO: 26126 - DNA, 1135 bp, Zea Mays
gttccctccctcatctatttgggaacaacccactcgcccctagcaataatctgcttctacctctcgatcgcttcccagttgcctccgctcaccactcgcttctctctgccagagtgcaagtgctctctccctcgcacactacacacacagtaacaacactccccggagtttcaccagctagctagctcccggttttagcaggcattaaaaccctatcctttcaggcgagccgcgagagaggctgaggcagagacgacgaggacgaaacgatccaggggctgtagcttccgagcgcggctggtgtctccgagcaagctactgccgtcgtcgccgccggaaatatgtcgtcggggcgacgtggcaggatcagcgacgacgagatcaacgagctcatctccaagctccaggcgctcctccctgagtcctcacgccgccggaacgcgagccggtcgtcggcgtcgaagcttctcaaggagacgtgcgcctacatcaagagcctgcaccgggaggtggacgacctctcggaacggctgtcggggctcatgtcgaccatggacaacgacagcccccaggccgagatcatccggagcctcctccggtgacccggccatgccgcccaggcgcgcgcgcgcggggctggccctcttcgattctgcctgccatctagtagctagctgcagcagccagcgcagctgcactgaagacgacgacgacaacgcgacgaccttaattatgttcctttgttcttcttccggtgtgtgtgagtgtgtgtgtttccgtgtttaattaatttgagagcgaggagctggatggagccttcgttcagaagaggatgaccaagagggctctcgatcctctcgatcgtgtaccacgccttggggttagtagagatatatatggacttgtattaaccggcgaggtaccacgtactggtagcttgtagttgcagttgcagtagactactatagcagtttctacgttgcagacgtgtcctaagagttgttgttttgtagatttgcacgctgctcttgtctctgcccttagcttgccaatgggcggacaagcagcttaacgtacgacgactactctggagacaaatatatatatatactatcatgtgcttttcctgtctttg

SEQ ID NO: 26127 - DNA, 1004 bp, Zea Mays
cacctatcgcctctcccgcgcggcccgcccacccccatggagtcgtggcggaggcggacgctgctcaaggtcatcgtcctcggcgacagcggatacgtgagcaagaagttcagccagcagtacaaggcgacgatcggtgccgatttcctcaccaaggaggtgctcattggcgacaggctcgtcaccttgcagatatgggacacggcgggacaggagaggttccagagtcttggcgtggcgttctacaggggtgccgattgctgtgtgctggtttatgatgtcaatgtcaagagaagctttaatacgctcgatacctggcatgatgagttcctcaatcaagctggcccatcggatcctcagcgctttccgttcattttggtcgggaacaagattgatttagatggcgggagcaaacggatggttccggagaagaaagcgagggaatggtgcgcctccaagggcgatattccatacttcgagacctctgcgaaggaggaccacaacgtcgacactgctttcctatgcatcgccaggctcgccttggagcatgagcatgaccaagacatttacttcaagacagttgcggaacaagtcccggacactgaacagacaagcggatgtgcttgctaggagtcagccatttcctggaaggctggaactacgtggatgttactgtatacaataagctcacagacctgatgacagctgtttaacaagcttttgtgtaattgtgtagccattcttaattttaattatggcatcaggggctgtgctattcgtctgatacctagaacacagatggggggcgtttgcaagctctgcttgcgccttctctcctagcatggacaataagaaccacacctggccttgcagaacagaacatatatatacttctgggtaaagacatgtgtagtgatggaactccatgtcggttgtgatctacaaatccatgcttaaacattcagttaagtactctaaagcctaaacacggcgtataatttctc

SEQ ID NO: 26128 - DNA, 240 bp, Zea Mays
atacactgttgggtatgaatttacccccatacccatacccacatgggtatgggtcacccatcgggtcacccatacccacaaaaattaaacatatatcaaaatattatattatacaaatatcaagtatatccatctaaataccattacaaaatttctagcatcatttaaccatccattcaacacacatagggtgaattacatgttccattacatggtcattaaattgtcgttaagccttct

SEQ ID NO: 26129 - DNA, 2841 bp, Zea Mays
ccccaccacagcagcttttaaagataaaccaaatccgctgtcgtccctgccctgcatcgcaacttgctcacaggacacagccgataagcagcggccaaaacagaaagcgcgatttgtttgatcgcttcctcctccactaccactagctagcctgccgccgtccgccgtgcagtgtgcgagctccgcccgccggtgccggaggcagaggaggaagatgcaggtgctgccgaggaagaggaggcgctccgggtcctggcttctagacgttgtgaaccagatcttggtgcggttgcccgagtagtttactcgtctagaggaggggtttggttctcgacccgattcggtgggggcttcgccactgggatagggggacagtttggcctgctggatctttatcgccagttgttggttctgtcctttccattgggctggtactttcttgacggattggttaagcgctgtctgtggggttgttgtgctgctcctcccttcatctcgttttgtggtgattggtggggggaggaggaagagctaggaggattctctctcttgttcttgggtcagttcttggcacggcaggatgaagtatatgaagcttggatcaaagccggatgtccttcagacggaggggagcaatatcaggtttgtcgcgacagatttggcaacagacgttgttatattgattggggatgtcaagttttaccttcacaagttccctcttctatcaaagagttcacgcctgcaaagattagttgcttcaatcaatgaggagaaaaatgacgaagtggatatctctgacatccctggtgggccttcagcatttgaaatatgtgctaagttctgctatggcatgattgtgacactcaatgcgtataatgtcctcgccgcccggtgcgcagccgagtacctagagatgttcgagaccattgacaaaggaaacctcatatacaagatcgatgtgtttctgacatcaagtgtgttccgcacctggaaggactcgatcatagttctacagagcacaaggtcactggtaccttggtgtgaggatttgaaagtgatcagccactgcatcgactctatcgcgtcgaaggcgtcgattgatccatcagaggttgagtggtcatacacttacaacagaaagaaactcccgtctgagaacggtatcgattcgcattggaatggtgtcaggatgcaacctatggtccctactgactggtgggtagaggacctctgtgagcttgaagtggactcgtacaagcgggtgatcatgagcatcaaggcaaagggaagcacgccagctgttgtcgtcggagaagcattgagggcctacgcgtaccgacggctgcttggctccctggaagacgctgtgagcaatggagttgattgcgcaaagcctcgtgcagttcttgacgctattgtatctctcttgcccgctgaggaaggctcggtgtcatgtggttttcttcttaagctgctgggagctgcatgtttgctggaatctgcatagatctggtcatggcaatagtggaggaatttcatgtcgttacagaatagcgacagtggcaaggagaaatttcaagatgatgaagagatcgtggagactgagaaacgtggcatcggtttccagcacgtcaaagctgggcagttgcaaagctgatcgatggatatcttgctgaggttgccaaaggatcccaaccttcctcttccgaagctgaccgcgcttgctgaaatgggtgtcttccctaccccggccaacgcatgacggcctctaccgtgccattgacatgtatctgaaggagcaccccagcctgtcgaagagcgagaagaagaaactatgcgggctgatggactgcaagcagctgtcgcacgatgcgtgcatgcacgccgtgcagaacgagcgtctccccttgcgtgtggtcgtgcaggttctcttcttcgagcaggtccgggcgtctgtcgcctctgcgaggagtgacccttcttcagctgagcttccatctgccgttcgctcgcttcttcccagagagaacggtaactctgttggcagctccaggtcagctgccacgacgacaacggaggaggacggatgtggggtcccgacgtcgagtgacgtcaactcgttgaggtcaacaaggctcgccaacaacagcggcggaagcgagaggagcagtggcagcagcgacatcaacaggagcgccgcggggaggggggcaagggggattctgatgccgaagaagatgctgagcaagctctggtctgggaaaacgaacgccggtgagaacagcagctcagacacgtcgcagagccctgggtccgtcaacaacccggaggaggtgaagtccacgcagtcaaggatcacaaggcgctcggtatcctagtcgcggaggggtaaccgcggtcacagcctagttttgttcttgctcttgatttttgccttcactggagagtagtggcaatctaaaaaatgtggagttactggagtaggtttggtcattgatgatgttttcagccatgttccatgggaactttttacatacaaagaaagtataggttgttataattgatgtatttttgctggcaaaatcatagtgttttagtttgctttttacggccaccggccaagcccggcacgattaatttcaagggctgaagacagagtgaagtaaatgctttatgatgtgattggatttgttagagcaactataaagagactctctctagcctttctaattgttaagaataaaaatattggtaaaagaatatactttagtaactttttaaatggttatctaaatatagtcatctttagttctgaatttgtcgctagtcaaaaataaaaaa

SEQ ID NO: 26130 - DNA, 213 bp, Zea Mays
attctcccctctagctctcacaattgagatatcacaaaagtacctcccctcattgcatcaatttgcccttgcttaatagttgatttcccgaagacaacatggcttggtctccagggctgatcttcagcatcttcattcccactttctacatcgaaactttcactatcgctggagttctcatatatcccagccagcatctcgtttgcaatcttc

SEQ ID NO: 26131 - DNA, 2651 bp, Zea Mays
cgccaagctccctctacgcacctgcctcctcctcggcccggatcccgccgccagcgcctgttatggagatgaaggcgtcggcctccgatgaaaccctagccgccgtcttggaccacctcaagccccacaccgtcggcaccttcctcccccctcgtgcgtgggacgacgacgagcgaaagcctccggccacatcttgagcgacggcagctcccccttttcgctgcgccgtccagctccccctcccctcgcgcacatgtccccaccacgctcgaatccttcagctcacgcgaccgcgactgcgaccccttcacctccctctgcaacatctagggttcgggtttgggtattggattgagcgggttcaggtagctgcgggagaggcggacgtgcggcgcgtccccctgcggcgtgccgaagatcttgacaactcgcatggccatctagggttggggttgagcgggttcgagtagttgctggagaggtggtcgggcgacgcgtccctctgcaacatgccgaaggtcttgacggtgagcatggccatctcgtcgagctggtcctgcagctacgtgatgatgtcaatggattcaacccacatagcatgggccaggccagatctaaaaaatttgtgtgttgcccccgagagcccaacgacgatggtgttgtcgtcgttaagtgaggctagcactagcactgctgctttgcactatgaggttgtcgattttatcaagccagctttggggaagcttgaaggataaaatcattgttggttcaacatcatgaatgacacttggaggaacttccgaacttgaaccatgaaggaatatatcttattttatatcaatcttgtggcacataaacaatggcgacaaacatccaattgctttcgagagcttgaaacatctccaatagaggtttgctcaatttcccaagtttgtttgggaaagggaggctcatggagctatacagtgtactcggggccttctttcatcttaacgctattcgagatcgtgagtttgccagcaagccttatgtggggagcaagaggtggaagtgtccagcgctatatctgctccggcgtcgagttgctgctgtgcgtgacctgcaagtgcggcatccacaaggagtttagcttcaaccaccgtgtcagatcaagtagctcatgtccatcctcatctttgggtttcaggtttggccttacaattcactgtacaaggttaaccgcaccgaattttgaatcatacgattatgtaacctcccatcgcctaccatagcttctcaatggttgaatgagaaatcagtacactgtcacatgacgacagcacacttctcaacggaagcaagtgacatggaccaccctacagaagctgtagaggagatgtaccagaaaatgttgaaatctgttgaagctgagaccatgcctccaaatgcctggttgtggtcaatgattgatagctgctccaataaggaggacatcaaacttctttttcaaattttgcagaaactcagggtatttagactatcaaatcttcgcatcagtgcaaacttcaatgagcatctctgcagaaaagtaactgaggcttgtgctcgtgtaggcgccgttgactatgggttgaaggctttatggaaacataatgtttatggaataacaccaacgattggttctgctcattatctactgcaacatgctaaagagcaaaatgacaacaaactaatggaaaacgtaattcatgtcctatcaaaaaatttcttaccgctgcaaccaggcacagctgatatagtcttcagtatctgttataatgctgatagatgggatttactctcaaaatacgcggagagatttgttaaggcaggtgtcaaactgcatcgagctgcatttgacatttggatggactttgctgccaaagttggggattctcaatctatttggcacattaatagtctaagaggcaggtctgtcaaacattatacacttgcaacagggtttgcatgtgcaaaggggtctctgcttgatcggaagccagaaaatgccgctgacaagattaagcttctttatgagcatttgcctgatcagaagaaaccatttgtgaaagatgaactcgagaaacttattgctggatggcctacggaggtggtaaagaggcagaagaaagataagaggaaggagttggaggaagctttgatgaaggacatccctacgatggtggactgcctgacaaagtccggcctcgacatccctgtggaactggacaagcttgccaccccacagctccaagtggcgtagcaaaagaaggcgcgcggctcgccatacaaccggaacagacttgagtctcgaggaacagcatgcattttggtttggcactgatgcaggcagcgcagcgcagcgcaggacgcagattgaaaatctgtgatagatgaaatcatgtttttatttctgtttctaatgttgtagtgcaggcccgtgcgtggtgcgccctttctgttgtgcgttgaccgttgaaaatctgtgatagatgaaatcatgtttttatttctgtttctaagaagcaaattgccgtcgtatcttggcacgtgttgtaactgtacccatcctttctccaaggactttctaatctgttattacttttaatattgcattaatagacctagtcgcg

SEQ ID NO: 26132 - DNA, 2606 bp, Zea Mays
ctcgtcctgttgcgcggcttcttctgctttgtcaaatttgtcaagctactgttgatgctccagatatagtagaaaaccatgggagaagttagtgatgataattccaacatgtcctttctaaaaagaatcgctacaagtgacgtgccactgttgaaagagtatggtgtgaatggagttgttgtcgccctgcttctggctgtagttactcctgtcctgctttccatgatgtttggcaagaagacaaagcaaagggcggtgcgagctgatgtgggtggagaggagggatttgcaatgcggaacaacaggttttcctccttagttgaagtcccatgggagggcgccacgacaatgtcagctctgttcgagatggccagcaaaaagtactctcgacagaggtgtcttggcacgaggaagctaattaagagggaatttatggaatcttctgatggtaggaagtttgagaaactgcaccttggtgaatatgaatgggatacctacactgaggcatttaatcgtgcatgtaatttttcttctggacttatcaagatgggccacgacctagatagtcatgctgctatcttctctgatacaagagctgagtggatcattgctgctcagggatgcttccgacaaaatttaacggttgtaacaatatatgcatctcttggtgaggatgcattggtgcattcactaaatgagacacaggtttcaactctgatatgtgattcgaagcaacttaagaagatacctgcaatcagctataaattgcagagtcttaggcgtattatctatattgaggatgaacctgtcgaggctgagacactgaaccaagtgaagcatttgacaacattgtctttcactgaagtagaggagcttggcaagacatctcatgttgatgcaaggttaccttcaggctctgatactgcagttatcatgtatacaagcggaagtactggtcttcccaagggtgtaatgatcacacatggcaacatggtggccacaactgcagcagtcatgacaatagtcccaaaccttggcatgaatgatgtttatctggcttatcttccattggctcatgtctttgaactagcaggggagactgtcatgttagcttctggcagtgccattggatatggttcagcattaactatgactgatacatcgaacaagattaaaaagggaacaaaaggagatgtttctgtactgaatcctactcttatgatttcagttcctgcaattttggatcgtatcaaagatgcagtatttaagaaagttggtgagaagggtggcctgacaaaaaagctgtcttgattttttcatataagcgaaatattgcagcaattgaagggagttggtttggatcttgggcaccagagaggatgttatgggatcacattatttataaaccaatacgggcaatgcttggaggacgtctaagatttgttctttgtggtggtgcacctctgtcaagtgacacacaaagatttatgaatatatgtctaggtgtcccagtgggtcaaggctatggattgactgaaacttgtgctggagcagctttcactgaatgggatgatacaagtgtgggtcgtgttggtccaccacttccttgttgctatgtgaagcttgtctcatgggaagaaggtggttacaagatttctgattctccaatgccgagaggagaggtcgcggttggtggacacagtataacaaaaggttatttcaacaatgaagcaaagacgaacgaagtatacaaggttgatgagaggggcatacgctggttctacactggtgatattggtcagttccatcctgatgggtgccttgagattattgacaggaaaaaagatatagtaaagcttcagcatggagaatatgtgtctcttggcaaggttgaatcggctctagcaacaagcaactatgtggagaacatcatggtttatgccgatccatttcataactactgtgttgccctggttgttccagcgcaccaggccttggagaagtgggctcagaattccgggatgaactatgaaggctttggagagctttgccaaaacgaccgagcaattaaggaggttcagcaatcgctatcaaaggccgcaaaagcagcgaggctcgagaaattcgaggtgccagcgaagatcgtgctgttgcctgaaccgtggacgccggagtccgggctggtgaccgcagcgcttaaactgaagagggagcaaataaaggccaaattcaaaggcgatctggacaagctctaccactgaagaagcgacagaggacggtttaatttgcacctactgcttccagacgcttgcggtgccaaaagctgcctggatggaacttttactgacctgcacgagtggtgtgtgtgtgtgtatcccagctgctgatacacaggagcttcgttcttctgtgactgtgactgagggaaaataaacccagtgttggaatgatcttgatttgtaatagcttcacgtcatgggattttaattttgtcatagcacagaggatgctcaatttcacgtccgttacgggtcagttatgacactaagcatattgtaaatgatgtttttttatatagacacaataaataggccctgggcacatca

SEQ ID NO: 26133 - DNA, 946 bp, Zea Mays
cgagagtcgagacgagtacggacgtaacccaacggaaggcacgctgcgcgggcacaagccaggtgtccgagtgcccctccactctactctcacgccgtacccaccacaatgtgacgggcgacctttccagagcaacgccgcagttcgcgaactgttcgcaaggaaggcagccacccagccataccaattaccaaaccactcatcaggtcgcgttgccagccgctcaagccaagacagccccactaatctccctgggatcgcggctcgggctaagctaatcggggcgccccaaccatctctcgccaagatctcgacaaggactagcccatgcgcgtgtcaactggagtagttaagcggcgccatgggtatgcggagcaggcacccaaaggcgttgggtttccgctggtacccggcggcaacccaccggtccctaactctggtactgtggagcctagcggcattggtcgtcgttgtgaatttccatcttctcatcattcataaggaggagggtgagaatatgagtacacacgagatccgccgatcgattatgagggaactggaagtggtggaggaggagaagttccggctagctcctccccggagccggaggaatccccgggctgtgcgccgcaagggagagaagaagtcgcctacaatagtggatgagttcttggatgagtcttctgcagtgcatgatatgttcttcccagaactgaacacggctgtggatccaatcaatggtggaaatgacagcatgtacttctactacccaggaagaatttggttggacactgatggaaaaccaattcaagctcatggaggaggtgtcctgtatgataagaggaccaacacctatttctggtacggggagaacaaggatggcaaaacctacaaagctcacagcaagggagcagacagggtttttttgtggcaaaaccagaatgtt

SEQ ID NO: 26134 - DNA, 1717 bp, Zea Mays
attgccatcctgttgtgatcttttttaactctcatttagtagatcagtatctctgaagtgccactaccataggtgttgcaatcataagttcatgatttgcttcttggctgacttgcagggtgatcagtttttttcgatggtattggcattggcatttccccgcaggatgacaacagcaatatctattgaggatgtgcgcagagaggtgaaaattttgaaggcgttatctggacattccaaccttgtcaagttttatgatgcttgtgaggacgcccttaatgtctacataatcatggagctttgtgaaggtggagaactactggatagaatcttgtccagaggtggaagatacaatgaaggggatgcaaaaattattgttgaacagatattaaaagtagttgccttttgccatcttcagggtgttgttcaccgtgatctgaagccagagaatttcttattcagcactagggaagagcattctcctatgaagataattgattttggtctctcagattttataagaccagatgaaaggcttaatgacattgttggaagtgcatactatgttgctccagaagtcttgcataggtcatatagcacagaagcagacatgtggagcattggtgttatcacttatatattgctgtgtggtagcaggccattctgggcacgaactgaatcaggtatttttcgctcagtgctgagagctgatcctaattttgacgactcaccatggcaatcagtatcgcctgaagctaaagattttgtcaaaagacttcttaacaaggattacagaaaaagaatgactgctgcacaggcactctctcacccctggctgcgagatgaacaccgacaaatacctttggatatgctagtattcaagttggttaaagcataccttcgatcgacgcctctcaaacgggcggcattgaaggccttgtcaagagcaataacagaagatgagcttatctacatcagggcacaatacaacttgttagaaccagacagcggagatggtagaatatgtattgataatttcaggatggctcttttacagaactgtactgatgctatgaaagaatctagaacacttgagatcttgaatgcgctggagccactcgcgtataggagaatggactttgaggagttccgtgcagctacaataagcccttaccagcttgaggctgtgccgcgctgggaagaaatcgccagtactgcattcgagtactttgagcaggaaggcaaccgtgctatcacaatcgaggagcttgctcaggagatgaatctttctgcagcagcgtattccatcgtccgtgactggatcagaccgttggacggcaagcttagctttgtaggctacaccaagtttttgcatggactaacgatgcgaagcggcaacacaaggcggcaccattgattcccttgctgccgcggtggttgcttgaattggttccattggttttgttgatggggatttggagagatggtgttttgtccctcttcttttcttgccttagctttttgtagaatgcttgtagagagagagagaaagggtaaaaggaaaaaaagaaacggaaagtgatagctcaaaattgagttgtagaagaaaaggtcattttttttttgccttggttctggtacattgtttgctttcggctatgatgaatggcattgtacagttgtcagttggcacatgctacatggtgctgtgtcgaac

SEQ ID NO: 26135 - DNA, 743 bp, Zea Mays
actccaattgcatagcttaaaacttttacacaatgaggcgtgcttgcacttgccaaaagttgatcttattaagagcttggaccagacgtggaatttgttctgttggcaactgatggtctttgggactacataaaaagctctgaagctgtagcttttgtcagagatcaactccgtcagcatggtgatgtccagttggcctgcgaggcacttggtcagaaagctctggatcaacggtcccaagacaatattagcatagtcatagctgacttggggaggacaaactggaaggcgttgcccgatgaaaggccgaacttgttcttggaactaagtcaagcagtcgcgactgtaggggttgtctcaataggaatttgggtctcgtcgttccttgggttacagtagaactagctactccgtccggatgtgtatattacctactgagtttacatctttctgctagcagtagcagctgcaaaatatatgtatattcgtatatagtgtgtgaattgatagggtaatctgtttgggtaatactgagtgaacgtgtgaagtactgatgaagatcgtgtagttgagctcctggtgagtcatgagtcatgacagctgagtggcttttgagtaatcctcatgtcaaaaaaaaccaagcaaaagaagaagaagaaaaagatcttctcatcagttgctaattgctacaaagccataaacaaatgaaggagtattgaataatggaatcgaataagtgcatg

SEQ ID NO: 26136 - DNA, 3039 bp, Zea Mays
gtccacctcctgctccgatcggggaggcggagcgtcgctgcggcgcctactgagagtctgagaccgacccccgacctagccgcggtaaataaatacccgacttcgccggcgtccgcgagcttcgagaatacatccttccccgcgttttaccctaacaacctaactagctgcggttctccactatcactcgctgctactgcacctacttcctttccgctctggtactgttgctggcttgctgctgctcttggtggtggtggtggtggcaccgaaaccctagcccttgccctcatgtcgcagcaggaggctgtggacccgccttcggcgacggacgagcggctgggaggtctaccgcggagcggctccaccagccgcctcaacgcgcaggcgccggagttcgtgccgcgcgctgccgcggttccccctccccctccgcagcagaaggtggtgcgtttgttcgcgccgcctccccacgcggcgttcttcgtcgcggcaccccggcccccaccgcccccgttcgagtactatgcggcggttgccaccggtgggggtggcaggttcggtccccccgccgccgctgcagagcaggaggccgaggctgagcagccgccgagggacgggagctttgatgaccccgtgcccaagatcagaaagcaggtggagtattatttcagtgatataaacctggccaccactgaacatttgatgaggtttatttcaaaggatcctgaaggatatgtgccaatatcagttgttgctggctttaagaaaattaaggctttggttcaaagtaactccatgcttgcttctgctcttcggacttcatcaaagcttgtggtcagtgacgatggtgcaagagtaaaacgtgagcaaccatttacagaatcggatttagaagaactccaggcccgaattgttgttgcagaaaatctcccagatgatcattgttaccagaacctgatgaggctcttttcagttgttggcagtgtcaggacaattagaacttgctatcctcagaccccaaatggcactggtccagctactaacagatctgcaaagctagatatgctttttgccaacaaacttcatgcttttgttgagtatgatactattgaagatgctgctagagcgattgtggaacttaatgatgagaggaactggagaagtgggcttagagttcgattgttgagcacttgcatggtaaccttccattgaacttcattaattgccgatgagatggcttattggtgttcaaccgcttgtacatacatattacaaggaatattccaaaaatcctctggggcctcggaacagctatacaggaatcatattacaaagccctggatgaactctgcagaaatacatttattttgaatctactttttagtgaagcagataccacccaatgaccgaccagatccatagggggtgatggggataacttcttttggaaacttgaaagctctcttgaactgctgtgctatagcattataacacagttttttcttaaaaaatcagggagaagtctatggccatccaacgttcatatttggcgattcagctattttgatgggtggttttggtgacgtggatgacaagtggcagtcagtcccgcttgtcatcattgttcaattttttagaatggctcaaaatggagaaatgaccaaaaccaaagttgttatagttgagatctactttgcacttgacttgttcatttgaaattatttacattctcaaaactctgtttgacgttctcatattttgaaatccaaaatttttgaactgttcaaattaacttggatggggaaatgacccaaactgaagatgtagatctcatcgatgagatctacaactttgtagctggcaactttttttagtgaaaatcatttatggtcccaaaattttgtttgaagtcacattttgaagttcaaaattttcaaacctccttggatggagaaaaaacggccagaaacaaagatttacttctccaccagatggagggggaagaagataatgctgacatgtgggcttgctgtttccctaacttgtttttgtgtcacaaaacaattttctaatttatttgctgcctgctctttgcaattcagacaaagggaggtaaagggaaaaagggtgggcatgaatctgatgggtatggtgacgaggagaatgtctctacttctgatcaaccatatgataaatatttagaagaaacacctcagatgtcagatgtgcctggagaacacatgactgaggatagcgctggagatatgggacgaggacgtgtccgggggcgtggtcgtggtggcaggggccgggggcgtggttaccatcaacagaacaacaatcaacaccaccagcactaccaaaacagtagccaccacagtaacagtagtagtacccgtccagtgggaaccccaccgccatctggccacccagtcatgattgagcagcagcaacagcagcaggcagctcaaccacagcccctcacagcggctaacaaacagcctccaggtcctcgcatgccggatggctcacggggattcagcatgggcagagggaagccgcaaacattgacgcccaaagtatccgagtctgaacctgaacaatgaattcgaacctcgcagagagactaatgggttccggtttgccatgttgatacatatgctgagagacttgccttttagaagtctgtcctcgaggtcgctttctaatttatgggaccatatacatttctgcatgtgctgtgtgtgtacttccaaagccagcagacactggttcgcgaatagtacggttgcggccattctgtaattccatttttgccccccttatgcagttttgggtgcaatactgaaaatcaaaaactcatgctaaaaaggttgaaaagaatcgagtcgttgtaaaataagattgtttcttcgctgtttgcgggggactgatcatttcgatgcttttaccattttgttgtttattatccattgataatttgtgggcgaagaacggtgaaaaattacacacttgaccaattgaattatcagttcc

SEQ ID NO: 26137 - DNA, 1572 bp, Zea Mays
agataatatttttcttatgcgataagacagttacgatcccatggaatccgataggaataatttcagacaggaaggggaaaaggttgctagtacagcaaattcgtttgggcgctttggttgtgctatgagcaggcacatatatatctagactgattataataggcagttatctgacatggaggagcacatgggaagacgaacagtcggcggcctgctattaaccaagggaggatcaattcttctcttcagagaggacggttcgcgccccagggccaagaactgctgctcgcgccatggctgcagtggtcatcattctgttggcaaagccaaaggcaaggaggtgcacagggcagcggtggccaatgaatcaacaccggctaccccacggagaccaaagatttgtaggaatcccgacagaatgccaccacatggaaccagtgctccaggcagcatcagcaaggatgcaggaggctcttgtagcgaaaccggcaacaggtcaagagacactcccggtcccgggcgtgatctactggctcggctcaaggagagggtcaacacatcaaggaaacggtcattgaacagggagaacagcccacagtcaccgagtggattcactgctagttccccgagcaacagtcgatcagtctcgctctcaaggccgtcgcaccgggcagcttcgagggtaagaagagctgatgaaggtgcaaatgcaggagctgacagtgtgcacagaaatggtgctgggggtgctaggaggagttcacagaggggtgacgcaggcttgctgctagttgagcagcaggtagcaagaaaccatgtgccttctgaagggtttctttctgggttcatggcgagatacagaagcgggcttcaggaagggctttcgtccctggacgacagcgtggaggattcaaatgggtacttgcgctttgatacgggtggaattgaagagctccagaactatttaatattcagcgatcggcacagaggaatgaggatggatatcgacggcatgtcctacgaagagttgcttgctttgggagagcggattggtactgtaaaaacaggtctttcagacgatgcattgtccacgtgcctaaataggagcctctacatgcccacagctccagggtctcatgaagattgtgaaacaaaatgcagcatatgccaggaggagtatttatcgggtgaggatgtgggcaagatggcgtgtaaacactactaccacctttcctgcatagagcactggcttcggcagaagaaccggtgtcctatatgcaaatctgttgccctgaaaaccaagtagcaacgtgtttcatgtttctttatagattcttcatatcctttatcccctccgcacctctcacattttcccttttggaattcttttccttcctttttcttactcaaagcactcatttttgtatcaatttaaatcagaaaaggaaatcttgtgttgtgttagcaacttgctgcgagcctggaccctgttggcccaaggcctagtaagaacaacccaatttattacgggagaagtccactgtctgctcaactgttgaaagtacagaaatg

SEQ ID NO: 26138 - DNA, 278 bp, Zea Mays
gtatggttatgattagaacgagaagaagaggtagaagtaactgaagaggagacaccacaaccacatttggacactcaggccgggaatagtttctacttcgacatttgtggacctgagcctgattcacctgtgaacgaaggcaagccccggtgcatttgccaccttccttgctatttcaaaatctttctcacttgattgctgcattaggtgataggagttgcttgataaaaccattcctgcattaccttccttgaattggattaccttccttaatcacc

SEQ ID NO: 26139 - DNA, 5109 bp, Zea Mays
tgcggattggtggatgagactggagcctcggatgagagcaagtctcatgggggtattcttcgggaaaggtgcaatggccctggcaaatgagatggttgaaggatcagacagtgcctcaagggataatttaggtgaaccaggatcattcgtggcaaacgaatcttgtgaatgtacacggcagtctctgttcagaaagaattgtgcttcttccgttgatggtgcaaacattctgtcttgcagcaagaagtctgtattttataaagagttgaaaagactgaaactagttgaggagatagtctgtttgaagagcaacattacttgctgcagcggtgatgcaatctttttcacttcattagtgtcggctgctactgctgctggtgatgtacttatgaaattacaagggcttctcatggtggtgtcgacagaaagtataaatcttgaacttattggggatgaagcccccaaaaagaaagatgttgaaaagaccagtggaggttctcggaaaggaaagaagaagtctaacaccttgaaaaagctaacgacatctgctaagccatctaaggataatggatgcagtagttcagataatcgcaattgtagtcctttaccaaaccattgtgctccatctgttgaaggcactgctgctggacctccatctgaaaaaactccttacaaggaaattgtaccaacaacgaaggttgaacaaactgtctcgttggatggttgcaaaaatcaatgtaacaaaaagaagaacaagcggaaagggaaaacaaaactatcaaatccgatgaggcctgagagcccaagatctaccaaattaaaaacagttgttccccatagtgctgcagaggccttgcatgaagctgctaaagaggctgatgtctcacctcatcacccatcgtatgtccatccttccaagaacgagatctctgaagctgttagctgttctgacccttccattttatctaatggaacaaaggtaatatccaccagtaagggcacaaaacttgaagacacattgtattctcctagagttcactcatcacttgctacagaacgttttcagagtgcccatgatgatgccttcaaagtggctgtgcaggcctcatcgtaccttagccaaagtgaatccttggttcagtcatcctcttgtctaccttccagaagcaatgaggtctcttctactaatctgtatggaagttcagttgactccttggtaagatctgcacaggaaaaaactgaatgtgatgggaaacatgtggatcataaatctgaagtgacaaaggacagaattttaccttctgctattcctactgacatgcttcaaagtgctataagtaaaaatggtggagttatgaaaaatggtggtggtgaatgttatgtatacaataggaacctactgggaggaacgtcgtatgaatggcctagtgtaacaccatctcattttgtatctcctcaaatgcaacaacgtccagctgcagcagacaggttgcatcttgatgttggttacagatggccaactcaatttaaccaaccctttcttcctgccaaccatcaggtgaggaatccgccaattgatgctggacacaatcaaatgttaccttctctagcagttccactaagttttgactggcctccagtttttagaggttatggtaaaaatgcttctgtaagctatgatccattgtataccccacagatgcaatcttctgcttggtcagggttccctgctcaactagtgcaaagagggggtatttgcagtgacagtgatgttgcggatgatactgaaagctattggttttctgaagaagaatcagatagtcgtgcacattctggaagagatattaatcaatactttggtggaggtgtgatgtactggagtcctgcagaacatgcaggaactggtttttccaggccaccatctcttagttcagatgatagtgcctgggcttggcatgaggctgatgttatacgagttgttgatgatgtagctaatggtattccatctacatacacaaatggtgtatcatcaccaccctccactccatcttgttctcaaaatgaatctttggatccagctgctcacttgataacagggaatgagatcaataatgaagctctgacttctccatcttcggtgcaagatagtcctgaagataaaataatgcaagttgcaaaggctgtgtcttgtggcagtgaagtagttaaggcagatacattgccatatgccatgctgcggccgatagttgttcctagtatatcacgaaggtcatcacgatctgagattaagggtgctcatgatcacaggaggagcccatgtgtaccatcaacaaggagggacatacctattctaagaagacctccatcaccagtagtacttagtgttcctcgcgtacctaggccaccacctccttcacctgctggagagtcaagaaaacgagggttccctatcgttagatccggcagctcaagtcctcgacattgggggatgagaggtttattttctgaagacaaaatttttcatagggctcagttttgcttggatggtcctgaagttgtatggccttcatggggtaacaagggtacttctggtacattggtgcaaacaattgaggatactgttttgcaggaccaccttgttaagatttcacagctatcttgtgatcaacatccagatgtggcattgcctgtacagccactagatatgctaaatggttcgtctcacaaggcatccctctctttgatgcacaatgctctacatgaagaaatagatcaattctgtaagcaggttgctgctggtaatctggtgaggaggccctatataaactgggctgtcaaaagagtcacccgttgcctgcaggttctgtggcctcgctcccgtacaaatctatttggctcaaatgccactggtctggctcttccaactagtgatgttgatcttgtggttagtcttcctcctgtccgaaacctggaacctattaaagaagctggaattttggaaggccgtaatggcatcaaggaaacatgtctacagcatgcagcaaggtgtcttactaaccaggactgggttagaagtgattcccttaaaacagttgaaaacacagctatacctgtgatcatgcttgtagcggatgtaccctgtgacacgaatatgtccaatgagtattcttcagtactagatggctcacaagactattcagttaacatgcttggagaacaagggagtcctcctcggtctgacacctctagttcagaaggcagcaacatgctgatgtgctcaaaattgaataaggatgattgtgatattgtgcagtcaattcgtcttgatataagtttcaaatcgccatcccatacaggactgcagactactgagttggtacgtgagttgagccagcaatttcctgcagttatacctcttgccttgattctcaagaagtttttggctgaccggagtttggaccacccctattcaggtggtctgagctcttactgtttggtgctgttaattgttcgttttctccagcatgagcatcatcttggtcgacctattaataaaaatctgggcagccttttgatggatttcttgtacttctttgggaacatatttgatccacgccatatgcgcatttctatccaaggaagtggaatttatttgaatcgagaaagagggcaaagcattgacccgattcacatagatgatccacattgccctgctaacaatgtgggcaggaattgtttccgcattcaccaatgtattaaggcatttgctgatgcgtttgctgttcttgagaatgagctactgcagttcagttcagaatgtagcatgcctgtatcttcattcaatatactaaagaaaataatcccaagtattgattctgatgagctgtagctataaaaaagaggtacgattccacagaatacaattgatgacagggtggaatgacctgtgctgccttctagacacactgatgtctatgcagctgctcagaagcctcagtgtggcaagtttgatacctctggaatagaccaaaaaatagaccggcaagatggcaatattcaaacgtgagctcttgtgtgttcatgcaatggcacatgatgccttgctccctgatcgagcttcttgatgttcagatctctgactgaggtaaattggcttactcaagaacaaggtggtgaattggctttctcatgaacaaggcgttgctgcacacagactactgacgtggctgttcttgcacctttctgaataagcccattcatgtaatgtttggtaaatgcaaaccgcatgattatccgcttgatactgtgattgatagatgcttcacctcgtgccaatattctgtgttccaatgccaagtcacatattctgagcagcaactggagatttgctcatgtaccgattcttcaaggtcctaggatcatttggggtgatgaagattgtgaaatacatgtggaggggtacttatatgatgaaaacaaggatggttgtgaagagaacggagtagtggcatcagctatcagggaaagggaagtgctattgacatcatggctgacccctttcagattatcgcgctgagatcttcctggcgaggattgggagctacgagccagatatccttgacggaaatgtttgcttggacagcgtaaaccggaaagtaccggcgatgatattgatgatgataatcgcactgctctctattgtcatactgttgtctgcactcttcagcgacatgtcttgtgccttttcaacgtgcgaaatgtgagcaattgctcttgtaaagctgcactatttcactaaaacattattgtttgggttatttagatccatggtattactatttatctatttggaaacttacattacaattttccctggatgtacccgatccatgccatttcctacgcttctccactcggcagattgttgaatcgtatcccaaaatctctcccattgtcgtctccatgaattgctcatctcacctctctaccatggagggtttagggtttatatctttctatcaggttaaactggttggtgtatataacttaatatggtattagatgtctcgaatttaaatcctagttagtataattaaataaaaataaata

SEQ ID NO: 26140 - DNA, 2041 bp, Zea Mays
cttgctcttttcatctgtttggttggtgttccaatcatcttgacatctggccagaaaaagaataagctggctccaagataatggcatctcttactccaggaatactattaaaggttctaaaacatattaactctgatgtcaaagtatgtggagaataccggtccattcttctccaagttattagcatagtccctgcaataactggttcagaactttggccggaccatgggttctttatcaaagtttcagattcttcacactcaacttatgtttccttgtctaaggaggacaatgaactcatcttatcaaacaaactacaacttggacagtttatatatgttgagaaggtccagtcaagtatacctgttccggttcttgttggggtccgcccagttccaggaaggaacccttgcattggaaacccaaaggatttgatgcaaatgtcaactccctctggagttatggaagcactggatcatcaacggacaacttccaagtcagctgatctgtctgaaagtgaaaaggaaaatttgcagagaaaggtagttatcaaagagcagaagacagttgtcgcttcccgttacatgcttggggtgtcaagcaacaacgggaaaattaccaacctcaactccagcattgatagtgaaaaaagtaatggaggaagtaccatatctgaatcaaataaaaaatctgttgccctgaaagtcagacaagaggcaaaacctcaggaacggtcaaataatacatctcctagtaacgctaagttagtttccacaaagcaagaaattagcaaggacacacgcaagaatattggcacttcacctagtccaaatggttctgctgtagtcaagaagcaaatgccaaaggagagcaaaaaggaagttgctactgagagaagatcaccaccaaagcttcataggagttcgccaacaccagcgaggacttcaccaacaaagctcagtccagcagcaaagcagaatggaaactctggtccagtttcttctgtatctactgttaaaaaaagagttagtgaaactatctcttgggactccctcccaacaagcctaatcaattcaggaaaggctgttgtccggaggaagaacattgctcttattgtagcggctgaggctcaaagggaggctgctgcagctgcgtatcttgtaaaaggccttggaattttttctgagataagggaatcttctgaagtagatccacaagctgcaatcaccaagtttttcgagctgcacaggcttatcgttcagcaaagtgctgtctggaaagcttacactcctgagcctagcaaagaatctcgaccggagaaggaaaaaccgtcgaggaaagcttctgcatctcatcatcaccagaacaaagctggcacacgcgacacagctaagaatcccgaaggtgcccagggcagtgagaagacggaatgggcccgggaggacggtttcaaggagatctgcaggtcatggattgttctgaggaaagaatcgcggtcgtggtttctgagcttcctggaggatgcacttgaatcaggattcatgtccgagggccaaaccaccaagaacacgagagaacgcgtgcggggacaacccaaacccaagggtggggacgggaggatcgcggtcctgctgtcgcagctcaaggagacgagcaactggctcgatcagctgctgcaggacgaggcggacacttccgcggacggtttggccgaaaccgttgaccagctgaagcagaaggtgtacaaatgcttgcttggaacggtcgaaaccgcggcgtcggcactcggaggaagataaaaaaattgatgtaatggtgacgaagacgagcattaagttattgggtgttcagtcctgcaacaggatgttggggtgaagaacacaatgaggggaagatgtaaatagtcgggttgctcatttttaagttataaactaatttatttttattttttgggaggtgggggtgggggaatttcctggtgttgcgtgtgaaatggcaattgattttcttgggtattcgaattgttacaaatgatcttgcg

SEQ ID NO: 26141 - DNA, 466 bp, Zea Mays
cacctcgccctagtcatatgatcctctccccgccctcccaaccgcccccgtggcccctcccctcactctgtgagaccaatgcccgcagtgcttgccgccgcccaaccatggagatagggcagtacgccacgaccagctgctccaaggagcatcagaagatttccgctcgtggacgcatgtttgattttgtcccccctactatgtttccttcgatccccaatccccttcccaggtaagaaacacacgtctccacaggcggccaccactgattcggtctagctggaggtaacagtggcgatggagatggcggtcacagagccatgaactcatgggcgggggagcgtgtcaagaaaagaattacttcgccgagaaaagaaatctgacgaaatgacaatgcaagtagggattgttaacctgctaacacgtggagggctcgccttcaaggggatgcaacatgagtatgctg

SEQ ID NO: 26142 - DNA, 2952 bp, Zea Mays
cgtacagatatatacctatgtgttacaataaaaatgaaacatgataggttgtcatagcagatgttcgcagcagatgatataaataagagatttataccgtgataaataaaaaaatatagagaatattatttgtagaatgaagtttaaaatataggatgaaatagttataggaccgtaatccatctgtgggacatcgcatgctgggaccgcgggtgtgggatagggacggatgacaaagcaagagcagaaaaaagaactttcaccatcctccctatcaatacaagattcatctacacaaattataatatactccgtgcgaaggaaagatcaaattagagattcattcgatcaattctgattgtttccttccattccaaaccaccttcaattctgatttctgcgggtgtgggatatcgtccccccttgccattccaaatcctcctctgcaattttctcatggcagctgacgtttccatcccaactcgatccgcgtcaaccgcccgctaattcctcctagttctagtcccctctctcctgcgccgactcatctttttcctcgtgtcactcccctgctgctgctgctgccgggaagatcaaatcccgtcaaaaggctccaaaggatcagagttctgtcaagatggcatgcccaagaggaaggacaccatttcccctttgtttctttctgatgatttgcctcatggctcagctgggagcttccaatgttgtactcatggcgaacaacactaccttgtcgttggatgatgtcgaggcaacttttagtgggtgttacacattattacactatctccatgtatctctgtacatgtcaattaaaaatctggttagctgttgtttttatcaaacacaaaagtaggttgcatgccattatattaagaagatgaaaaacagtataagaaacccggtcattaaacacactctccagtacattgttagttacctgttgatgttatgatctgttttctttaataccaagttgccctgtttttagtgattattgaatgacaggtcttcatctttttttgcgctgttagttagatgtctcctccagtttcttcttatatagttgcatcattcttgtatctttatgatccataatgtgcaatgttactttggtgcctgaaccaatctatctggttaatgcaaggcttatctgacccttttcattcttcctgcagctccagcagtggaaggttcaggtgtaagtggcgttctttatgctgtggaacctaaggatgcatgcagtccattgagagcgaaagcgattcaaggctctgtctcaccttttgcgttgattataagaggcggttgccaatttgatgacaaaattagaaatgcacagaatgctggattcaaggctgctgtagtatataataatgaagataatgacatccttgtttcaatggctggaagctcgcttggtgtccagatatatgcagtgttcatctctaaggcatcaggggaggagctgaagaaatattcaggccaaactgatgcagagttatggataataccaacatatgagaactcagcttggccaatcatggcaatttcattcgtatcactgcttgctatgtctgctatcctagttgcatgtttctttgcgaggagacaccagatcagacgggacagggcaagacttccccgagctcaggagtcccatggaatgagcagtcaattagttaaggcaataccaagccttattttcacaaaagtgcaagaagacaactgtacatcagcaacatgcgccatttgcttggaagactacagtgttggagaaaagataagagtgctaccttgtcgacacaagttccatgcggcttgtgtggacctatggctcacctcatggagaacattctgccctgtatgcaagcgggacgcaagtgctggaacgtcagacccccctgtatcagagtctacccctttgctttcatcatccgccacacgcttgccggaatcaactgtgttggcttccttgcggtctacagcagcagcgtctccccccaggacgatcagccggcatcctttgttgcggtcaatatcccgcaattactctgtttcaggttccagtatccttcgcacccccgactctaggtttgatgcaaactcatctatctgcacaagtggaagcaacttggaccttgcaaatgtaccatccccatggtctggcacttggcaccgtgcgtctgctcactctttgtgcaggggctacttgtccccaccgatcggcatcaggaatacctcagcacatgtctcgcgttctgccaatggatctcccagtcgttacgtaggctcatcacgcatgtcccatggatcttcagggcagcagcatcctcacctgaggcactgcacattgtcaggcccgagcctgttcaccatggtgccccagtcaccgcaacagaaccagttgcagcatggtggatactcggaaacaaatctgtcggctgccgcatcggctcaatcattccgtcagctctacctgcagcattgccctgattctgacacgtcgtctcagtcacttccagggtgctgatctcttgctgcaatattcactgattcttgcgcccatgagaaatcttgcctggtgctgaattgacatgtggattttgagctcgtcagcatagttcaccatgatgataaaaaaaagagaaagaagtttggagtagttttacatgtggaaacaaaactgcttgtaagaagagagaatgtgcagccccagagtgtgagcaattttacatgcttgagtgtacaggggtttggagtagtcttggacttgcttattttgaggcatgtattgcagtcataggttacttctgctcaatagtttatgtgttgcctctgtctggtttctcaagcgtttagcttttaccgatactagaaaaggaggcgcgcttcgcggcgccctacctccattagtcaaatgcaataacaaac

SEQ ID NO: 26143 - DNA, 1832 bp, Zea Mays
acgaaacctgtgtgtgaatgtgtgatgagggcaaaaagcaagtaacccatctatctagggttggaagcttgtacatggccacctcggtggttgtggcacgcctcgcgggcgaggcctcgcagcccaaggtcctaccttctgcgaatggagtctcatccgagagctattggcgggtagctgctacgcgccgttggcagggccgcggtgtccggtgctgcgcggccggtttccgcggtgggggcgccgacgccgacgccgtgatcgccagcgaggactttgtggggttctttcgggaggcgtggccgtacatccggggccaccgtgggagcaccttcgtggtggtcatctccagcgaggtcgtgtgcgggccgcacttctaccgcgttctgcaggacatatcacttctccatggtctggggattaaatttgttcttgttccaggaacacatattcaaattgataagctgttgtcagaaagagggaagaaggccaagtatgttggtcagtacagaattactgatgaagatgcaagaaaggctgcaatggatgcagctggtagaatacgattgacaatagaagctaaactttctcctggtcctccaatgttaaatcttcgtaggcatggtgttattggacgctggcatggtcttgtggatagcattgcaagtggcaatttccttggtgctaagagaagaggggtggttaatggtattgactacggattcaccggggaagttacgaaaatagacgtttcacggataagagaaaggcttgatagtgatagcatagttgttatcagcaacatgggcttcagttcatcgggagatgtgttaaattgcaagtatattttcttaattatttttaagttttttcgtatgattgtacaatgtatacatcaaaattgtgtagttgtatgcttgctaccaagtcaagcataatatcatatgaatgcaaataattttcgtaaaacttgttcctttgcatatattgcagctaccatactaaacaaaattgatttgtgttgtttgcaataattcagcacctacgaggttgctactgcatgtgctttagccttggaggcagataaacttatctgcgttgtagatggtcaggtatttgatgatcatggacgggccattcaatacatgtctattgaggaggctgatttgttgattagaaagcgtgctaggcaaagtgatattgctgcaagttatgtcaaggttgtggatgaggaaggcatcaattctttgcataaaggggacgacagaccatcattgagtcccaaggcttacataaatgggtatgctgcttcttttcgaaacggattgggttttaacaatggaaatggtatttattctggcgagcaagggtttgctattggtggtgaagagcggttaagcagatcaaatgctgatccttttaaaaacgggttgggttttaacaatggaaatggtatttactctggtgagcaagggttcgctattggtggtgaagagaggttaagcagatcaaatggctatctttctgagttggtcgcggcagcatatgtgtgccatggatgtttatgaaggaacaaggatggctacagcggaagatcttcctggcattagaaaaattattcggccgctggaggattctggtgttttggtgcggagaacagatgcacagcttcttgaagcgctagagtcattctatgttgttgaaagagatggttcaatcattgcttgtgctgctctatttccattccctgaggaacaatctggtgaagttgctgcaattgctgtatctgaagaatgccgaggaagaggtcagggggacaagttacttattac

SEQ ID NO: 26144 - DNA, 1390 bp, Zea Mays
cgaaaccctgcctgcttcgctttcggcagcccacgcggacttgggcccgcttgccatcgatagtttcgttacgcctcttttaatctctccgctccttcgtatcctccccttccagtcttccactcgtaaaccactacctgcgatctccgcacccgcgctcaccggctcaccgctatctactccgcatccgccggccgccggcgagcccctcctcctccacgatccgtgcttccccggaggcaactccatgaattacatcgactccatcccgcccctcaacggagggaattacgagttatggcgagagaagcttgagctggcgcttgcgttgttagatattgatctggctatcactgatccctgtcccatcgctccggtagacccggtgcaggaagagaacgagagcgatgatgatttcaacgctcgtgtgcgcaatcatgcaccaataaaaatgaagtatgacctatacaaggtaaaatgggatcaatcgaaccgcaagtgtctgatggtgattaagagctctattatggatacaatcaggggagcattcccagcatgtaccaccgctacagagtatcttagtaaggtggagagtcactttactatctcttcaaaggcttatgcatgcacaataattgaaaggctacttaccgataaatacactggcggtggagtaagagagcatatattgaagatggccagcatggcttccaagcttaaacctatggaaatggcgctcccagatgagtttctggtctatttgatttttgcctctctgcctaaagaatttgaagcttttgagattaattataactcacaaccagacaattggggcattgagaaactgattgccatgtgtgtgcaagaagaggaaagaattaaggcttcacgtggtgattctatcaactatgttgggatatataaggcacatggcaaggctccacagaatgatcaccatctgaaaaataaagaggtggacaagaatgattgctactggtgcgaaaagtcagggcatcatcagaaggattgtccatccttcctgaagcacttgatcaataaagggattccatacgaggaggacccttcaaagaggagaaagatgcattaaagtcgtcaatggtgttgatgatgaagttgaagtgatagaacttccattattattgaataatagcttcattcttcacttgaataatgttctctatgtatcatctttcctgtcatgcgaatttaagctctctaatttattagaaatagaaaaatagatcctttcatgtaatgatatcgtgatattccatgttactccttttttgggtcgatgtagagacctccattgcatatgactggtattcaactaacaatatataggtcaaatatttcgaaattgactacc

SEQ ID NO: 26145 - DNA, 532 bp, Zea Mays
tcataaaactttatccttcctagtactttaaatgtctttctttttggtatttgattctaaagtttaatttatagaatcaaaagcaagttcaaccttgagcaatttatgttccatgatagcttaacaaatcacgcaccaaacaaaatgactcaaacgcaaaaaaaagagagtaaatattcttgtttaaaaaaaggatcttgttggaaatactgaaaacaatgtaaggttaattggcccgaacaagccggcatattgcagcctagcacccacgccacgcaccgcggcaatctgacctgtcttcaatggcaatcatggcgggaagcggcggagcaaccttggaaacatcgtccactgttccacaacgttgcagattatccgccgaactcctacgggtattgactcggcggtggggtagtaaagacggcgtcctggccgcgccgtcgacctcgaagtaccgtgtccccgggcggagggtaatacgagccgacgggaggcgccggatagtaaggtagcgcacggtcagtgtgcctgg

SEQ ID NO: 26146 - DNA, 2223 bp, Zea Mays
atccccaatcgaaacggctcgcagctcatctcaatccgatccgatggcccgcgccgccgctcgcctcctccccatcttcctcccatggcggcgtcctcccccgccctgcctcctccgccggggcttcctaaaccctagcagccccagaacctccgcgcgcgtcgacaccctcgttctccctggagacgagcgcttgcccttcccctcgcccccacgcctcccgaaccagctgcgtcctgactacgggagtggcggcggaggcggcgctccctcgaccatcgcggccatcgtcacctcactcggcggaggccctgcagcggtggggatcgtgcggatctccggccccgatgccgtcgccgtcgccgaccgcgttttccgcccagccgggaccaggagggcgtcgacgccgtggcaaccgcgcagccactttgttgagtacggactcgcgctcgacgcggacggcagcgttattgacgaggttttggtggtgccaatgctctccccgaggtcctacacgcgagaggatgttgtggagcttcagtgccatggcaacgatctctgcttgcgccgcgtgctcagggcttgcttggaagctggagccagacttgctgatcctggtgagttcacccttcgtgcattcctgaatgggaggttggacttggcccaagcggagaatgtgtctaggcttatttcagcaaagtcagcagctgcagcggactcagctttggctggcatccagggaggcttttctaccctagtaaagtcattgagatcaaggtgcattgagttgctaacagaaattgaggctcgtttagattttgaagatgagatgcctcctttggacccagtgatgcttgtcagcaaaattaattgtatgaggaaggaggttcaggatgctttggacacttccaattatgataaattgttacaatctggtctacagatagcaataattggccgtccaaatgttggaaagtccagcctccttaatgcttggagtaagagtgaaagggctattgttactgaaatagccggaactacacgggatgtagtagaagcaaatgtctcaattaatggtgtacctgttactcttttggacactgctggtataagagaaactgatgatgttgtggaaaaaattggcgtgaaaagatccgaggctgctgcaatgggagctgatcttattgtaatggcaataagtgcagttgatggatggactgatgatgacactaaacttatggagcatgtttcggtaaatagggttctgcagttccgatggttcttgtaatcaacaaggtagattgtgcgccatttgttcctggagaacagttcaaacaattcagtggcctcttcagaaaacacgtacagacatgtgcagtcaccggtaaaggcatttctgatttggagagcgctgtaatagaggtcaggggtattgagcatgtgccttctgagggacgaaggtggaccgtaaatcagaggcaatttgaacagctgttgaggactaaagaagctttcgcacgtctagagtcatcaatcaacgagcagttaccaatggacttttggactgtggacttgagggaagctgcgcttgcccttgcaacaatcagcggggaggacatctccgaagaagttttgagtagcatattcagcaaattctgcatcgggaaatgatctcgcaagatgctgcatccagtagtttggagcagaagctttttccttgactgagaacaggaaccaacatgctgagtggcacttggttcgcggcatcagaatggtgaacaggcgtgcttgttctctgaggtgccacaaagaacacaagggaggtgaagccctgtccatcctagtgcacaccgtatagatgctaaggatggaaccatcgagttcctgtcttcgacgtcggatacgaatcctgtatactcgtggttgatatgagaaaattttattagacctaattgagaacgcaaacagtttcattcatccgtcttgctgtacgggacgcaacatacccgaattgtgaccaggagacattaaggtgccgtctggttcagacgttgtaacaggaatcgtaatgagatcccttaccggcggtaatgtaatggttattggctgatcccttaccggcggtaatgtaatggttattggctgtaattagattggatagtaccagatactacttgaaagagctcagtcaaataaaggtatcggtctaatccgtttgcgttg

SEQ ID NO: 26147 - DNA, 625 bp, Zea Mays
ctcgatgtcaagcctggttccactgttaagtgtgagcctggatatggttttatgctgcacctttcccagatttttacagatatttttaataatgacctcggtggaccctatgcatttcttgaggctagcccgcacggagcgaaccacacgggaaaagctgatgggaagaaacagaaaagtcaagaaaaggcagttcctgcagcttcaaaatcaagtccggcttccaagaagagcaaggatgacgatgattctgatgaggacgagactgatgattctaacgaggacgagacagacgattctgatgagggtgagggtttgtctcctgaagaaggcgatgatgatgattcaagtgatgaagatgataccagtgacgatgaggaggaagacacttcaactcctaagaagcatgaggcaggcaagaagagagctgctgaaagtttcgtgctgaaaactcctctatctgataagaaagcaaaagttgccacgccgtcagctcagaagacaggtgtgccattgaacggactaacaaaactgtcgtcgaagattgtatagttcaagttgcgttttctacatggccatggggaccatctgccgtcattttctttttgtgatttggtgaaaaagg

SEQ ID NO: 26148 - DNA, 5825 bp, Zea Mays
ccggaattcacccctgccttctgttctgctgttcaccccgcgtgcgcgttcttcctctcgtgcgacaactgggcgaccgccgccgtcctacggcaggtggtcacttcttcgtcggttccttcgctggcgacgagcacccaccaagccctggaagaagcaaggattcaccctcaagctcgaaactgaacgcaactcccgaagacccggtgaagccatgtctgcggggagaggcgatccaaacacccctgccaacaggcctctgttcctgagtgctggggtgcccaacttaggctgtcacaatgttgcagctccagctgcagcaggcaacagcggctcgatcgcctcgcaagtcttattctccccatgctccacgtctgtcctgaatactattcaggaggttcctgctccacaatctgctctgttgagtccgataaaccgtgcaactgaacaaggtgatgtgccctgcatccagccatcctggaatatgcctgggggttgcacgcaggtgcctattaatatcatagtgttccatagggaactcactagaaggggttcgaggccgcagttgtcgccgtcggccactgccttacctgatgtttcagagggagcttccattcggcttgctgggagtaatttcttgtcacatggaagaacacctagcatcgttgcaggtgatatgacaacgaattcttcacagctagccactgcagataaatacaattcagagcatcggatgaattgtttacatgatgaagcatccaagactgaaaatggaaaaggaagtacccaacttccacaattagcaacagcaattttccgtgacagctacaatgatttggaatcagtggttcctgcagctacctgggaaacacgagtgcaacattctcaagaatcaaccacctgtcttgcagaaagtaccactgatgacaacattcatatgtaccaatctatgcaaaaaaggctcaagacacaaatcaacaagagtgaacacacaccattgtcagcaccaactgtacccaaggagaaaacactgactcaaattgagacgcagctagcaagtgccgagaaaaccgaaatgttcaggaatgaggaaaccccagcgctgaaaatgaaggctcggaagaaaaaacacagaccaaaggtaatcagagagaataagccagccaaagtgcagaaacctgattcaacaccagatggaaaatctccgaaccaaaaggtcaagagaagttatgtccggaagaaaagaaacctcagctctctggagaattgctctggtcctgttagcgatcaatcaatctctggagcaacaggagttgcagctagaagcagaacatcatcagttcgacgaagtctgcaatttgaatccaaagaacaaggattgcagggcggccattcgtcaatggccaacatacaccatcacaactatgagaaacctggccatgctcaaagttctttctactcagagtcagaagtgcagactgggcgtgtgatgcaagaaggtatggagaattcaccaggagaattagctttcgacatgagtcgcagactgaacaaatttttagatgagtacatacatttgccagatatgctaaaacctacacaagaagtttcggctgcaacttctgcatcatttagtacggaactggcaagggaagaagataatgtgggaagaacttgcaaacctgatggcaaaagtaagtgcagtttgtttgctgatgaaagggtggtaaaccccacaatagaagggaacaaaaaggacttggaattaaactattctgatgctgatggtcttgtttcctcagctaggtctttacctcaaatggatcccacaagaagtcagatgggtaaggtgtcggaagtggaaaaccccacacaccatagcaatggttcgctacctggcacacgggactctgttgtcttgagggctgcagctgagatgttcgcatttttccaagcgggtgcaataaaaaagaagcgatctgcccgactccgcagaaattcccccttttatactatggatcttaagaataatactctacaagcatcaacaagactgccacagccatgcatggatgcgctgcatagaagttcttgcattaagtttttgaccaaaaaacgttcagaaaaggcaagaccgcactgttccagtgtaattcaaccaaatgatgagctgaaggacaggctttcagctggaagcactttttatggcgcaactaatggatgcaaaatatcagaagagagttctccaaacttttcatctcagaccctggacaataaaagaatcaacgttgatactcattgtgaagtagcagaagggagatcaaccaacacatcaacaggaccctatatggattacgttcaaggagttgcatcaaagttgaagcatcttgatttgaatactgaacaggtgcagagaactgagatgcatttatctctgaccacaccagctgttatttcttttgagggaacaagtggtccttcaaatgctcttgtcccatatggtggtgtggtgatggttcccaatgagaggcccttgcagttagtcaaaaagcagcggcctcgtgctaaggttgacttggattttgagacgacgagggtttggaaccttttgatggggaaatcagccgagtcttatgggactgatgttgaaaaggagagatggtggcagcaagaaagagaagtgtttcaaagccgtgctaattcgtttatagcacgcatgcgacttgttcaaggggacaggcgcttttctccttggaaaggatctgtagtcgattctgtagtaggagtgttcctcactcagaatgtagctgatcatctttcaagctctgcctatatggcccttgccgcaagttttccttcacggccagtcaacaataattgtaaggatgatggtaccacagaagacaataaacaaaccaccaggatgagtgagctagtaggagagaaaagtgtgtttgaccttttctacaatggtgttagacctgatctagaagtgggatgtgaggaggtatcaatgacttgcaagaagacacacatggaaccaacagacaatactagggatagtgaatttattgaaggtgaaacctattcctttgattacaaatcaacagatgaaagcgtttgcaatcacaaagggataggtatagaacataaagaacaacaattaccagatttctcctcagcagaattaactgtgtctacagaactcgtgcagcagatacaaatccagaagatctcatcctctcaaattttaacttcagaaaccatacaatcaagattatctttgagttctgagatacctagaaattttgtttgtggtggttctgctgcagcttatcagcagctgggaagcaatttcgaccagggaagctcattaacagaaaatgatgccacagccagtgaaattgaatgtcacagactccaaatggctgcaataaatgattatggatttggtaaacctgagattccttctagttcctcaatgccatttttcttggctgttgatcctcaacaactgaaattgagaaatgagacaaatgtttcttcaacatcttccaacattccttcagattctgcatcaccaaacttgaaaaatggcacggatcctcttttgatgccatttaattcctacatggcagattggagcagcgataagataacttacaccactctgaacactccaaaaataagcacagaacttccagtcaagttacaccatgacaaaagtagtagctttgaagcaccaaacctgaaggagcatgaatcagtctttgcaacacatgaaatgacggtagaagcaacaagaaaagaagacgaacacacatcaaaatctagttttacttcctacaatggagtaccagatacagctgcacaagcatcaaagccaaagaaaacaagaaccacaactgcaaagaacacagagaattttgactgggaaaaattacgaaggcaggcttgtagtgaagggcagatgaaacaaagaagttttgaaagaagagactctatagattgggaagcagtacggtgtgcagatgtacgaagaatatctcatgccattcgggagagggggatgaataatgttttagcagagcgaatccagaattttctgaatcgtttggttagagatcatgggagcattgaccttgagtggctaagatatattcccccagactcagcgaaggattacctactaagtatacggggactggggcttaaaagtgttgaatgtgttcgtcttctcacactgcatcatcttgctttccctgttgacaccaatgttggtcgtatatgtgtaagactgggatgggtgcccattcaacctcttcctgaatctctacagctacatctcttggagctatatcctatcttggaaactatacaaaagtatctttggcctcgcctttgtaaactcgatcagcagacactgtatgagctgcattatcagatgattacatttggaaaggtcttttgtaccaaaagacagccaaattgcaatgcatgctatgaattcgactcacctacctcgccttgaggggagtatccattcaagggagtttcttcctaagaattcagagccaataatcgaggagcctgcaagtccaagagaggaaagacctccagaaaccatggaaaatgatattgaagatttttatgaagatggtgaaatcccaacaataaagcttaacatggaagcttttgcacaaaacttggagaattgcattaaagaaagcaataacgaactccagtctgatgatattgcaaaagcattggttgctattagcactgaagcagcttcgattcctgtaccgaaactaaagaatgtgcttaggcttcgaacagaacactatgtgtatgagcttccagatgcacatccacttttacaacagctaggacttgaccaacgggaacatgatgatcctaccccatacttattggccatatggacaccagatggaataaaggaaataactaagacaccaaaaccatgctgtgaccctcaaatgggaggcgatttatgcaataatgaaatgtgccacaattgtactgcagagaaagaaaaccaatctagatatgtcagaggcacaattctggttccttgtcgaacagctatgaggggtagtttcccacttaatggcacttactttcaagtcaatgaggtatttgctgaccacagatctagccacaacccaatccatgtggaaagggagatgctatggaacttgcaaaggcgcatggtctttttcgggacttcagtacccaccatattcaaaggtctaagaacagaagaaatacaacaatgcttctggaggggatttgtctgtgtgcgaggattcgacatggagactagagcaccaaggcctctgtgcccccatttgcacattatagcaaggccgaaggcccgcaagacagcagcaactgagcaagtactctaatcagcaaagatatcagttttatgaacatcatgtttattgtgatatgacatcaatagctctcgacctatgcatggaatcatattacttcctgcctggcgatggccattgtttaggaaatttaagccatggatggggtccgagactgttagttctgagacgagaggactaatgaagcatcaggaagcaccaataattttcacttttttgtttcagatctactgtatgtaaattagcatctagctgttagtccatgtaagatgccattgctatcctttctgagacaaactaccttatcaacatttcatttggttaacatttgttctgagtattgggaagcctgccagaattttgttttcgtacctgtatattcctgttatctgtacaacggtttag

SEQ ID NO: 26149 - DNA, 1593 bp, Zea Mays
tttcttggacccgagtcgagtagtccggtacatcccaccgcctcgcaccgcggccatgttgacaccgcgcgtcctcaaggcttcgctgctccgctgcttgcgcgctaccgccgagctgcctccgttgcggcgaccccggatcctacctgtgcgggtttaccattccagaggctattctagtgggggaagctccaagtatgataggccaatgagacagttttccgaacagaatgagtcaacctctcagccattaatatattacattgctccatctgctctgcttgcttttgctgggatagccacatttgttcattacaatgatgagaggcgtgcagttcccttcgctaaagtaccaggacagaccaatgttcccaaaagatgtactaccaatagacctgcaataggagggccatttaagctgtatgatacagaaaacagtgaggtgactgaatcaaagcttcggggaaagtggaatctgatgtactttggctatacatcatgcccagatgtgggtccagctgaagttcagaagatagctgatgttgttaaactgttagagtcaaagtacgatatcaatattacaccactctttgtcacaattgatccacaacgtgattcacctgctcagcttaaggcataccttactgagtttgacccaagaatagtaggactaacaggtcccatcagtgcagtaagacagatagctcaggagtaccgtgttttctttaaaagagtagaggaagttggtcaggactatcttatagaaagctctcacaatatgtacttgctagatccatgcttggagacagtaaggtgctttggaagtgagtacgaggcatcagaccttgctgaggctataacaacagaggttcagaaagcatctgcctcatcaacaaattagtctagcggtatggcagcatcagcagttttccaatcttgccgtgaagcacctcctcgcctgttgcatagccctcacagaagggcgtgactcacagtgggctggccattcagctctgcctgcaaccaaccgattcaagttctcctattctcgctcttgttgtgtcagatctgagcttaactgtacagaatggtcttcttgcgacgaagtctcctggcagttccagatcacttacaattctgcgagatgagaatgatcttacaatttccagcaaacattaacctgctgcattggatgaggcatatgacctacagacttaccaggttgttagcacagattcatgaacctgctttgctctctcctctggatgctgaacagccatttcattatactcggtgcttctttggccaagttagcgggctgctgcgcgggcggctagcccgggacctgtgtttctggcactgggctctatcgtgaaaattgttgctggaccctggaggctgtaaggagtgctgcacaattccagttctatagaatattaattgtgttttttttggggggtgggctaacaatatcgtctgtactcgataaaagaatattttatgatctctaagaattaataaatgtctgctaacaaaatttaatccaaattattatatggggtttgttgtaagaaacacaatggtacggtgtaa

SEQ ID NO: 26150 - DNA, 4337 bp, Zea Mays
caaacacaaaaataatgtgaaccatacatactccttcgagcacgttcccattgcgctttccctcgccatttcgcccccgccccccaatctctgcgtctctagctctcgggagaggcggctcgccgcgacatcgatcccgaccgggcaccggctcaccccggcccccagcgtagcagctcgccactagggctagcgctctgtccatggaggatgacgagtacgaggatgggatggacatgggctacggcgggcatcaccagcgcggcggcggccacgcggggtacggcgcggaggaggacgacgagatggggtatggcgaggggggtggggacggggacgagatggaggaggaggcggatggggacgccgagcagcaggaagatatcacgcaggacgacgcctgggccgtcatctccgcctacttcgaggagaagggcctcgtgcgccagcagctcgactccttcgatgagttcatccagaacaccatgcaagagattgtcgatgagtccgccgacatcgagatccggcccgagtcgcagcacaaccccggccgtcaggccgagtttgccgagactctgcacaagatcagctttggtcaaatctatctcagcaagccaatgatgactgaagccgatggagagacagctactttatttccaaaatcagcaaggctcaggaacctgacatactctgctccactgtatgttgatgtgtcatacagagtaatgaagaaaggacatgactgtgaggaagttacagagactgctgagtatccaaaagtgtttattgggaaggttccaatcatgttgcgttctagttactgcacactgtatcaacagtctgagaaggatctcactgaacttggggagtgtccttatgatcaaggtggttatttcattatcaatggaagcgaaaaggtccttattgcccaggagaagatgagcaccaaccatgtctatgtttttaagaagaggcagcctaacaaattcgcatatgtggctgaagtccgctccatggctgagaaccagaacagaccagccagcagcatgtttgtacggatgctttcacgagcaggagcaaaagggggatcatctggtcaatatatccgtgctactctgccttatattcgagcggacattcccattattattgtatttcgagcattaggatttgttgccgacaaggatatactggagcatatatgttatgacttttctgatacacaaatgatggaattgctacgtccatccctggaggaagcttttgtcattcaaaatcaacaggttgctctggactacattggaaagcgtggcgcaacagttggtgtcactcgagaaaagagaattaaatacgcaaaggaaatacttcagaaggaaatgttgcctcatgttggtgttggggaattctgtgaaactaagaaggcatactattttgggtatattattcaccgcctactgatgtgcgctcttagtcgaagagctgaggatgaccgagatcattatggaaacaaacgactagatcttgctggtccactgcttggagggctgtttagaatgcttttcaggaagttaacaagggacgtgagatcttatgtgcaaaagtgtgtagataatggaaaggaagttaatttgcaatttgctataaaagcaaaaactattaccagtggtttgaagtactcccttgctactggaaactggggacaggctaaccaagctggaaccagagcaggggtttctcaggtgctcaatcgcctgacctatgcttctacactttcacatctccggaggcttaactctcccattgggcgtgaaggaaaattggcaaaaccccgccagttgcataattcgcattggggaatgatgtgtcctgctgaaacaccagaaggacaagcttgtggcttggtgaaaaatcttgccttgatggtatatatcactgttggttctgccgcaaatccaattttggaatttttggaggagtggggcacagaaaattttgaggagatatcaccagccgtcattccacaagctgctaaaatttttgtcaatggttgttgggttggaattcataggaaccctgacctgttggttaagactcttagacgtttaagaagacagattgatgtcaacactgaagttggtgtggtgcgtgatatccgtcttaaagaacttcgactctacacggattatggacgctgcagtcgtccattgtttattgttgagggccagaggctgctcatcaagaaggcgcatatccgagccttgcaacaaagggagactcctgatgaaggctggcatgaattggtctcaaaaggatatatagaatacatagacactgaagaagaggagactaccatgatctccatgaccataaatgaccttcaaaatgcaaggcacaacccagaggaggcttactctgaaacttacacgcattgtgagattcatccttcattgatacttggtgtttgtgcgtcgattataccttttcctgatcacaaccagtcacctcgtaatacatatcagtctgctatgggaaagcaagccatgggaatttatgtcaccaactaccaattaaggatggacacgttggcctacgttctatactacccacaaaagcctctagttactactcgtgctatggaacatttgcacttcagacagttaccagctggcattaatgcaattgttgctattgcttgttattctggatataatcaagaagattcagttattatgaatcaatcttccatagatcgtgggttctttcggtcactatttttccgctcttacagagacgaggaaaagaagatgggcacacttatcaaagaggaatttggtcgtccaaatagggaaaatactatgggaatgcgccatgggtcatatgataaactagatgatgatggccttgcaccacctggaacaagggtctcaggggaagatgtcattattgggaagacatctcctattccacaagatgacgctcaagggcaagcttctagatactcaaagcgtgaccatagtactgctctgcgtcacagtgaaagtggcatggtagatcaggttctgttaacaacaaatgcggatggtctaagatttgtcaaggttaggatgcgatctgttcgcataccacaaattggcgacaagtttagcagcaggcatggacaaaaaggaactgttgggatgacttacactcaagaggatatgccatggacaatcgaaggcattacacctgatattattgtgaatccacatgctattccatcccgtatgactattgggcagctgattgagtgtattatgggtaaagttgctgctcagatggggaaggaaggcgatgccactccattcacggatgtgactgtggataacatcagcaaagctcttcataaatgtaattatcaaatgcgtggatttgagacaatgtacaatggtcacactggaagaaaactgactgcgatgattttcctgggccccacatattaccaaagactcaagcacatggtggatgacaagatacattcgagaggacgtggtcctgtgcagatactcacccggcaaccagcagaggggcggtctcgtgatggaggtctccgctttggagaaatggaaagggattgtatgatcgcacatggagcagctttcttcctgaaggaaaggctgtttgaccagagtgacgcatacagagtccatgtatgcgagaaatgtggtctcatcgcaattgctaacctaaagaaaaactcgttcgaatgcaggggctgcaagaacaagactgacattgtccaagtacacataccctatgcttgtaagcttctgtttcaggagcttatggcaatggccattgctcccagaatgcttacccatgatatgaagacagggaaggatcagaagaagcgctgaacgtgtatcacgtgagatgtaaccagaactcatgccccgttgctatattcctggatcctggttcacacaatagtaccctgttgaggaactttgtggtcacttcttttctgatttggacttcggttcttcgcgatcgatggagggctgttactatctcttgatggattattatcctatctgtgctcgtgttgcctgaagatcagtgctagcagatcgtcgagttaattttgtacattaggaatgtgttgtaatgtattaatctgtgcgagtagaaagatttttgactaaaggtgtcaatttggaggtgtaactgtacgttaatactaaacgcgatgccattgcaatttcagttttattttgaaatacatggggttttagtggcatgtctctaaactatcacaatcttaatggcatggttctaattaatctttttcttcttataca

SEQ ID NO: 26151 - DNA, 823 bp, Zea Mays
gaggacatgagccagctacttactcggcttcgcggcagtacagatccggccgacacttcgtcgtcaagctctcgccatttgcaactccttgctccgccgacctcgacgcaaactacaacttctcgcttgcgcctgtccaggatctgctctcgccatggacagggaagccaagaaagaagcgttcaggaagtatcttgaatccagtggcgtgctcgataccctcacgaaagctcttgtggcgctgtacgaggagaacgataagccttcatctgcagtcgacagaagctgggtggcccgtcaatctctgactatgaaaagctcaaggcagagaagctggacttgcaattgaagtatgataagcttttagagacccacaaggaaacatgcagacagctggaggaacttaagaatatgaagtacggtgcaccctggaactgaaataacgtgtgttgacattgtaaatgtatcatgaagcatgtactttttacacctctctgaagcattgctaagctctttatacaatggaaacatctctcatgtatctgattttagccatctggatcccttttggattatgaagacacccaactcactgtaggtcccaggtatcagatatcaccaatgcaggataaaggatgtgacaactatcatagttgaaccatgagcaattgtttaaccagtaatacagtatcgacaaagagtgtggtctattgacttgagacttctcttggcatggcttgtaagcagattttagtagatttcagtggaagagatatggcgtgcaacgatacgtgtcaagatcgttgggaaatttcgaataaaa

SEQ ID NO: 26152 - DNA, 1415 bp, Zea Mays
gaaagggctacatttcaatctctcagacactagacacaacctatctactccaagatccacggcggcgtgctggcctactctaagatccgccggcgcgtcgtggcggctcctccgcgtcccgcctccgaggccgcgggcggcgtcaggctgatctgggtggcgcgcggcgccggggagcgccccatcgtattcgtgcctctcaagcctaggccatggagggggtatcatcagctccagaaatggacgaggctatctcaactgaccaatcaagcagatcaacaaaaagaagggctaaagtgtgggatcatgttgattcagagctaatagatgggaaagagaaggcggtttgcaaatacttgtaaacaatagagcaatgaaagatatgcgagatgctttgggcagccagatgtttttcagtggtgaacacctccatgtgaggtgttcttctcatgtgctcaacatcatggttcaagctggactaaaggtcgttccaaatgcagtcgggaaggtgagggacattatcaaggtcgtaatatctacaccatctcgtttacagatcttcaattctattgttcaaacgttgggtcttagaagtaaatcggggctgattcttgatgttccacatcgttggaatgcaacctatgatatgctaaatgaagccctaaaatataaggctgctctgaacagatatgcagtagagcaacaccatgaatgtcccactgaagaagattggtcgaaggcagaagctcttcatggttttctacaagagtttagtgatgcaaccaaagcattctcagcggataggcatcccacagctcatctttttctcaagatgttgctcgttatccgaggtgtgctgcttgatgagaattataactcaaatgaactccttaatgagatggcaaatgttatgtataccaagttccaaaaatattggataaatcctaatattgtgttgctcatagctgctgttctagatccatcaatgaaaactgaatttgtcaagttctatttctacacagttggtgacaatgttgatatgaagatgagggagctcaaaaggtacttgaagaaatattacctagagtacgagaaaatcatgaggagtcatagtttgcatgtctttattactcccgatgatcagatgagaagtgagccttctacctcttcacctctttgtggtaaaagaagggtggaacatgcatttgctcaatttgcatctcaaaatgcgaatgcccgtccagagcgaacagaaatggatacatacttggaggaccctaggatccttatcaagccagatgaatgcttcaatgttttaggatggtggaagaaaaattcagatgcttatccaatattgtctttaatggctagggatttcatggctattcctgtgagtacggtgtcctcagaatctg

SEQ ID NO: 26153 - DNA, 7743 bp, Zea Mays
ctgtccatctctacttctctagtagtagtactttgccattgcgaacgggttaccgaaatttcttcattgcaagcgtctactttctctctctctctctctctctctcgttgcccccgcatactctctgtcttgggcgctctctgtctctggtggcggcgagtagcatactctctgtcttgggcgctctgtctctggtggcgacgactcgccgccgccgccgccgcgataggccacgcctcctggtcgccatttccggatccttaccgacgacgcgcacccaccaccccatctttttccgttcctgctgtgcgacacacaaaccctagctgtatcgggtgggctgtgaaatggaccaagctgcagattcctctgaactgcttcgtcgcatcgaggagctccagcgcgaaaaggatgaaaaacagaattctttggaactattgttaagacggattgaagggctacaatatgaaatggatgaaaaagtagatcttgttgaagtgttaactcgtcaagttgaaaatctgcagcgagagcgtgatgagctcagaaaagatattgagcaattatgtatgcaacaagctgggcctggttatgtttctgttgcaactcgaatgcttactcagagctttggaacaggatattgagaacctccagaaaaagttaggtggttgcttaagagagaatcaaaatttgcaagaggagcttgctgaagcttatcgaattaagagccagcttgctgagttacatggtgctgcactatcaaagaacaaggatcttgaaaagcaagtaagatttttccagagcagtgtcgctcaagcgtttgctgaacgggacagttcattaatggagtgtgagaaagcaaaagagcgggaagaagcagtgtcaagaaagtttgctgattttgaggaaaggatgagagaatatcaatcagagattgatgaacagaaacacttaaatgatgacttgcagagagaactgacagaactgaaggcacatacagaattgtccttgaaagttattctaaaattctatgaccttcgttgcagagactctggatgttcttcaagccttactattgaagagaagtgttcaatccttcttggtgattctgctgacaattggagttttagctctgatggcggaacctcaactttgaagtacattgtaaaccacccttatccattataaagaatgattcatatttaagtatgcgatctgtttttttttttgcatttgtattgcaagatacaaattctctgtggcactaaacatcatctggcgcagagccagaaaattatagatatggggacgaaatgctaaaaaataaattattagaaggcaaaatcagcattttcattgaattttatgtgcataagaggaacttatctatcataacagagtgcttgatcctccctccttccgcccctgaacatgttaatgcattgttggctaattggcttgttcagttttattctgggaactaaatgaatgcagaaggtaggaaatgatgaaactttgctggcatctgtttcaggacttatgcagttatgctttgttcccagtttctcattcaacatactgctcaatacatggatagaaaacatccgtattattgatggaagtcataaatttagtgctaatcttctcatttgtcctattcagtaagttatagttcagtatgattgtcatgttctatttgacctaattgtgtcatgtacttgagtaatacaacatgacttgcaggccctaatttgttttcaagaactgtttattgattttttttccagttgatttggtcctaaaccaaagtgctttgcatagttaaggcgagtgtttgacccccgccttaccttcgaagcggtaaagtgtaaggcgagacaacaccttaatcatatataaatataggaaaatatagaaaattagtcttgaatagaagtacgaaagtaccaaacagaagtctataagttcaatataagcaaacataataggctaaaagtccaacataagtaggttctgatactctcatctctcaagttctgatacatcatcaaactcatcaaaaatgggaggattactgtcttcttcgcgttctctcccaccggatatatcatcatcttcactcacattcaagtcatctttcgcatgattggttgccgcgtcctacccgcccagactcgcggcatgcgttggccgggcgcgagcgagtgtttggttgccgcacccacgccctccggactgcatgtgcgcatgcagtttagtgctttttttcgccgttctgcctgcaagcgtggagaagccggaaattaccttcgctgggggaccaggcccgcacgaggcaggcacgtgacagaccggcaaccaatcagcccccttgtggatctggctcaaagtcttcgtccatggcacctccctcttcttcttacggcctcattcttgcatgctttctctatgtaaggccagaactttgtctctgactagcttgccttggaaggttgtgccctcgaagcgactccgatgctctagtagcaacatcaacatgatccatcatgtgaggtcaacaatattatcattgtccctgctggggtgtaccactgatgagtatccactcgttgtcccaatcaaaatcctcaataattaatgggtcatagcttgtgccggctttctccctcatttgaaacctacttcgcatcttttgattgtatgaaacatagaccaagtcattcaaccttttatgcaacaacaagtttctcttctttgtatgtatagtaagtaacaaacccaacctaaataagtagcaagaaatagattgaagctagtaaacataagcgaagtagcaaaaaatggacttacaaattcaaatgtgcttcaattcctctcacaaccggatgaggaagcacaaagtctaaccagtaaccacacgcttggcaaacctttgaaattcatatgctcggccgccatatgaacgttatcaatcaactacgcagatgcaaacagcgacacggtcacacacataggtatacaacagcaggaaagaataaaaaaagatgtgctgaaattagcaatcagccaagcatatagtactttagagggctctttgcttgaatgttttcaagtgccaacttgtttgaaaaatagaccctctatgatcttcataatgcatggcatgctcattaatcttcgaccgtatttcttcattggactccattcttgctagcacataattgaaacaactcctcagctttacaacatatctatcatctccctttggatggcaaagaattttcccaggttcaaataaagtgcagcaccatacgatggatggtccatttgtttcatccaacgaccctcaataatgtccataattttttcagcaatgcttgcttgttttgtgtagggaagctaagccttttctcttttgcaacatccattagtgctgcaatttatgtcatgtatgttttttcatctccatcaactgccctaagcactataagaagtgccaaagctctgaggcaatcttcaactgaagaccaaaaagtcttagctagaataatattacaccccccttccagcctctgtctttgccaacttgttgcagttccatgcatctcacaaaaagtgctctcaaggcatcttgatgtttatgtagacttttcaaagtaaggaatgtggcaaaacgagtggctgctggtcttaaaggatccccctcctatcttctccctcattgcacttagaattcctccatgcctataaataaaagtggtgactcttttggcttgtgcaattagtctttcaaatatccaatatcctccaccatgaggtccaaacaatgtgcagtacaaggaccctagaacaatgttaaaatactatccattagaagcctacccactgccttatatttttttctcgaatacgcaggagagctgcgtatcaattcattaatagtagaggagaaatatatatacaagaaaaaggcccacacacttgcacacacccactaggaacagaactgcaagaacatttgcgcctgttacagcacagaaacgaccctacacaacaactaaaatcggtatgccgtagcctccagaagctgcagatccttggcccctgctgcactccaacacaaaatctcatcaccagccaagcacaaggcagcagccaatcgtggaggtttgcgaccaaagacattcatttctgtgtctccacaaggtccatgcccctaagattatgagagagttaaaacctttctgaatggagcttcgcatagagctggaagaactgctccaccaatccaaaaaggaggtcgcctcaggctgaggggcaagaagtgccaaacccattcggctaagaaaaaagaaccagaactgacacgaaaagagacaggagacaagaaggcgatatagcgtttcacgttcttggtcacacaacacacaagcttcagggtgtggcagattcgtcctttcaagtcgatcagatgtccaacacctattgtgggcagccaaccacatgaagaaggcacatttaggcggcacccacaatttccagatacgctcccatggttcaaagaacaacgagctctgcatgagagcatcatatgccgatcttgctgaatatgccctgacggagagaggctccaaaaatgtctatccggcatttccagcacccctggctgaagctgcaccacgtgtatagcctctcaaataccaagaaactcttgctaactctgccaagaaataactccatggatatcgtggacccatcttgaatctgttagagcatctaggaccatccttcgattagctattctggtgggaatcatactatgtataagtggtgctagttcctttaaccgctgcctcatcaaccatctatcctcccaaaacaaggtggtgctaccatcgcctagttcagtagtcacggccatgttgaaaattccttgcacctgtttatttgcttgtagcttgaaggcagcccatggtctctgtcagcctttggctttgtggaagcagcctccttagtggtttggtatgaacctgaagaccgcctatcatccacaacctattcagggattctctggagcatgcttgcgaccttcccaaccacttttggcatgttttgggcttagttgtagctggttgcctaaactgaaaggcggctctcctccgtttagcagctgtcccggaacttggctgcacaacggagcaatcagattcattctgtcctagcctctgcccctgcacctgcccatgtactggaccaatgttataaggaaaataggcctgttcctcttcttctccaagtaagctgtcatctcttttctaatctcagtggtggtgttgaaacacatgactgtcctcatatcccccggcaaggtgttctttataccttttaattccttctttgttaccatgttgcatcggatgcatgtcaccttatcctgattccctatttctgtccaataaccgtacttccagcctgggtcattgaattttgcctctggatcttgcatggggtgataaggatcaacatcaatgggagcagcagcagcggatgcggatcagacactctccatgacaatggcttactctgtacaggtggatagtaagaaaaaggcaaaggttcagctcactaattaacatcagagagtggggaacagagcagcacggaggcccattatcttgcaccggatttaaagcagagggctgctgctaggatgctggcctgcccgccctgtctggctgcgccagcgccacccctcctgcgtggccacaccccactcctccctgtctgcgcctgcatgccttgcttggcccgtgccgcccacctcgctgtgccgcccgtcctgcctggtcacgccactcctcacccctccttcgaacagaacaggcgcaccgcgcaactcagcctttgaacagagcagcctccgcccacaaccagccgccttttcattcccttattcccataatgcgacaccctagaaccgctttacggacgtctgaggtgccagagcgactagacggtaaggaagatgccttagtgtcaatcttaaggcgggtaaatcacctcattttttctgaccgccttaccgcctaagggacgccttaatagtttgcattagagattttcccttcaatgtatttgacattttttgtaggcatctttagaagaggagaaagagtcacttaaagctaaaatatcgaagctgcaaagcaacctaagaatgggccttgaaattgaacaacatttgcaaagaaatgcacgaatattagagaaaagacaggcactgtatgatggattcctgagaaatggattgtccgaacttcaaaagttctacacatgtcaaaaggctgaaattatgaaaatattggaagaagaatcgttgcggttgatgaaagttgttgcagagattcaggataaactaactgaaatttgtatcaacactgaagttagtgaccaccctgccgatgagattcaatgttgtgacagcagttgtaaagatgtgcatgttactaaagatatcagtcctagcacatgtcgtaagagtgattatcctgctgatcttaactccgtgtcgtttgatgaatctaaagcacttgcacaagccttacaggagaagatggaagcacttatgctcttctcacaggaacaagaaagatacctattagagaaacagagagacctgattgttatcgaggaactccagaagaacttatctcaagttaaagatgaaaaggtgaaggtcctgatggaattaacaaaactaaaagaacaatatttgctattgaagggctctgctgtcaaggaaggtcatgatactggtgattcatctaaactcattcctgggcatgaccaacaagggatgctgaagactatgctgaagaggacatctttaagacactggatgaggaaagaaagtaatactattggacatgggagctctgatggaaatgatcatacagtttgcaaagaacattcagtggatgttgcaagattaagagttgaaaatgctatgcttcttgaaggtgttggtactgttgagcatctcacttcttcagtgcatagactgcatattgtgcttttgaaggcttatgatgatatcaagtcagctgatcctttggagagtacctttgaagcgctcaacagtcttataactgaagcaaaccttatgaagacagctcttaatgtggttcttcctgtaagctggtccggggattcatcagatgcaattaaatatgaagctatgtgcgatccatctgattcacctaaatcgaagtctgggaaagtagacccgctctcttctgcaggcatggagatggtggagctactaatattggctgctgagattctcaaggagagctttctggtgaagaaataaggcctccatgtaaggacgagtatggctctccttgtttgtttagaagcatgcaatttaatccttaatttttttgggtgtatatacttaaactgattgctaaaagtgcactactagattatttcggatgtagagaaagagccgaatgtgcactgtaatttacggttcgctgctattgatgtgtcttgtgttggtagactaaaggatttaagagccatgtgtacaaaattcagtttacaagcaaagatcaaagaatagacatgaactagggaaagagaaagaaaaacaaactgaaagttccatacctaaaagcgtcggcactggttgtcgcctaaaggaaggtgaatagacggaatctaaaaattataaactta

SEQ ID NO: 26154 - DNA, 974 bp, Zea Mays
gtttatttcacagatttcaccacatggattgttcctgttgttttcctgcagcaaaggtggaggcggtgaatggacatactcttttgctttctggagtagatttggttgatggcacgccagtccttgatattaaaccatacctgccatattctgacagtgttaaaggtgcagctgttcccagttggttagaggttgacggtgcgttagcggtggagtcagtccatttttccgaacacttcatttctgcgctctccacctgctggatgcatgtacagatgtcgctgtatgcttcagcagacgagttccaggatctgatcaagcaggccctttcctgggacatcaggtcgatatcacagcggaaccgtccccatcaagtgagcgtggaagctgatgccaacggccactgtggcgaagacactgatgatgaccaccaccacagggacacaggtcgctacggtgtggtttaccacttacatcttgaaggcatcgatgtgtcgtataggatcgatcagggctccaacattttcgtcgaggacgccacccttcttccagacgccgtccagaaacggcatggttatttggcgtggagggacaaacttggcagcagcgttttgtagcatggccatggcgcagcgttttgttatcgttttcaggagtgctgcagtgtggtgtaggatgtcagtagtgatgccaatgaatttgaatgtggtggcgtctagtatctgaattggatttggaacgtataccccctgttttgcgttgagtctctgatttcttgatgttacacacaagcagaggatctggcagatcataagtacattgaaaaaaagatgagaaaaaggtgacatccgttgagagaactacgttaccatggatcactagatccgctcccttccctcctgtcaccagtagaggcgcaagaagttgtagaggacctgtctacattcccataagcacgacagaggaaacacacg

SEQ ID NO: 26155 - DNA, 2470 bp, Zea Mays
aaaaaatccacgaaccaatttctcagcaaccagcagcacgacctgtgagggttcgaaggaagtagcagtgttttttgttcctagagggaggaagagatggcaaagggggaggggccggcgatcgggatcgacctgggaacgacgtactcgtgtgtcggcgtgtggcagcacgaccgcgtcgagatcatcgccaacgaccaggggaaccgcaccacgccgtcctacgtcgccttcaccgacaccgagcggctcatcggcgatgccgccaagaaccaggtcgccatgaaccccaccaacaccgtatttgacgcaaagcggttgattggtaggaggttctcggacccttccgttcagagtgatatgaagctatggccattcaaggtcgtggcgggccctggcgacaagccgatgatcgtggttagctacaagggtgaggataagcagttctctgccgaggagatctcctctatggtgctgaccaagatgaaggagatcgctgaggcctacctcggctccaccatcaagaatgccgtggtcaccgtgcctgcctatttcaacgactcgcagaggcaggccaccaaggatgccggcgtcatctccgggctcaacgtgatgcgtatcatcaacgagcccaccgccgcggccattgcctacgggctcgacaaaaaggccaccagcagcggcgagaagaacgtgctcatcttcgacctcggtggtggcaccttcgatgtgtcgctcttgaccatcgaggagggcatcttcgaggtgaaggccaccgccggtgatacccatctgggtggggaggacttcgacaaccgcatggtcaaccacttcgtccaggagttcaagcgcaagcacaagaaggacatcagcggcaacccgcgcgcgctgcggcgtctgcggacggcctgcgagcgggccaagcgcacgctgtcgtccaccgcgcagaccaccatcgagatcgactcgctgtacgagggcatcgacttctacaccaccatcacccgcgcccggttcgaggagctgaacatggacctcttccgcaagtgcatggagcccgtggagaaatgcctccgcgatgccaagatggacaagagcaccgtgcacgacgtggtgctcgtgggcggctccacgcgcatccccaaggtgcagcagctgctccaggacttcttcaacggcaaggagctctgcaagagcatcaaccctgacgaggccgtggcgtacggtgctgctgtccaggccgccatcctgagcggcgagggcaacgagaaggtgcaggacctgctccttctggacgtcaccccgctgtccctgggcctggagactgccggcggcgtgatgaccgtgctgatccctcgcaacaccaccataccaacgaagaaggagcaggtgttctccacctactccgacaaccagccgggggtgctgatccaggtgtacgagggagagcgcgccaggaccaaggacaacaacctccttggcaagttcgagctgtccggcatcccgccggcgcctcgcggcgtgccccagatcaccgtgtgcttcgacatcgacgccaacggcattctgaacgtatcagcggaggacaagactacaggacagaaaaacaagatcaccatcaccaacgacaaggggcggctgagcaaggaggagatcgagaagatggtgaaggaggcggagaagtacaaggcggaggacgaggagcataagaagaaggtggacgccaagaactcgctggagaactacgcgtacaacatgcgcaacaccatcaaggacgacaagatcgcctccaagctaggtgcggatgacaagaagcgcatcgagaacgccgtggacggtgccatcagctggctggacagcaaccagctcgcggaggtggacgagttcgaggacaagatgaaggagctggagggcatctgcaaccccatcatcgccaagatgtaccagggcgctggcgcggacatgggtgctgctgccggcatggacgaggacgcaccggccgccggcggcagcgccgctggccccaagatcgaggaggtcgactaagtgcttccacctgtggtcgtgttatcgtggtagaagttgaattgcttctgtttctgtgggaacagtaaactctgaggttgtggttgatctgatgatacttttctaattggttccccttccttccctgagattttatagttgtttgctcgtttgcatgtttttttgtcccttaagaagtgtttattaagctgcagggcctccagctagaggcgcacgaaggatcgttcttttttgcaatttgcttgtcaccatgatcgcgcgggagtaatatgctgtaggcagtccacactgcagagagcatcgcactcggtgctgaggatcaatgttggtgagtaaagctgccctgatggagatagtctggggagccatttttcattaatagcgccataacaagttgcgagaatttgacaggatatgatttttc

SEQ ID NO: 26156 - DNA, 3411 bp, Zea Mays
aaaaatatcccacccaaacaactccaccctaccgcaccccaaattcgcaatccctctccacctctcctcccaccgcagcagcaggcaagcgcgaggcggaggcggagagatggagtcggaccagggcaagctcttcatcggcggcatctcctgggaaacaacggaggagaagctgagcgagcacttctccgcctacggagaggttacgcaggccgccgtcatgcgcgacaagacgacgggccgcccccgaggcttcgggtttgtcgtcttcgccgaccccgccgtcgtcgaccgagcgctgcaggacccccacaccctcgacggccgcacggtcgatgtgaagcgggcactctcgcgggaggagcagcaggcctccaaggccgcaaaccctagcggtgggaggaacactggcggaggaaatggcggcggcgatgcaaatggtgctcggacgaagaaaatattcgtgggcgggctgccctctactctgactgaggatgggtttcggcagtatttccagaccttcggcatcgtcactgatgttgttgtcatgtatgaccagaacacgcagcgcccccgtggcttcggattcatcacctttgactcggaggacgcggttgaccacgtgctgcagaagaccttccatgatcttggtgggaagctggttgaggtgaagcgtgcattgccccgtgaggcgaaccctggtggctctggtagtgggcgttctggggtgagtgggggttaccagagcaacaatggccataacaccagctctggtagctatgatggtagaagtgatggtggcaggtacgggcaggcacagcagggtagtggtgtctatcctggctatggtgctggggcagctggatatggatatggtgctaaccctgcaattggatatggaaattatggggctggaggatatggaggtgctcctgctgcttatggtggacattatggaaacccaggtgcagctggttctggttaccaaggtggacccccaggctcaaatagaggaccttggggcagtcaagctccatctgcatatggaactggagggtatggtggcagtgctggctatagtgcttggaacaactcttctggtggtggcaatgctcccactagtcaagcccctggcggacctgcgggctatggaagccagggttttgggtatggtggatatggaggtgatccatcgtatggtagtcatgggggatatggagcttatggagcgcgaagtgatggtgctggcaatcctgctactggtggagcatctggatatggtgcagggtatggaagtgggggtgccaactctggctattcaagtgcttggagtgatccttcacaaggtggtggatttggtggttcagtcaatggaggttctgaagggcaatcaaactatggcactggctatggcagtgtgcagcccagggttgctcagtaaagaaggcattttgagtgtctgaaatgaaccagcacatctgggcagtctatgtattgatttgtcattccagttctgatttgttctcagcattctgaagattgcccatttgctggttaaatcagtatttctccgggttggaatgcttgatcctttagtggcttactactagaacttgtagtcaataagtagctataatgtggagtagcagtatcttgcagaatgcttttattaatttctacatttagctttatctatctgtgtgctttgccatgagtggagtttcaggttccttcatctctagttataagctagagtagcttgactgcttatggacaaaattatctagttgtacctctattctacagatcatacattcgtgtttgatggtagtatttatgctggatattgtacctctattctggaatgttctatatttggtggttgtattgacatatggtattatcaacattcatggtttgaaacagatgcaacccctgaaatatgcagtcatagttggcttgatgctgtagctgcttctaacattatgttcaaactgtagtgcaagtgtttatatagctggaatgctacatccttcaagttgaatgggatgacattccttttcagagatgatacccaagcaaggttatgaaatcaggcatctgaaaaaaaatgtggcagtgattttacatgacgagctggtaaaaagttgcaatattggggtgcagacagaatgcaagataccagcttgagcgtttcattgtctgaagggtcttgtgctgtgctacaagatagtgtggcctctggcgttggaagcgaaggggaccggggcatcttgtggctggtgtgtatcatcttcctaccatcctaggacatctaattagtttgattagtttcttccccgttctagtggactcggttgctgcttttggctttcaccgaatcctctccaaaggtggcgctggtgctactgttccttatggtgatgattttacttctgaccatgattgttacagcggtaaggcggtcttaggatcttttaacctttaagcatggagacgactttatatacatgtaagtaaggtgaataataacaaaaaaaaaatgcatagctaagtagatagaccatatatatatcatagaacatacaagccttaatgaatagcataatttataaaatagtataattgatagttcataaaactaacaaacagtagttcataaaactaacaagtccaaaatatatagttcataattttgtaaactaacaagtccataaaagaacacaaggcaacattaaatttagattctcaacacttagggcctgtttggtttgtggctaaatgtgtcatactttgtctaatgttagttgttcgaattgaataactaatcttaggcagaaaagttaggcaaaatgtggtaactgaggtagtgaaccaaacatgtctttagatagatctgggccgcctctcttggacagctgcccctctagggctgctgccagcctaccacccatgtgccgcgtcgccgcaacaaagtgcacatatcttctccctcctcttttatgcatccatgacagggacctcacgcgctcgtgtcaaagaggaggccatggccttccgcaagaagatggcatgcttgttacggctcaaggtgcagacaaggaggctgtcaacgcacacactcgcgcccaagtaggatggcaacgcgcaatcccccgtcggggaatacctccccgtccccgcgacgattttttttccgtagggattcccacgaatacttgtggggaacatttcttctctatccctgtttttcgcgggataaatctccaaaagtgatccctatctctgtttaaattataattaaaatatgcgttatttattattaatattaaacattatcacttatacacattatcagatgtaagaaatcattatgcacacatcaaaataaatatatttgtacaattagtg

SEQ ID NO: 26157 - DNA, 2370 bp, Zea Mays
tttggcttctgggagagacccacgacgctccattcccccacgaaatgagactccgcgcgcaaaagccccgtttctcgccgcgcgcgagaaaaccctaccttttcccgccacccgcgcgcatttagtcgagcacatagtccgcaccccacatcaccaccgccaccatcagaacctctacgcaccgggtatcgaacgcatctacgatggagggcgacgacttcacgccggagggcggcaagctccccgagttcaagctagatgcgagacaagcgcagggtttcatctccttcttcaagaagctgccgcaggatccccgggccgttcgtctcttcgatcgcagggattattacactgcccatggcgagaatgctacgtttatcgcaaggacatactaccacacaatgtctgccttacgtcaactaggtagcagctctgatggaatcttaagtgccagcgtgagcaaggctatgtttgagaccattgcccgcaacattttgttggaaaggactgactgtacattggaactctatgagggaagtgggtcaaattggaggttaacaaagtccggaacacctggaaatattggtagttttgaagacattctgtttgcaaacaatgacatggaagattcaccagtgattgttgctttgtttccagcgtgccgggaaagtcagctgtatgtagggcttagttttttggatatgaccaataggaagcttgggttggctgagtttcccgaagatagccgattcactaatgttgaatcagctcttgttgcattaggttgcaaggagtgtcttctcccagcagattgtgaaaaatccattgacctaaacccccttcaagacgtcattagtaactgtaatgttctgttgactgagaaaaagaaggctgacttcaaatccagggatctcgcacaagatcttggtagaataatcaggggttctgttgagcctgtacgtgatctactatctcagtttgactatgctcttggtccccttggagctcttttatcttatgccgagttgctagcagatgacactaactatggaaattacacaattgagaagtacaatttgaactgctacatgcgacttgattctgctgcagttcgagcattaaacattgcagaagggaaaactgatgtaaacaagaacttcagtttgtttggtttgatgaacagaacttgtactgttgggatgggaaaaagattgctgaacagatggctgaaacaacctctattagatgttaatgaaattaataaccgactagacatggttcaggcttttgtagaagacccagaacttcgtcagggactccggcaacaacttaaaaggatatcagatattgatcgtctaacacatagtctccgaaagaaatcagctaatctgcagcctgttgttaagctttatcagtcctgtagcagaatcccatacatcaagggcattcttcagcaatataatggccaattttcaacattgataaggtcaaagtttcttgaaccgttagaagaatggatggcaaagaatcgatttggtcggttttcttctcttgttgagacagctattgatcttgctcagctggagaatggagagtacagaatatctcctctatattcttctgacttgggtgtactaaaggatgagctttctgtggttgaaaaccacataaacaatctgcacgtggatacagctagtgatctggatctttctgttgataagcaactgaagctagaaaaaggatcccttggacatgtgttcagaatgtcaaagaaagaggaacagaaagtcaggaagaaactcactggcagctacttaatcatagaaactcgtaaagatggtgtaaagttcacaaattctaagctgaaaaatctaagtgatcaataccaggcattgtttggtgagtacacaagttgtcagaaaaaggtggttggtgatgtagtgagggtttcaggcacattctcagaggtatttgaaaattttgctgcagttctgtcggagttggatgttttacaaagttttgctgatttggcaactagttgcccagttccttatgttaggccagacatcactgcgtcggatgaaggagatattgttctactgggtagcagacatccttgtctagaggcacaagatggtgttaactttatacccaatgattgcactctggtgagagggaaaagttggtttcagatcatcactggaccaaacatgggaggaaaatccacatttataagacaggttggtgtaaatgtattgatggcacaagttggttcctttgtaccttgtgatcaagcaagcattagtgtgagggattgtatttttgctcgtgttggcgctggtgattgccaagagctctgcgtttcaatta

SEQ ID NO: 26158 - DNA, 1889 bp, Zea Mays
ccgggcaccgccgcgggccccacgtctacagattcgcgtcgtgctctagggaggcttggcgccccccaaccccaactataaataacggccgtcctctccccgtcttctacactacacacaccctcctcctccggttctcctcgcaccttctcccacctctgctctgctctgctctgctctcccaggccaggccctgcagctgcaagcaccgaggacagacagagtcgctcgcttcgccaccactagctgttgcttgcctgccacccaaggatttccttccatcgagatcaagtagcgtagcggcttgcctgaccaagaggcagagctctcgatgacgaagcagggcatggtggtgccggtgcctgaagcggccgtggcggtaccgcccaactcggcgccgctgttccagtacccgccgccgcgggccgcgccgggcgtcgccgtgcgcaagaagtgcctgcagatgggcgccggcgccgggcgcatcggcggctgggtggagtccatgcgcgcgtcctcgcccacccacgccaaggcggccgccgcgctcgccgcgggcgtcgaagaggagcggtgaaacacccgtcggcgctggccatgttcgaccagctggtagcggcgtccaaggggaagcagatcgtcgtgttcctcgactacgacggcacgctgtcccccatcgtcgacgaccccgacgccgcctacatgtccgacacgatgcggcgggcggtgcggagcgtcgccaagcacttcccgacggcgatcgtgagcgggcggtgccgcgacaaggtgttcgaattcgtgaagctggcagagctgtactacgccggcagccacggcatggacatcaagggccccgccaaagggtcccggcacaccaaggccaaaggaggcggcgttctctttcagccggccagccagttcctgcccatgatagagcaggtgcacgattctctggtggaaaagaccaagtgcatacctggagccaaggtggagaacaacaagttctgtgtgtctgtccacttcagatgcgtcgatgagaagagctggatcacgttggcggatatggtgaagtcggtgctcaaggactacccgaagctgaagctgacgcagggcaggatggtgttcgaggtccgccccaccatcaagtgggacaagggcaaggccctggagttcctcctcgagtccctcgggtacgccgactgcaccgacgtgctgcccgtgtacatcggcgacgaccgcaccgacgaggacgccttcaaggtgctccgcaagcgcgggcagggcgtgggcatcctcgtgtccaagcaccccaaggacacctgcgcctcctactcgctgcaggagcccgccgaggtgatggagttcctgctgcggcttgtcgagtgggagcgcctctccaaggcccgccccaagtggtgatccaatccacgacgacagatgacgatcgagctgggattaattatacactatatatgctcaatatataagttagttatactaagggtgatggattaattagagggatcgggggagccgggagcgagggagtaattaagaccgtacgcacccactccctacttgagctgagctgagctgagctgagacgagagctcgctgcgctgtgcacggcacagtcatgtgcgtccagtccacggcgcctccctatgtttttacgggagccatgtggcggctgctgcgcggcaagggtgaagaatgtacgtgcggctagctgtaacactccagtaattacttcctactctactccagccatgaaccttggctctggatcctgaattctgattgtgtacaagtacaagagagcaactgctgtcgatgcctatgtatgaaatcatctctataaattaagtagccagctttcctctgtacaa

SEQ ID NO: 26159 - DNA, 3958 bp, Zea Mays
aacggtagaaaagtagctgtggatgttctagtctattgaaaggaaattttgctctggctcaaagttgaaagagatgggtgggagtgggatttttgctgagaagagtgaaaatggtgatgcagaggcttcaaatcctgctaacaagacttccttgaggatgtaccagcaaactgtgactggaataagccagatttcatttagcgctgatggaagtgtttcaccaaagaagccatcgtcgatacctgaggtggctaagcagcgagagcttagtggcaccctggaagatgctgatgctaaaatcaataagcagctttctgaagccaagaccaaggagcttagtgggagtgacatctttggtccgcctcctgagattccagcgaggccattggctgctcgtaacatggagctacaaggaaatgtcgatttttcacttccacagcgaagcgtccacacatcagttaaagtatctaatcctgccggaggtccaagcaacatctctttcagcgaagagcctgtagtgaagacagcaaagaaaatccacaaccagaagttccaggagctgacaggtaacaacatcttcaaggaggacgtccctgcctcggccgagaagtctctgagctctgcgaagcttaaggagatgagcggcagtgacatcttcgccgatggaacgccagctccccgagaataccttggcggcatccggaagccccctggcggtgagagcagcatcgcgctgatctgattgttctgggctgctctaattcgcactggctagcagcgccccctcgccagtcgtcactgaagcagcacacagagtgcatttcttgacctcttggttctcgaatcgtgttggggatcataatttatgttgggtgtcgttagtctaatataatttggagtcagcagaatctgatccggttacctccgtatcatctgatacgcgggtgtgtgatctcatctgtgatccatgctacattattatgttatgccatccgaactgagaacttatgcaacaattatttttggactcgtttctgggactatggcatcatataggatgttttgcttgtgctgtcgatgattccaaaggtacatagttttgaaaagaagacatgctacattattatgctatgtattagtacaaccgaactgagaacttatgcagtaattattttggactcgtttctgggattatggcatcatagatatgatattttgttttgtgctgttggtgatgcaaaggctccaatactttggaaacgaagactgtatattcagagtttgcaaaagtgtggaccagattttgtgtaccatctggtaacaaaacctctggaaatgaagaacatccagattgttttctgtagctgtgttggcagtagatgtcaacgtcaagaataaaatagacccgcgccttgaccattgggccacggagtcgttgttgttaccgctattgttaaaacttaaatataacatcgatatcactgcgaacgttcggttaacatttaacaactttgcatgacgtattcctgtattagaaaaaccacggacagggcacacgcattggctttcagccttcgtccacagacaactcttcctcagacgacgaccacactgcaaccattgacacacacaacgtccggaagcgtgtcacgtccacaacagaaggccgcatcagtcactcatcactcatcaggggtcctccgcaacagaaggctgcacgaaccgtctccagtaccagtggcgctcccagatggcgcccatggcctcgagcggtacccccttggtctccggcaggaacgccacgacgaaggcggtcatgacggctacccaggccgcgtagtagatgaaggtggcgtacttgagcgtgcacagcatggagaggaacgtctgcgtgagcaggaacgtggcgcccaggttgacggccacgctgacgccctgccccgccgaccggatctccacggggaatatctcgccagggatcacccaggtcagcgggccccacgaccagccgaacgccgccgagaagacgcacgtcagcgccagcaccgcgagggagtagggcctggccatcgcggacccgccgtcggccccgatctgggaccccatgatccacgcgaccgcgacctggcagatgatcatgacgaagccgccggtgaggaacagcggccgccggccgtaccggtcgaccgtgacgatggacaggagcgtggaggcgaggttgacggcgccgaggatgacggcgcccatgagcgcggcgttgctgccgaacccggccgtctggaacagcacgggcgagaagaaggcgatgacgatgacccccgtgagctgctggaacagcgggaccgccacggccacggccaggtggtgccggtgctcccgccggaggatcctgcggaacgcgccctgctcgtgcgcgcgcgcggcctccacggcgcgggccacgtcctccagctccgcgtccacgtccgccttggcgcccctgacgcgccgcagcgcggcgcgggcctcctccgcgcgcccgcgcacgaggaggctgctgggcgtgtccgggatgagcagcgcccccgcgaggatgacggcggcgggcgccgcggccaggcccagcgagaggcgccacccccacgccgggatgcgcgaggtgccgtagttcaccaggttcgccgccaggttgccgatgctgaggaagagctggaaccccgtcgtgaaggcgccccgccacttggccggcgccgtctccgccaggtacaccggcgccgcctgccatgcattcgtcactcatgcgtgtgaagtaaaacacttgggatcctggatgttagaaaggacagccaactaccccaagaaagccggcaggatgacgccatcttaggcatcgctatcccgtcaggtcggcgcttgagagcgatgtgctggctcaaaaccaaccactagtcctagctacctcgagagacagtgagcaaacgaagcaggagtgtcgtaggacggtgccgtcgcaacaacctttcccatctcctctgcttcttttgggcatggcaattggccagctactctcctgtctcctttggtggaggtgcaaagcacctatcgcctcatctcttgtgcaggaattcattttaccagagagtaatcagagtatcctattcctagtatcctagcaaacaattggctatatgcttgttttgtgaaacataatatattcggcgtccactgagaagaaacgccaatatgccgaaagccaaaaccacaatgagatattttttttaccatttttctgcagcagcattgcttagttttctaattgaattcctgtcaagaagaacgctaactacttgtacgcgctgataatgttatagacagctgggtaggtttgtagtgtagcttcatctatccatctacctaactataagctgacaacaacaacacatcaagataataaaaagtacacttttattagggcatgtgtaggggtattagtttcatggtttgtccatgcacactaattgaagggcacacacacagtgtgggtcacctatcatctaaagcttgcttaagtgttagtagtatatatttacactacattatattactatgggattctgtccaatatagccccaatgggtacccagccagattacggtagtcgttcatcagcctcagatagtgaccgcacaagctgaactatcgttccattactagaatattttgagttattactataatttaaacttataaccataaggcaatccatcaaaagttagtgagggattagaaacactaaagtacatacaggattagtaatgagagaatctaaatcattagacattttttctcataaaaggaatcataataaggacttgaaattggtggaaatgatcaagcagtactttttttagattccggtctaaagtatgttcccattcacttgttaaggaaatggctatcaagaacgaattaacccttt

SEQ ID NO: 26160 - DNA, 2033 bp, Zea Mays
gcacacaccaagctagtttgatctatacgacgacgctttagaagcagcagtagcaccttgatcacttactctcttcgagctagcaagctcttgctgcattattgcaagaggaacaacgaaggagaagagctagggggaccaagctactgcgggagggagaagggtgtgtgccggcccgccgccaagcactgctacccggccggcggccatggagggacgatgtggacggcgagcgcgcacattatcacggccgtgatagggtccggggtgctgtcgctcgcgtgggccatcgcgcagctcggctgggtggcaggccccaccgtcatgctgctcttctccttcgtcacctactacacatcggccctactcgccgactgctaccgctccggcgacgcctgcaccggcaagcgcaactacacgtacatggacgcggttaacgccaatctcagtggcgtcaaggtctggttctgcgggttcctgcagtacgccaacatcgtcggagtcgccataggctacaccattgccgcctctattagcatgctggcgatccagagggcgaactgcttccacgtggaggggcacggggacccctgcaacatctccagcacgccctacatgatcatcttcggcgtcgtgcagattttcttctcgcagatcccggacttcgaccagatatcgtggctctccatcctcgccgccgtcatgtcgttcacctactccaccatcggcctgggcctgggcatcgcgcaggtggtgtccaacaagggcgtgcagggcagcctgacggggatcagcgtcggcttggtcaccccggtcgacaagatgtggcgcagcctgcaggcgttcggcgacatcgccttcgcctactcctactcgctcatcctcatcgagatccaggacaccatccgcgcgccgccgccgtccgagtccaaggtcatgcggcgcgccaccgtcgtcagcgtggccgtcaccacgttcttctacatgctgtgcgggtgcatggggtacgccgcgttcggggacaacgcccccgggaacctcctcacgggcttcggcttctacgagcccttctggctcctcgacgtcgccaacgccgccatcgccgtgcacctcgtcggcgcctaccaggtctactgccagcccctgttcgccttcgtcgagaagtgggcgcgccagaggtggcccaagtcccgctacatcacgggcgaggtcgacgtcccgctcccgctcgggaccgccggcggccggtgctacaagctcagcctgttccggctgacgtggcggacggcgttcgtggtggccacgacggtggtgtccatgctgctgcccttcttcaacgacgtggtcgggctcctgggcgcgctggggttctggccgctcaccgtctacttccccgtggagatgtacatcgtgcagaagaaggtgcccaggtggagcacgcggtgggtgtgcctgcagctgctcagcgtcgcctgcctcgtcatcaccgtcgcctccgccgcaggctccgttgccgggatcgtctctgacctcaaagtgtacaaaccgttcgtcaccacctcctgatcgaccgtacgtcctagcttccgtgcagttcaaaacacatacgcacgaacagatcattaattggcgcctagtatatatgtgcagtctttaattaaattaactaggcattaatcgatcgattaccactacgtcgttctagtgatgcgcgtagcttgcatcatcgctcgctgatttaatttccattgtttttctttgatgatctggttagccgaaatggctagtgaattaagagaaaacaaatagtagcagtactgtgtgagtaatcccaagtcaaatacgttattgaagttgtcggcggtacaaaacgcttgtaaaatgtttgtgtttcaattaatcaagaagaattgtacgtgtttcatatatgaggaaaagaaaaaaggacatatgtttgtttctacaacttctaaataaacaacttgatcgagatgttttcttcatggtacgtctttaatggcaaaaattcagcg

SEQ ID NO: 26161 - DNA, 3275 bp, Zea Mays
ctttctccttgccaaactagtgcgctcgctctccggcctctctcgcacccccctctctcccctacctctctccggctctcttcttccaaggcagacagcatcagaattttccgacagggggtgtatgcagtatgccaccaggagaagaagggagtacccatggaaacatcgctgatggggatgcaccaaggagacgtcaacgtcgccgccgcatattcaggcgttccacggagaggaagaacccagagaatttagagtttgaacgtcaagtagctgcattcgaggctaggcaggaacaacaacggcaggaccagatgactgatgcttttattggatcattgagtttcaaagtatattttcctcatctgaaaatattgtcagacgatgtgcaagatggagacagcactcagccggctggtaaaggacggcttctaaaagattcagctaagccacctgatgatacagatttcctggaaggtacttttatcaagataaattcagacaaacagaaagctacaagaaataagaagagcggcaagaacaacaaaaagaagaaaaagggcaagagcaagggcaaaggcaagggtagaaaacagtcacatgcttcagaaatgcagactgggtcacccacccaacaaccttcttccacatgcgctaacgcgaccggtggcgaaacctcggcgtcctcgtccagccgtgttgccgttcgggtgccactactggaatacagttcttcctcctccagctgtcgggtgacagcaaaacttgtcatcacttctgctgtaaacagtgcatcttctggtaacgagaaggaactatctgcttctagcagcagtgatgacttcaaaagctttgagagcactacttcatacaccactgctgctagtcgttcatctgctaatgactattatactggtggcaatgcatggaactgcaccatgggtgattatgctggcagcttgtcagatgcgagaagtgagccgtcattgtctgcatcagattattctacagattcacgaggttttaggcgcaagacgacgagtggtgaaggaaacagaccaaatgttcaccatcaaagcttcagtttattagcagtcggtcctggctgtagccaagaagccttgctctgcagcggttattctagcaatggtggtgatttccaggaagttgtctccaggaaagcagcacagaagatgaaaaggatgcaacgatcaactcctgctacgactagttcatctaccatggctgcttcaggacctattgtagcacgtgcacacttcccaagagctccattccgtgaggtcattacaataggacattacataaatgatgatacattttatgctagaaaaccaaaccagaaaaagggtaaataccagaaggcccgcagtttcagtaacatgtcgtcaaagaccggttatactactgatcatggagataatgtttcagctggtagcaacagaatgcttcttataacgacagtgcaccaagcaaaacccaggagtggtcatcatgttaccctagaggctatcgaggaaactagttctccaagctgtcttcccaatcccaaggcaggagagctgaaagccatggctccagttggtgatggcatcatcaaggacacagattcaaaaacaccatcttcttctgataaactttcatcactactaggtcatctggataactcttcatgtgttgatagtagggaaggacagaaaaaagctatggcggccccagtcgatggtgacaccgaagacgcaagagcaccaccatcttctgataaaacttcatcactagataatctggataatccttcatacgttggcaaggaagaacaggaagaagttgtggctccagttggtgttggcactgaagcagacagagattctacagcaccaacttctgataaaacttcgttactaggttacatggttaattcttcatgtgtggatagggacgaagaacagcagaacaaagcaaaattcagtactgatgcatcatcgtctgagttggataagattattgaagccgttaataatgcatatggagttcagcaagcagcatctgatgtgtacatgatcagtgccggtatccatgccgatattgaaaacttcttacatgcggccaccccagtgattggacagacatcttgcacaaaaggtaacatgagcttgcaagatctgcgtctgtggaacgtgtggagctggtatgaagaacctgagtgctgtgggattgaagttcagatgcagggaaagaccaattctagctggccagaactttctacatattttgtacctcttctatctgcggttcagttgtttggacagccagctgggaagtcacaaagtcacggcagcggactcgtctttgagtacttcgaatcggagaatcccttttcacggcctccaatcttcaccaagatcaaacagcttcggcacggcgtaaacctctctgctggtaatccaatatttggggatcctaagcaacttgaaagtgtcaagctatctgatcttcatcctgcttcctggttctgtgttgcctggtaccctatttgtcagatacctgcagctgcagggagctgccaagcttcattcctgacataccactccctaggaaaattggttccacaaatttgctctacggataataaggctgatgcgtatgatcgtatgatctgtccgattgtgggtctgcttgcctacaaagaccagggagagaagtggtttcaactgagagaacaacaactcaggatcaaaccaaggccaccctcgggaaccgaccatgctgaactcctgaacaagaggctgagggcactgaggcaatgtgcatcaatcatgtcgaaggcagtggtgccaagggcgccatctggagaagccatgaactatcattcagattacgagttctttttgtcaaggtcgtctctgcagtaagcatgcgcgttatgtattgcatatctaccgatgcgcgcggtgtttcgaatgggctgatataatctctcccctcgcatgaccaacttaagtttgtgtttttttcccttggcactagtacagtacccagatgacatggggtttaagttggatgttctatatatgttctaaagccttgacatatattgctgttggcttgtggatccctaagatgcatttgacgacaaagttttattttgatttgtgtttgcttgtgtggtaatttcaactgttgaacatttgttgtcttttagtttttttttgtctaaagtcaaaattgttgtaaacattgagaagcctgccctaatt

SEQ ID NO: 26162 - DNA, 4753 bp, Zea Mays
attccgaaaaaaatcactaacagaaggacggttcaggaagcattgacagatagaagatggattgctgatatcacaggatcactctcggtgggagtattattggattatcttcatctttggaatttaatttcagattttgagctgctgccagatatagaagataaacatacttttagtattgctgcaaatgggacttattctgctaaggctgcatatgatgggttgttcatcggggctgtgcatttcggtcactatgaaagagtttggaaaacttgggccccctctaaatgccacttcttcctctggttatcggtgctaaataaatgctggacaacagataggttggcaaagagaggacttgatcatccggagaagtgtccgctttgtgaccaagagtctgaatctttggatcatattttggtttcttgtgtttttgcgagagaattctggttccggctgaaggttgatgtgcattttcagactacaaaatctggctcctacacctagtacggtgtcttttacgggttggtgggagatgatagacaatggctccggagatatgattatgaagggtgtcaactcccttattgccttgggagcctggattatttggaatcatcggaatcaaattgtctttgatggaatctcccctagtgtttctgcagctctttgtcaggcaagggaggaacaacagttgtgggaaatggcaggagctaagggtctctcctttcttgccgcaaccatcaggggcacctagctgcctggtttatcgctgatgggctggttttgtttttcaggatctgtttgttctttttttgtttttttctcttcttttttctttggtttttttatcccctccggggaggtcttttgtactttggtctattttggaccctcttttccttctacttaatataatgatgtgcagttctcctgcgctttcgagaaaaaaaaacgtcatccgcggcctcaacgaatgctttgccaacattggtcttcacctttgacgtgggcgcctttccccacctttttcgatgcttgctctgagctccttcttgaagtgctcaggccatcagggcacctccattgacccctactgcccttgcggcctctatcattccgcctgctcccgctagtgcgcccttggtcttcggggcctgacctctggcttcctctcgtagtcttgtgtgctttgtggagcgtcggggggctcaggcctagggcctttaggtcccgtaggtcatgagtgggactcaggcctaggactcgactcgtcggtcgtgggtgggaggcggactggctccttcctacaccgcggctcggtgctgggcgcagttaatgtggcgtgcgtagtattgatggtgagagcagccctagggccagatgtggaatccactcgagtggctctctggcggttcgtctgatctccttgccaggcttcgcctcgtccgacctctggcgcggtgcataggggtcatctgggtgcagattcacataggcgagcttctccctatcttatctctcactcgtggtctcgtgggggcccggggatccgatccccgacactcgggatatggatcgccgacgtggggaaaggaggcgctggggtggcagctacacccgcgggaggctagggaggcgtaggccgagcgccgatggccgggtgtagggggatgccgccgaccgcaaccgagaaggggaggtctgtcaccggaggaggaggtgcggcagcggccgtaatcgcaatcgtccgcgcgatggctgcagcggtggttggtgcagtggacgttcgtgccgcttgcgtggggagggaggcgagcacatgaaaaggagaaagggagggaggcagtcgtggacgccgagaaggtgcgggcggacgcggtgacgatcgctctgggagatgcaggggaaggagagggaggggttgccggaggactgctccatgacggtggcgatggccgggggtgcgccgacggctagagtgcctggtggttagggaatgtagaggcttgataccatgttggaatagaaaaccctaaccagagttgatagtgcattaatataatagagttaggtgggtctgaggcccattacaatagaggcattacaatagagcatacagttacgctaacagtatcaaatgcctttgaaatctctagcttcaaaaggatgtatggttctttacttttatgtagggtctgagcaagctgctgcacaagtaagaaattgttgtgaatattcctcctaacaaaggcgctctggttgttagaccagcttaggcagcagggtgccaagcgataagcaaaaatcttggttaccaactttgcaaagcttgagttttaggacttgagctttacaagatgagtttacagcttggacttgatcagatcccatctgaggaaaaggatctccagttttggcacttgaattatcaccattgtcgaatagccaccctaaaatcaaagtatttaatttcttctgtgactgctaaaaggttgaaataacttttctaaaagaaaattgcttgtccatgggagacccctgggcattttttagtttataagttagcaaattacatcctgattggtgattggctaggaaaactagctaaatcagtttccagggaggtaaccacaaattgctgagtcctggatttgagcacaggtggccttcctctcaactgggaagtactttctaatttccttttcagatgtagatgtaatatttccaagaagtacaacccttttccttttttccttgcaccaaaccttttgtaactttgttcccagataccgggttctcggtcttgttagaagtatattactaaacaatctatctgcctacactgcattgttcagcagatgctggattagataaaatgtgattttaacaagtactccctatgttccagtttattaggtggtagtgcatttttgagaaagggcagattgttaggcggcatacatagcaaggcattgcattataaattcctgtggaagaaacacagccgttttatccgacccgatccaacaagtgaatgcaatgcaccagatcagtgtggcacctggcgtgaattaaatcttgctcacactctggtgtgtgtactcttagcgcctttaaattgggtgtggagggagtgtatatgggtgcaaaaataacatagctttgtacaagtaaacaaacatggttggacatcacttttacctaagatttttattgaggactaactgtctctgcttcttacatcctagactgaaaattttccattagatgtccacattgccttggaatgtattgattgtgctatctctttcagcatcaacatgggaaataaggactttgtatacatcaggatcatcgagtccaaaatgtgttgttactcttatgttggagattgctccaagtttttggggcagatggaagagaaggcactcaaattttgacaaaagcatcccttttgctttgctcagccaagtagcaggtataagagagtacttcgcagccaatccagccttgacatctgagctgccttcaacagtagtgaagtcaaaagcatctgaaactttgatcatccagagtgaacatgaagattctgaacttggtgatgaattttatgatgcacttactagaggtgaatccttcgaagatggggatagtgatgatgatgatgatgccacaactccaaaggctagaaaagtaaagttgaagaatgtgtcatgggctattgcaggcttggctttaaagacaactaaagctttggttgagacaagtgaattggttacaaattctagtccagttactgttgaccccagccacttccatggcacccttcatagagcgaaaactcaaaatgatcaaaattcttggagtgcacctggtggggagaagtttatgatcagagggaagacttacttaacagattatcacaaggttgttggcggtgatccacttctagagctacttgcggtcgattggttcaaagtgccagcgaaaccaaattataacttggttatgtactacgctgcagagagaccagtgaacaaagattctttgttgggtagattcattgatggaactgatgcataccgagatgccagatttaaacttataccaagcattgttgagggttattggatggttaagcgtgctgtaggaacaaaagcttgccttctgggcaaagcagtaacgtgcaattatcttcgccaggataactttctggagatagatgttgacatcggttcatcatccgttgcccggagcattattggtctagtattgggatatgtcacaagcatagttgttgatcttgctattcttattgaggccaaggaagagaaagagctccccgagtacattctgggcactgttcgtctgaaccgtgtgaatcccgacagtgctgtatcaatctaattacgtttctagccgatctatgcaaatttactcttatcctcttttattctgagagaaacagcgtggcattttgaaaatgtgaaatagcattactatttgctgatccccaatcgagggtaacatatgtaaattggcatgaggcatgactacgtgacgcctttcgtaaatagaataaatcaatggttatgtaatattaatatcccatatacgcgtgtcataatctatgtggcttaaaagtggcatcaagtcatctagtttcctgtgttaacttcttattccttaggtagtcagacattaacagtgtgtttggtttgaggaatgaagtgatccatctttttctcac

SEQ ID NO: 26163 - DNA, 1085 bp, Zea Mays
cttgttttatttggaattagtatatttaatctatttaaatatgtagaaagcatgtcacttatttctctaaatttacaacaccatgtcctggaaatatgtctgtgtggtgtggagaatgctgacaccattcagaccaaagtgtccaaaagaaaaaaggaagatcaaaatgtcatggcaatgcactcctctcgcacatctgcaaagaggtcggagttgatgtatctctcgccgccacttgggaacacagtgacgatcatcttgcccttgttctcctgtctcgaagcgaccttcaaacaagctgccaggtttgctccggaagaaatgcccacgagcaggccctcttccctggccagcctcctcgcattcgccatggcctcctcggtgctcacggtgacggtctcgtcgatgaccgaggtgtccagaacttcaggtagaaaccctgggcctactccctggattttatgcttgccaggcgcgccacctgaaatcactgggctttctgcaggctcaacgcagatgatcttgacgcctggcttttgcatcttcagatacttcccgacgccagaaacagtgcctcctgtgcctgaaccggctacgaatacatccaccttgcctgccgtgtccttccagatctcaggcccggtcaatctgaagtgggcttcagaattcgctttgttcgtgacttggttcagaacatgtacatttggcagctgttttcggagctgttcaactttgtcaaacatgcccggaaagccaagggccggatctgttaagtatagctccgcgcccatgaacctcagcaagatctgcttgtcaagcgagtatttagccggcatgactgcaatgagcctgtaacctctctgaatagcgaagaggaccaaccctaaccccatgttaccactcgtcggctccaccagtgttgtgactccaggcgaaatcaatcccctctcctcagcatcctctatcattcttcacaggaaggaaaattggaagagaagtgtcagcgcaggcgtgcgtctcgtgtcactcttcagaagaaaacagaaagaactgcagcgctcgacacacacagacatattctgttg

SEQ ID NO: 26164 - DNA, 2469 bp, Zea Mays
caaatttggatcttagacttcttgttttgattcttttcatgagagaagctcattttacggcttgtgctcgagtatactttttgtctgtgctcattatttcgaattttcggcagaggtagaattttggccttttccctcgactttcttgtgttgtggattgaagtgattttgagctctcaacttggttctgtaaagaacgtctttttgttgccgtaaagcttaataaacttgttctgtgtctgagtgtttttggaataatcaatttggtgcttttagaaacacctttatgatttcgaaaatgaacttttccttttttgtttgggttgcatactgagatatttgtttcgatatgtcacgaggtatatagatgaaagtagtactctggttgggtcctcactgcaactgcaattttggtacaagttgtggtgtcgatgtcatgtgctgttcccagttcaccatttggagcccaaatactcctcctcatgtttgactcgcaactaattctggtcttggctgccggctaggaggccgtctagacttcctactttctaagcatgtgttggaatactagaaatattttagggtcagacactcccaagacaagagattatataaagtattggtttggtgtgttgcatgctgcattagtcttttaacccatgagaggactctgtccaagcctgtagttggacgtgtgctgatggtggacctggatgttgacgtgttcctgacatctgtggcctggactgttcctggtggagatgtttcaattgtagattcggatttttatttggtccttaagtccttgtcatgactcatgataagtgtgacaaggcccatggttggtctcagaaccgaggacgtgtgcggttgtgcaaccactctggaatcacaatatgccccactaagaaacaatgtttttttttctttcttttttacgtcagcatgctggcatcagaaggctggtgctagatgcattctgttagcttatgtgttttggacatgtctattgcaatttgttgtttggttctatcgaccttgttctttcatcagtggacatcatttttttttctaatgtgcatcaaggaaatctgagagggactttgatgcgttttctgaaggctagagaatggagtgtgcctaaagcttataaaatgctaatggattgcttaaactggagagtacagaatgagattgacatcgtgttagctaaacccattctgccatctgatatatatagagttattcgggacacgttacttgttggattgacagggtactccaagcagggacaacctgtttatgcatttggtgtgggtcttagtactttcgacaaggcctcggtgaactactatgtgcaatcacacatacagatgaatgaatatcgagatcgtgttgtcctgccggctgcatcaaagaagtttgggagacagattaatacctgcttgaaggttatggatatgactggcctcaagctgtctgcactgagccaaataaagatgttgacgatgattactactgttgatgaccttaattatcctgagaaaacggaaacttattacattgtaaatgctccatatgttttttcagcgtgttggaaggttgtgaagccactcttacaagaaagaactaaaaagaagatccaagtcctgtatggctctgggagggatgagttactgaaggtcatggactacgagtcacttccgcacttctgcaagagagaagggtcaggttcatccagcgactcgctggatggagtagattgctactcctacgaccaccctttccaccagcagctgtacaactacatgaagcagcagcaatctctgaatcaggactccgttggtcccagaaaacaaggctcggtccacgtggatgtgccctcgcctggccttgaggaggccaagattgcggagacgatcaaagcagagctccagaatttgaggggaagcggcggtctcgcccattcattcagcagcatccagatcgaaggtccatgagggcgcgcgccagtgacccgaagagaagctcttggtaatggtgcctcctgcttgcagtcactggctgcaggcttgaccggggcgaatagagagcgggattctaataactgtatccgcgattgttgtgatttctaattaaccaagtgggcgtgtatcgccatgcttgtactatccctgtatgtatgtatatataacggccaactggacggagtttatgtaactccctgctaattacttagaatgctcatcttttattttactccaatatagtgaaaatttcgcttagggcccgtttggttccttgaaatggtgacctcgaatgatttctagccactttcaacaatttctagccagattgctttgtgtaaattctagagaggaacgaacgaggccatcttttattgttatcgaatatttgtcgctctaaaatactataaataaaaaagaatggaggaagtataatgtagtg

SEQ ID NO: 26165 - DNA, 2522 bp, Zea Mays
aaaaaacgcaccttttcatgaattctggtgctacaattttgcgttgtccttgcggcgactgctgggtctccatagatctgtgtgtgtctgtgcgggggcgagtttccgcagaattcgcggcagatgctgcgcccgcgcggaaatggcccctcgtgattccttacccgtttattggactactttgagtgttcgccaaaattagggcccgacgtttcgtcggtgaatcctcgagctgctgccgtcacgtatgaggaactggagcgtcggggccgttgcggccttcgaatttgcgctctggagctccgtctggtgcttcctggtcgtctccgtcaccagtttctgagccgggatcctactcctcttctcgcgctactatcagtgcagtgcagtaggccactggactgctgtcgtgccggggtagttgcggccaaaggaacaagccaccttctccgagttggaattaggtgcggccctccgcatcaaaagggctcgtttggtgggaactttcgcttgcctactcgctgctgcctgcttcggtggtcctccgtgacggggattgctggaattggggttggaaggacattctgactgaattgctcgagtgaggggtggggttttggcgcccgttgcttgaggatggaggagaggccatcgtccgaggcaggcgcgggcaactcgagggccgaggacgacttcaggagctgctgcggggatgaggaagagtgggaggacacggaggagtcgttcacggccggcgtcaccaagggggagctggacgaggcctctgtgcgtctcttcttcaagggcgtgtcgagccctgaggcggaggggaagaagctgtctgggatcggagtcgtcatggagaggtcgcccggggtgcctgttcttaaggtgcagaagaagctggatttctatgtggaggagctcgtggctgatcacctcgccctcatggatgggctgcttgtcgcactgcagaatgggatcaggaagatcttcgcctttactaattcggagaagctctactttcagatagcagaagctgaaattcttgaagaccagcttttggtagctctaggacacaggattcttgaactggtggataagttggaagactttgatttgatattgcttcctagctttgaactagagaggcccttgcagttggctaaagaagctataggcatcagatatctgtctccctacgaggttggtacctgcccgatttgccgtgaggagaaactaggttctcagatgatcaaggcaggttgttctcacacatattgctataattgcctgactgggtatgttgaagagaagctgctgacctcgaagctgcctataaggtgtccacaattaaggtgtaaatacattatttccgctagtgagtgcaactcgttccttccagttagcagctatgattccctggagagagcatttgcagaagctggcacctcaggaatggaaagattttattgtccctttccaaactgttcagtgctgttagaccttagtcagcacttctctagggcaagttcatcaagccagtcagatctcagttgtgtcgagtgcccagaatgccatagagatatatgtatcaactgtggagtgccgtggcacatcatgatgggctgtgatgagtaccagagcttgcccgctgaggaaagagatgctggagacctatctttgcatcggcttgcacagaacaataggtggaggcgttgccagagatgtcgacgtatgattgaactgacacagggctgcttccatatgacttgctggtgtgggcacgagttctgctactcctgcggtgctgactacgctagcggcgttcaaacgtgccaatgcgtgttctgggacgacgaagccatggagccctcctccgccgcacggtccacccaagcagcgtccgagatctgggcgtgggacacatttgactgcatgccgaccgccgtggagggatactcggagcaggagagagcgcagctggcactcatccagaggttcctcgccggggggttcagcctgggtgagaacccctgccagtcgccgccccgctgcgccgactcctacatcgtcgacaccatgaaggacctccaccagctcccatggctcgagcggttcgtgtcggtgatcagcgacacgtacaacgatgactacatgcagtgaagggagggagggagggagagacagttatagatagcagtaaaagaaacggcacatactgagtcctccattcagaataatttgtttccatgcccctgtaggcaattggcgcagggaaaaatgatatgctttcatcatgaatacactggtgttgtttcctccattgtatggtaaccttcggcttcggtgctagttgtgcatgggcacaagagttctccattttatatgattatgtccttatttctttaaagtgagtgtaatctctctctctatatgtatatcttcagagctttctgaaattactcgttttgaatcaaatcagcagcatgagcaactgcctggatgatgcctccgtttat

SEQ ID NO: 26166 - DNA, 333 bp, Zea Mays
cgcttctacaccctgaacccgagaccccttggttgcagctatccgcaccagcagagcgaaatcgaggagagtgagagagaagaggatttccgccgccgtggtttcgcgactacgacgccggagcggtcagaattgttggcccgggtgcttctacgcaacctccggtgtgtgctctcggcctctgttggcgcgattgaagctctgcgcgccggcgattgctcatcgaacttcaaccgggaccgcatcacgtggccagagccgttcgcataataattagtggtgagtcctcggccatcttattcacttcatttccctcaacacgtagagtgtgtt

SEQ ID NO: 26167 - DNA, 1802 bp, Zea Mays
gagcgatcagcgatgaaatgaagtgcatgcaaacaacaaagcaataggaagaccctcccatggagatgactgacatgaaaccagaggagatgagccaccctcccatggaccagctgctcggaatggagtactgcatagactccaacccgtcctggggaggagctgttttgctgggcttccagcatttcatcctttgcttggggacggcagtgatgatccccaccttgttggttcccctcatgggaggaaatgctcatgacaaggcaaaggtagtacagacagtgctattcgtgactggaataaatacaatgctccaaactctgtttggaactcgtctaccgaccgtcatcggtgggtcttatgcattcctagtcccagtcatgtcagtaatcagtgaccactcactgatacaaattgctgataaccatacaaggttcaaaatgaccatgagagccatacagggggccctgataatatcatcctgcattcagataatacttggcttcagccaattgtggggggtatgctccaggttcttcagcccacttgggatggttccagttattgcattggttgggcttggccttttcgagagagggttcccagtgattggaacatgcgtggagatcggtgttcctatgcttgtcttgtttgtggcactttcccagtatctgaagcatgtacaagtgcatccttttccgatattggagaggttctcagtgctcatcaccattgcagttgtctggttatatgcccacatcctcaccgtgagtggggcatacaaacatagttcgcaggtcacccagctcaactgccgaaccgaccgtgccagcctcatcacaaccatgccatggtttgatattccatacccactgcaatggggtcccccgagtttcagtgcagatcattcattcggcatgatggctgctgtgttggtgtcattggtagagtctaccggagcgtttaaggctgctgcccggttggcaagtgcgacgccgcccccaccatttgtcctaagcaggggaattggatggcagggaatcgggctgctattagatggcctatttggtactgccagcggctctactgtctctgtggagaacgtgggtctcctaggatcaaccaggattggtagcagaagagtcattcagatctccgctggtttcatgatcttcttctctatcctagggaaattcggagggctgttcgcctcaattccattcacggtgtttgctgctatatactgtgtattgtttggctacgtcggtgctgtggggctctcctttatgcagttcaccaacatgaactcgatgcgcaacctcttcattatcggcacgtcactgttcctcggtatctccatcccggagtacttcttccactatgatcatggaccgtcacatactagagctggatggttcaatgacctcatcaacaccatcttctcctcacccccgaccgttggtttcatcatctcggtggtcctagataacacgctggacgtgaggaacagagccaaggaccgtgggatgccttggtgggctaggttcaggacatttcgtggggatagtcggaacgaggagttctacaatctgccgttcaacctcaaccggtttttcccaccatcgtaagaacattgtacatgcttcagtttgttgttggaaccgtagagacaccaaaaccaagtatcattgtaattatggtttggcttccaagggttgtacatgcttcagtttgttgttggagatgactgctgagcaatgagaatcaattacttcgaggccactttcttgctcttgtgttaa

SEQ ID NO: 26168 - DNA, 3168 bp, Zea Mays
cttcctttcccaactcggtcgacgcgttcgccacggctgcgcagtcctcctcctcgcctccgatcccctcccttcgacgatgcgagcacacccgctcatcctcttcgtacctgcaccgccacctcatcctcttcctcgccgcgccgacacccaccgcgctctctccctcccgcggcgacgcccttcgccaacgagaaccgcacgccgtcgtctcccacgggcactgtcgcacgctgggccacgctgcagtcggtggcgccgccacaccttcttcctccatgtgccgtcgccgccctattcttcttcgagatgcagccgctagcgctgccctcctcccagctccccttcatggccgcgtgcagggactatgtgccagtgttagtttttggtaccagtctacaggtctttcatttctacattcaaaggtgagaatcaatcatgttcggctccctttaaaaaagtaatgtttcccaatccttcatagtaaaactaaacacacattgtaaagacatttgtcgtacgagatcttttatagaggtgtgttttaacccaaaggcaggctgtggagatcaattccagatattgccttcttgttgtgtctcagttgattttttttagcattgaacgtaacttacagtttgacataacaagcggtgaatgtaacactacagtttaactcaacaagccattggctgtagctcacaatcagcttggctgaactgccaaaaaaaatacaagcagtccattacagttcaacttaacaagagcagttctgttggtaaagccgatgcaaataagtaccaattgttagttaggaagggaaaagtgtcagcagtcaatggctgattaaaaaactaaatgtctttgaatttgttgggccgtgtgcctagtgcctggcctattaactggcttgttcgctgcggctttaatccgactgcgactgcggcttctacagtattttgtctctaggaattgcagctgcaatagtattttgcagctgcaacagtgctcccgcatgggcagccgaacaagctaaacatgtacatatatacttattataccagtgaggtgtgtgtagagtagtgtactctgtactcttccagaaaactttacatggtaccggaaccgggaccagcggcgacggtgtagtggtgaggaggcagaggagtgccttcggcctcgacggaagaaggccgccgatggagaagaagaccagctgggagcgtggcgcggcgtcgcggtcgtgcacgaggaggaggagcctgcacttgccggagggagaagaagcatgtagcacggtgcggtgctgcagtcgtgcgtgagagttgagaccacaatccttatgaaaagttacactgtaagtatgtcgtcctgcttgcatttcttccatgttccttttctcactgtaagcttagtttttgtgatcagcttccagatagaagagttattaaagtagacactaaacgattccaacctcctgaatctctttttactcctgtaacacttccatttatatttatacataatggtattgtcaacagtacacatagtttccatcagtttgttaatagtgcacctttagattgaatgagcttcttgcagagcaccaaggattaggcattgaaatgtgtggataaaaatattagaggaccacacatcattattatgcaacattgtctatgcacatgaacataattgtatcggtagtaagccgccagcatgtttgaaagttaaaaatgtgaattaagaacgaattatcgtatcctgctatacttatgcaacctaccaagaattagggcattgtagaaaccatataaagtattgagatcaatttgaatttgtctgcctcatgattttttgatacctgacctttatgaaggtagaggacaacattaaggatgatcatagactaccaacattcttcttcagattaaatgttaaattcagtaatttaatttgtttcagtaatacaagattagaccatccctgcacatctgcctatctgcctggcaaaatattatcgtcgcttccaagattgagaatatggctgcgtttggaaagccttagattctagcattgggtaacatgtctattatcccacattatctaagtttaactagatactcatattttatgaaaaaaactgcactgaaaaatcacgaggtgctagatgttgcgctagcagcagcatcatagcacatcttgtctattccagttacaaatgtgcatattgtagaatatttttgtaacatactgctgctcccttccattcgttttggttttggcaattttctatgcacgtgtcgctcatccatggtacctcttttgtactaagatcattgtgacatttaacatgtttacatcatctcttactcgacacatactcactggactaatgttcttgtccctccttttgctttccttagcagatggcggaggttctaataagtaaccttatgattggaaattgcagtgatcggttgtgtgtacgtgtctcccgtctgtgaaaaatttatgatcccgaggatgagtataagcttttccatgctcatatggtcctcatcgacgaggaggctggcagtgctcatgctcaaatataccctccactcactgacgttttcaaacctctgataaaggagggcaatgtctacaatgtctcctacattcagatcaagaaagctaataggatgtacaagcatgttgacaacgatatcatgatcggtttcacaaaatggatcctatgctgcctcaacaaacccgcggtttgaacacgtgacagatgacggcttagcttctgtggatggacatcttggtcgcttttgtagatggaatgtttggttggcttttgtagacagaattaggctgcacttgtgattgtgtaacgcttatgagcatggttgtgtggactgtgtcggccaaagtatacctcccaatgccttgtatatatcacatgcttagctgtctatccccaactaggtcgcctgataatagacttcgatcatgtcatgctattctataacaattttcgctgtaacttgcctaatcgtcatactatggtacacgcttaaatttggtgctgcaactttattgtggattataaaagagagaaaaatacagcataaagttataatgtcaaattgccacagctcactgttaagacttatttga

SEQ ID NO: 26169 - DNA, 1170 bp, Zea Mays
atgggaccagggaaattggaaagcatctgtaccagtaaaattgcttgactggggtgaggatggtcatagatcagaacaagaaattgctgcactgcgagcagcttttgcacaagaagttgttgtctggcataagcttgaacatccgaacgttactaagtttattggtgctataatgggtgcaagagatttaaatatacagacagaacatggacatcttggcatgcccagtaatatttgctgcgttgttgttgagtacctccctggaggtgcactgaaaagttttctgataaagaacaggagaaggaagcttgcctttaaagttgtggtccaaatagctcttgacattgccaggggattatgctatctccactcagagaagatagtgcatcgtgatgtcaagactgaaaatatgcttctggacaaaacgagaactgtaaaaattgctgattttggtgttgcccgagttgaggcttcaaaccctagcgatatgacgggcgaaacagggacacttggttacatggctccagaggaagtgtgacgtgtacagctttgggatctgcctgtgggaggtatactgctgtgacatgccgtaccccgaccttagcttttctgaagtcacctctgccgtggttcgccagaacctgaggcctgagataccgcgctgctgcccgagctcgctagcgaacgtgatgaagcgatgctgggacgcgaacccggacaagcgtcccgagatggcggaggtggtgtccatgctggaggtgatcgacacgtccaagggtggcggcatgatccccaaggaccagacgcagggctggctctcgtgtttccgccggtaccgaggcccctaacgcagagttgcttttacccggcgaaatgatgatattggtctccacgactcagtgtaatctaatcgcagaactggctataattgagagttttctcgttgtcctgggcgtaaatgcatggatgggccggcagttgacgattgatgtccgttcaaatgcttgctgtaagttaattcaggtgtagagggagttgctgtggccgtttgctcacatcgtttaatttcatggccgtgacgtgaagcaggtcatttttagaaaaaaaatatgtattaatatttcagtctctatcgattgacacatatagttgtccaaagttacatctaac

SEQ ID NO: 26170 - DNA, 2640 bp, Zea Mays
acggaacggacggacggacacattgtcgcggcgcagacctgggagaggagcaggagcggccagtcagcggagcggataggaggcaggaggagtcgcgccggagatggacacgcccgaccgcgccgccgcgcagtccgcggccacgcgcaccgaggagcccgcttggtgaaatttctgacaaggaggttcgtgccgacgccgccggtacgaacgagccacccgagccttcgaacgcggccaggttgtttgcctgcactagcaccgtgactcgagaaacgcgcacgggtacatgtacgggcgtggctggtcctcctcccaccaccggggggccatgtgatctggccctgcctcgtcagttcgacaataacggcagtccagaccacaacacgacgccctgccacggtgtcaggtcagaccttaaacaggacaaggctaggaagctgctacaagctgcacagaacgctaaaaaaaacgcgctggagaagaggaagtgcttgttttccaccgaagtccggctcctggacggcggcggcggcggcggcggagagcctgggagtgacagtgatggagtcttgggatgcgagtggtccgacttagtctccccgacctcagcgaagcttttggccttcgacgccacgatggacgagcatcacagaggagtgcatttggcggctcagaacgcagagtcgtgtgggtatttgctgtcgaaacttgccggagacggtggcgtatcggacggagcatatcctactgcgtctgctcaggtatactatcaggaacttgtgatgggagaagatcagtcagagaacgccgctcctcaaatggacgctcaggaaaccatctcagccgaagaaacccaggataatatctatgaagcggatgtgtgtgttccattagagtacaaggtagtggagagccaacagcagcgtggcatacggagacgctgcctggtcttcgaggcagctggtgggttttcgaatagcgctgtgaaaagggggactattgaagatcgctcggtctcaacatgtagtaagggcaaaagccctgcggaaagccagccgcgtggactgcgaggcatcgggcttcatctgaatgcgcttgcgttaacaccaaaggggaaaatggcctgtcaggatcctcctcctacggcttctgctctccttccatcgtcagcgtctgaaaaggatgcgcgtggcgagctgctttgtgcaggagagaatttcgcacactcgggcggtgagctgttggagtttcccttggatggttgttcggctggaggagggtttcctgtaaatgaccatcatgtctcaggtcagagcgtcagccctcaaaagaagagacggaaaacggataatggcgatgatggtgaggcatgcaagcgatgcagctgtaagaagtcgaagtgcctgaaactttactgcgagtgtttcgctgctggtgtgtactgctcagaaccttgttcgtgccaaggatgtatgaacaagcccatacacgaggaaaccgtcctctccactcggaagcagatagagtttcgtaacccgctagcgtttgctccgaaagtgatccgcatgtctgatgccggtctggaaacaggggaagatcctaacaacactccggcttcggctcgtcacaagagaggatgcaattgtaagaagtcaagctgtctcaagaaatactgtgaatgctaccagggaggtgttggatgctcgagcaactgcagatgtgagagttgcaaaaatgcttttggcagaagagatgccgagactgaactccctgaagaaatgaaacaagaagaaagtgaccagacagaaaatcctcaacaagaaaaggagaacgatcaacaaaaagcaaatgtacagggcgaggatcacccgctcctggaccttgtcccaataacaccgccttttgatttttgcagttctctgctcaaactgccaaatttctcaagcgcaaaaccgccgagaccgaccaaggctcgcagcgtgacctcccgctcgtctgcttcgaaagccactgcagcagtacagccttgtagatcatccaagcttgctgctagtgctagtgctagtggtatcgatgaggagacgccagatatcctgcacgaacctgactctctcagtaactgtgtcaagactactacttcaccgaacggaaaacgggtctcgccgccacataacgcgctcggcagctccccgaaccgaaaaggtggcaggaagttgatactcaagtcaattcccttgttcccgtcactcacgggagacacaaacagcggctctgcaatgaacagcactgatagcgcattctgcgcgtcacctctcactttaggaccatcttaaagctgtgaagttggtggccatgggaccggagtacgacttgtagtccgaacacgtgtgcctcgtatcctacggcaaggctcgaggtactgtagactgtagtaagttaggctttttaaagttgtagtaatctgtatttgtaaaatatgtagactcaataatctgtatgtaagatgctgcgatgggtgaagctgtttatctttatcaaattgtagcaacattacagatcacctcttgagtaggtttcacagttccaccccctgtctttctttttttttttttggaaaggaatccggtccatgttttc

SEQ ID NO: 26171 - DNA, 1055 bp, Zea Mays
ccacttgtacacgcctccgccacccgacaaactactcaataaccctagctaaacccccacgccgccgcggcgacctcctccgccggcgggatggacagcctcaggggagtcaagttgccgggcgtgccgaagggcgggagtgcgctcgtgaaggtggcgctgctcggcggcgcggggctctacgccgtcctcaacagcttctacaacgtcgagggcggacaccgcgccatcgtcttcaaccgcctcgaggggatcaaggacaaggtgtaccccgaaggaactcacctgatgatcccgtggatcgaaaggccgatcatctacgacgtccgcgcccgacccaacctcgtcgagagcacgtccggaagccgcgacctccagatgggtgaggctaagagcgctgagttgattggccaagccattgccaacaaccccgccttcctggctctgagacagattgaagctgccagggagatctcccacaccatggcggcctccagcaacaaggtgttccttgattccagggaccttttgcttggtcttcagcagctgaacgtggggggcaagcaaaagaagtgaagcggtcgtccccaggccatcgcggatgagagtagtttcaggcgatggttttatctgttacagaatgcgcatgcgcgggaatgaacaaagtggcaccatgttgcagtctgtatgtactgacaagtttgtctatcgatctttgattctctgctcttgtaagtcgtgactgatgaatctgttgttgcaattgccttcctggaggcttgctctgatgcgtgtaacagccattccattgctcgtagtcgcagacgtaattcagcgtgtgagttcaatcaggacccgtgtgactggttgtggcatggtggtagcctggcccgacttgtctagtatgtggagccagatttcatatatccaggctaggctcatgctcatatttatgtttggttgtttgcgttcaggtcggataaagatatgtgtttggctgtatgcatcaataccaagatcaaataaagtaaataaataaatcttcaaaattaaat

SEQ ID NO: 26172 - DNA, 3275 bp, Zea Mays
gcgagacagacggttggggaagagtcaggcgagccagcagcagcagcttgctctgccgacgttacaattccgggaatgcgggagggcgtgctcgatagatttcaggggccggagctcgagtaaaccacgagaaaagatagtggctgagatttctcgcggcgctcgccgcgagagcgacccccacaggtcgccgcccctccgcggcccgcgcagcgcacagcatacagtcagcacacgcagcagctgccaccacagcgaacagcaaagcacctccgactcggagtcgcggcgagagccgagaaccttctcattcatcttcctcttctatccatcctgcctgcctgcttgcctccgtattccagctagatctccgggcagccgattgaccgagaagtttgtggttgtggcggcggcggagagggaaacggggagcgggagggcggcgcggatgccactgctgcgccggcgccggcggggccggtgatgcccgccgtggcggtcgcttgaggccgccgtgcgtgggaggtggacgggggagcgaggcggtgcggaccgaggttgcgttgggttggattcgattgggctgcgtctgctgagagtaaggacaattggatcaatttaagtaggtctgggcacacaaatttgaactattaacgcattgggagtgcttgtgtgttagaggtctaggaggagctatgaggtactacttccgtcaggtccagcgtttggttggagatatggaaggaggagctctcttgtttatagatgacctcaactccaagtgacaaagtgaacagctgttgaacttcccgtctatttctgtttctttttgctggatttggagatggaggtgaattcctctggtgaggaaacggtgataaaggtaaggaagccatacacaataaccaagcagcgggagcggtggacagaggctgagcacaaacggttccttgaagccttgaaactttatggcagagcatggcagcgcatagaagagcatgttgggacaaagacggccgtgcagatcagaagtcacgctcaaaagttcttcaccaagttggaaaaggaagctattaacaatggtacttctccggggcaagcccatgacattgacataccgccaccacggcctaaaagaaaggctaacagtccatatcctcgaaaaagtggtctcagctctgagacaccaaccaaagaacttccaagtgacaagtcaacaaaaccaaatatgcccttgagcaatgagaatgtactaatggcaggtgatgcatctcttcagaaatttcaaaggaaggagttgtctggaaaagaaagttgctcggaagttcttaatctcttccgtgatgccccatctccatcattttcttcagttaacaaaagctcttcaaatcatggtgcaccgattgaggcaagtaaaacaaaaatccgagatatgaccattatggaaaatagttctcttaaccccaacatgcaagaggatgtaaaggaaatcaatgatcaggagatggaaaggcttaatggtacccaaatcagctctaaatgtgaacactctcatgagggatatttggacatctcaatgcaacaaatgaagctaaagccagagtctgtggagacaacatatgtggacaaacaaaccgcaagagcttcacactccctagcggagagaactgggacaactagcattccggtcactgcaactgaagaaactcattctgttctaacaagtgatcaagtgggaatcaatggaagcatgaacccatccatccatccaatgtttcctgcagatccaaaatttgatagcagtgccacaccacagccttttcctcataattatgctgcctttgctccaatgatgcagtgcaactgcaaccaagatacccacagatcattggtcaacatgtcatccaccttctccagcatgcttgtttccacgttgttgtcaaaccctgccatccatgcagctgccaggctcgcagcatcatactggccagcagctgaaggtaacactccgattgatccgaatcaagaaaatcttgcagatggtgttcaaggaaggagcatagggtctcctccaagcatggcttctattgtagcagctacagttgctgcagcatctgcatggtgggcaacacaaggtcttctccctttcttcgccccacccatggctttttcatttgtgccagctcccagtgctgccttccccacagttgatgttccacgaccttcagagaaagatagagattgcccagctgaaaatgcacagaaggaatgccaagaagctcgaaaacagggacagtttgaaggtttcagagttgccgcttcttcagagtatgatgggagtggaaaaggcgaggtgtctgtccacacagagttaaagatatctcctgtccagaatgctgatgccacgtctgccgcaggagctgacacgactgatgcattcatgaataagaaaaagcaggaccgctcttcatgcggttctaacacaccttcaagtagtgatgtagatgtggacaatgtccctgagaaagagggcaatggtaatgagaaggcgaagcaagcctcctgcagcaactcttcagctggtgacactaaccaccgcagatttagaagcagtggaagcacgagtgattcatggaaggaagtttccgaagagggtcgtctggctttccatgcgctgttcagtagagaaaagcttccgcaaagcttttctcccccacaagcagaaggctcgaaggaagttggcaaggaggaggaagatgaagtcaccacagtggcagttgacctcaacaagagtaccacaagcattgatcatgacctcgacacaattggcttcaaaccatacaagagatgttctgtggaagcgaaggagaatagggtgccggctagcgacgaggttggtaccaagaggattcgtcttgatagtgaagcatcaacatgagcgatttctacatggttaccgctcggacttcctctgccgccatgaagtttatgacaaagttgtatttacatctaaactagtataggacttaaagaccttgcaatgcaatgcttcatgaaactgttgtgtgctgtattttagtacttgtgaagcagcccggtagactgcttttaaacctttatctcgtagactctgatttaagcatcaagcaactattgaactttatatttttggcgggaaggaaaataattattttttgatttattttgcagggtcatgcatttacatagcactcttgatgcaaaagtttatttcgtaaagttgtagtggaatatgc

SEQ ID NO: 26173 - DNA, 2187 bp, Zea Mays
gtacagctagcgcctgcgtcttgacgatacgcgttagcaagtagcaagactcaagactcaagagggatcccttagcaaaaccggtctcgcaaagggacacaattccctaggaaccgcacaaaagcttcctgcaatccggcggctttggcgttgaacctccccccttgatcagtagtagaatcggctgctaaagatttctatttttatttttttctcggttcggaaggtgccgtgcggcgagcgaaataaatcgctgcggcgagaatcctgtggagatgagttgcgttaggtggcaggaccactcataaattctgcctgttcattcagatctgctccgtgctgtgcttcttctgctgctgccttgcagcgaccagcgagaagaaatccattcgctaggccggcccacccacccacgatagcggttgtggtcactcatgcgtcgtcgccggagtccaatctcgccgctcggagtttcttgacttttctggtcggagtttccatttcctcctggaggagattatttctttctcctctttcaccccgagaatctcgtctcgggtcgcgctggtttgattcctcctcgcctgagtccaccgctttcgcttccagtggagaagcttgtccgtgaagcagcgctcgtctcctgcttaaaatttcttccttctgccttggtttctttgctcgcgcccgccgatttgcttgctgcccagtccacactcctccgttcgtgtctcgcggctttccgcactcgttttcccggtctcggatttcgttaccaatgggcaacgcgttcgcgtgcatgccgcgcaaggagcagcgaggcgcggccgcggtgtcgcgcagcaagcggatggggagcgcgcggtcggcgcgcggcgggcccaagctgacgcccgcggaggaggagctcctccaccgccaggctctggccatggccatccaccagcacctcgacgccggcggctccatgtcgcgccgcatcgacgccggggcctccctgtcccggcgcatggccccgggctccaccagctcccgccgccgcggcgacctgccggactccgtcacgaatgccaagcccgccccaattgttctggagaatttggaaacaaagaaaattgtccttgttcatggagaagggttcggtgcttggtgttggtacaagaccatctcacacttggaggaagctggtctagatcctgttgccttagatctcacaggctctggcatagaccatactgatacaaacagcatagctacgttagcagattactccaagccattgattgattacctcgacagacttcctgaagatgagaaggtcattttggtcggccatagttgcggaggtgcgagtgtctcgtatgcactggagcagtacccccgaaagatctcaaaggcggtgtttcttactgctacaatgctccggtcggcggatgttttcttgcaagagtcacagtttctagtctatggaaatgggaaggacaagcctcctactgggctgatgttcgataagcagcagatcaaggggctgtatttcaaccaaaccccttccaaggatatggcactagcagcggtgtccatgaggcctatccctctagccccaatcatggagaagctctccctcaccccggagaactacggctccgtccgtcgctacttcatccaggcactcgacgaccacatgctgtcgccggatgcccaggagaagctggtccgcgagaaccctcccgacggcatcttcaagatcaagggcggcgaccactgccccttcttctcaaagccgcagtccctcaacaagatcctgctggagatcgcgcagatccaagctcctgcggcgctgctcaaggcgagctcccccgaggagaccgccgccgccatggtgacagggccagccaagtcatgactgcatgtatgtagtgtacacgaaaagagaaatgagtaagcacataggttgcaaaagggagggggaggaggtctggggattaactgaagccaagctgtgtcggataataatgtagggaggtcaaagtgtttctttctttcttctgtgatcagatcagatcatatagagaatgagaggtggtcagcagataattgcatttcttttttcctttttaccttgtgaatgaatgagatattcagtgaccaatgtcaacgcggaaagcctttgtggtgatgcttactaat

SEQ ID NO: 26174 - DNA, 2259 bp, Zea Mays
agtggatccctcccttgtcactcgaaccgaattaacgccatggagagaaggggcattgaaccttacagtgatacacttgctgctctctcagagggtcatagcaatagtttacagttggatttggctgaggagtttttggaaagaatttcagagataaaaccaaagcatataggttcctttaatgctttgctttctggatgtgcgattatgaatgaaccagaaagagctgtccgcatactagctaaaatgaaacatgtgaacatgaagccaactctcaggacatatgaacttttgttttctctgtttggaaatgtaaatgttccttatgaacaaggagatgtgctctctcatgtcgatgtttccaaaaggataagtatcattgagatggacatgtttaacaatggaatccaacacagctttgtgtccatgaagaacttgatacgagcttttggagctgaggggatgatagaggaaatgctgaggtacctgaatatagcagaaaatactctgtggaacataaatcctcatcagaagagtgatctctacagcactgcgttgcatgctctggttgatgtgaaggaaactcacagagcagtaaagatgttcaaaatcatgagatcatgcagtcttccaactaatatttcaatttataataccatgatagagtgctgcaaatggctgccatgcttcaaatcagctagtgctttgctgtctttgatgcttcgagatggtttcaatcctacggttgtgacttttacatcactcctgaaggttgtattagaaaatgataattttgaaggggctctggatctgcttgatatatgcaagattgaaggacttcagcctggcatacagactttcaacacagtactcttacgtgcatatgctagaggtcaaattcatgtccttgaatatattttggagtgtatacatcgatcaaaaatccaacctgatccatcaacactttggtacacgttttgtgcctacgaggagcatgaactgtacaatactgcaattgagtcattgctagtcctcagcatgagaatgatatctgaggatgccggcattcctagtgagaaaagaattgtttttgaagatctaatcctcagtgaagaacctgatgctgaattcaggatcataagggcattccaagcaggcgaagaattccttgcgacagctttactgaacctaagatggtgtgccacaatgggtgccaccgtatcttggtcaccggaggagagtctttgggcaatgaggctggcagcctcgtatgatgctaacaagagaccacatataaacccctcggatgctcccaaatcttggggaaggaatccacttaaccgcccgtattgggaggctaacgggtgattggttgattggttggctacgcttccgttgatcacgcttggcacgtgtttggatggctgcagagcatctctaccgcctgctcccatgcatgcagcgttgattttttcccccactgggtagcctgcatgcgcggaaactcaactccccgtctccccctcgtttccagcggcccaggctggcacgatgctggtgcgagacgcccctacaaccaatcatgcgttaactgaggcagagctggagtctagcgtttcaaatctctctgttgagtatgatgacaatgttgtgttctgttttgctggaagccagtagatgttttgtttacctaactaacatgattgcagtacgatcgggcggcctccctacctgtcgtgaagcttgttccgcatgattgctccaaattggcctcgtaccgttttcaggcttctaggccaacagctctatgttccgattctttacattacttgataggttgctcactttatttacccagttgtaatttctgattatactggctgtcgggagcattagctttgcaaaactgtaggaatatatatgacaacgacgaagatcgagtcgcatggcagtgacagaagaataagaggtgttacgattacaatagctggaaaccaaaacttgctctggttattttgaaggtgtttagattttggaatgacgatgttacaattacactttattctggcaaaggtagattgtagaaggatggatagtgatgcactgttaccgcgtggtactgggttggtctttgtttgttgtacatcagttgttttctggcaggtcgttttgttgacttcgtagctgcccgaataacagaccaattattccatctcagttagagatcatttgtctacggcactcgacattcccttggtt

SEQ ID NO: 26175 - DNA, 1446 bp, Zea Mays
ccaccgcgctcgccctcttcgtcgttgccgtccgtctccacagtccccacccatattccattttggttatcctcttgcgtcacacctcctccctcctggcctcctcctgcggcccacttatatataccaccacgtcgatgcgctgctccgccggcatctccatcgccgtcgcgccgccgtagatggcctgacatttttcacttcatttgtcatcccaattccacaaacctcgcgcgcggcggcggagggaaacaaaaaaaaaaaggaaggatggcgttggagccggtggcgcgggcggtggcggaggaggtggcgcgctggggcgcgatgcgccagaccggggtcagcttgcgctacatgatggagttcggggtgcgccccacggagcggaccctcctgctcgccgcacagttcctgcacaaggagctccccatccgcatcgcgcgacgggcgctcgacctcgactcgctccccttcggcctctccaccaagcccgccatcctcaagggcagcacgtcgctttgcatgaccctgatccagagcctggtgtgatagggcttataaacacaaaaatgtcacccatgacagtagctcgaattgctagtgaagatgcacgtgctatttgcatgcgggagtatggatcatctcctaatgtcgacatatatggtgatccggggtttacattcccatatgttacaccacatctacatctcatgatttttgagctggtgaagaactcccttcgcgcagtacaggaacggtatatggattctgataagcttgcacctccggttcgaatcatagttgctgatggagcagaggacgtgactattaagattactgatgaaggtggtggaataccaaggagtggtctctcaagaatttttacgtatctctatagtacagcagaaaaccctcctgatcttgatgtacataatgaaggagtaactatggctggatatggttatgggattcctattagtcgtctttatgctcgatatttcggcggggacttgcagatcatctctatggaaggatatggaactgatgcatacctccacttatcacggctgggagattcggaggaacccttgacttaatcgattcataagaagccattcctcattcctgtagttaggactctattgctttctcaattaccgtgctggtatgcaaatattgttctgaaggccagtcacctattagttcagctgtccatgccctatttgttatctttgttgttcattcatcatctcgatggaatgtgatcataattcagaatagttttgcttctggtttgtactgtcattataattgttcaacctccaataatggtatctgtcgagcacccgaggcattgaatttgagtaatggaattcaccataattgttcaacctccaataaagtctgtaactccaattcttcaaagcatgttttttagttcga

SEQ ID NO: 26176 - DNA, 1535 bp, Zea Mays
tcctaatgtcaaatgggaggatgttggtgggctagaggatgtgaaaaaggttattctagatactattcagttgcctctgatgtacaagcacctgttttcttctaaattgcgcaagcgatcaggtgtcctgctatatggacctccaggaacagggaaggtaggtttgaaaaggtttcatccggattcaattgtatttttgtttagctaccaataacaagtgcatccagaagaaacatgacacgagatcgctaaaataattgtcccttggacttctagactttacttgcgaaagcagtagcaacagaatgctcattgaactttcttagcgtcaaaggtccagaactgataaacatgtatgttggagaatcagagaaaaatgttcgggatatttttgagaaggtctgcacgcccatgtgtcattttctttgatgagcttgattccctcgctcctgcacgaggatcctcagcagattctggcggtgtcatggacagggttgtttcccagttacttgtggagatcgatgggttgagtgacaacagccaggaccttttcattattggggctaccaataggcctgaccttcttgattctgcccttcttcgccttggtcggttcgacaagcttctttatgtcggtgtaaatactgaggcatcatacagggaaaggatccttaaagcacagacgcgcaagtataagctgcacaagaacgtttctctcttgtcagttgcacaagaatggtttcatgcagcaaagcgatcagtgagtatttctgccgacccgttacgccatatgttgggctcttcctagctttgctccgttgatcttgcgtgtggtattttttaggttgaaacattcgaaaccgatccttcaagaagtaatgacgccagtgccgaagaagtcatcgtcgagatcgacgattttatcacagtgttaggagatatcgcaccgtcgctctctctggacgagctacaaaactacgaacagttgaggcagaaggtcgaaggaccttctagatgaagttgggtttccactccctgctgacattcttaaactgctaacacaccaaaacattccctgtcttacattttcgtttgtacacaagttttcctccctgaaaacttgggcacttctatatccattcctgatttatacaatcacatccttgtagcagcatctgtattgacatcagaatgacattttctctgaagagaaacatcctgtcattctttgttagcagctctgcaactattctgaagcctttttttttttgcagatgatgcgaatcaactttgtatagttagtttcgtcgatgtacgcttgtaccatgttgtagtaaatgataaagagaataggagtccttggatcatctgctcgtttgaaccattcagttatcagccatcgaaaatagctgtctgctatattttttttcgtcagcgacgatctgtcaggatcagggacttttcattgcaacgagtgctagattataggagtgagtatcaagttggctggacgagcgggagcgaaggggcgccgt

SEQ ID NO: 26177 - DNA, 537 bp, Zea Mays
ttcgtggccctgctcgtagcttggaggcggcgacattctccggcaatgggggtcaaggggggcgacaagcccaagcccaactaccgcaagggcctgtggtcgctggaggaggaccagaagctccgcgactacattctcctccacggccacggctgctggagcgcgctccccatgaaagccggaggagtgctcctacctggcacagatgctctacggtagggtcatcatggatgtggtcaccaagagcaggcgtgcatcgcagattcacagtacacaactctaaggtaccaatgtcaagatagctgccattccttcaagcgtcgtggttctgacttcagagacctttgactcaattgtccttgatgagttttatgccccatggtgtggtcactgcaagcatcttgctccgatttatgagaagctggcttcagttttcaagcaggacgacagtgttgtgattgccaatcttgatgctgacaagcacactgacttggctaaaaaaagtgattctctcgttgtttgacagactgtaaggac

SEQ ID NO: 26178 - DNA, 4130 bp, Zea Mays
gcggtcgagaggctactcgtacgccggaagcaacgcgaaaaaacaaatcattgtctcgcctcacctcgcctcgccccagccgccgccccagcgatccgaaacccctcttcggccccttccccactccactccactccactctcactctcactcccactcctcacgcgccgccgcctccaaatgccggcgcttcacccccaccgccggtccttccccattcccctgctacttctcctatcgctcttcgcctcctcccctctattcttctccccgagccccgcagcaaccgccgtcggagattgccctctggattttagctgggcaaatttcacactagctgcggcagcctgctctgacccaacgcagcgggcggcgtgctgccgctacatcaatgccttcgttgccatctccattgcccgctatgccaatgccaccggcaggctgggtgtccctcctgcctttgctgagatctgtctcagctccgtgtccgagacattcaagctgcgggggatccccaccgacgccgacgtcttctgcggtctgggccccaagataagggtttcgtatcagtgcgctgggcgggataccgtgttggaaatgatgcagtccccgaacttcaatgacgttatcgggagctgcaggggccctctgtcgctggatatcacctgcaagacttgcttgaattatggcatcgtgtacctccatcgcctcatcggttcagacgataatgtcggcctcagcgtgtgccgcaatgcggtttttgtaacccttgccactcaagggggtattctttcatatgaagatatcgtcacgtgcttctttggtgtccagggaatcaccacatttccaggaccggcatctgtcacatcgacaccagcatcctctccgaatgtcactgttgattctccagctccaaggatcaagagtcttccacagaagcaacaccagcactaccggattacagttattccagggataggaatcggtgttatattgtttgctgtgctgctgcaaatcgtcttagcggtactgattcgaagaaagagcagggaattgaagaacgccgaatttcccgctcggaatccagataacacatttcactacaatcaatcctggagatgccccgaaggccaatcaccaatgttccaaaggtttagctacaaagaaacaatgaaagcaacagataatttcagcacagtcattggaaaggggggatttggaactgtctttaaagctcaatttaatgatggctctatagctgcggtgaaaaggatggacaaggtttcaaagcaagctgaagaagagttctgtagggaaatggaactcttggctaggttgcaccatcgccatctcgtgaccctcaagggcttctgcatcgaaaagaaagaaaggtttcttgtgtatgaatacatggcgaacggaagtctaaaagatcacctgcactcatctggaaggaagccattaagctggcagacaaggctgcagattgcaacggacgtggccaatgctctggagtatctgcacttcttttgtaaccctccactttgccatagggacatcaaatcgagcaacattcttttagatgagcatttcgttgcaaaggttgctgattttggccttgcacatgcatcaaggaccggagcgataagctttgaagccgtgaacacggatatacgaggaaccccagggtacatggaccccgaatatgtggttactcaagagctgacggagaagagtgatatatacagctacggggtgcttcttctggagcttgtgaccggacgtagagcaatccaggacaggactaacttggtggagtgggcacagtcgcacctctcgtcgggagcggtctctcctgaacttgtagacccgaggatcaggggcgctgttgacgtggaccatctgcatgtggtggtgggcatcgtgcagtggtgcacccatagagaagggcggcagaggccctccgtgaggcaggttcttcggatgctctcggagaggctggacccggggaacggcagcttcggcgagggcatggaagacgcggagggcggcttctatccccggagcagcaggtgcggcggcgcacatcaccggaacgagctggtcccatacggcggcggtgacatgaggtctctgcattcctcgtcgagcacgaccaggtcctcttactgcagccgcagcatgctgctggagagcgggcagactcaatcgcccccagaaacccagtgatgaatgaatgaatctagttagttcataggcaacttgttggtggttgctgttatttattattatttgctgtttgtttgttttgtaagggggaaaaaaggaattgtcaagtggtcattggaaggaaccagtggcggcagtgaatgagcaaagcagcagcacatgttccatgtggttgttggtcatcatgtccctctttgggttttgagttttgactgggatctgtgaaattgcttcaggttttttttttttgactagcaaccatgttcagtgcagttgaccaacaaccatgctctgtagataattcaatcaaccgtcgcaaaaaaaaaaacatggtgaaggtggagatagaaaaggtggcgggtggcgaatggctttgctttgctttgctggaccgacacagacacaaacacaggaggggaggactggactggacagccagccgcgcatgaactggcgaggctagtctgtctcgcaaccgacggatctggggcacatgcttgtcctgcgcaggcagtggtatcgtaggttaaggccaccccaagcaggagtctgcttccgttccattgcatcccagtcccagccaaagcaggatgccgcacgccaagacggactcggaggtgacgagcctggcgccgtcgtcgcctccgcggtcgcctccacggacccgcggcgccgtctactacgtgcagagcccgtcccgcgactcgcacgacggcgagacgatcaaggcggccacgtctgtgcactccacccccgcgctgagccccatggcgtcgccgcgccactcgcactcccactcccactcgtccatgggcagggactcctcctccagccgattctcgggccacggccacaacaagcgcaaggccgacaagggcggcagcaacaagggcgcgccgggcggcaaggggtggcaggagatcggcgtcatcgaggaggaagggctcatggacgaggaggaccacacgcggatcgtgccccgcaagtgctactgcttcctcgccttcctgctcggcttcgtcgcgctcttctccttcttcgcgctcgtgctctggggcgccagcaggtcccagaagccgcgcatcgtcatgggcaccatccgcttcgacaacttcatcatccaggccggcaccgacgcgtcgctcgtgcccaccgacatggccaccaccaactccaccgtcagattcacctaccgcaacaggggcaccttcttcgggatccacgtcaccgccgacccgttccagctctcctacagccagctcacgctcgcgtcaggagacctccacaacttctaccagcctcgcagcagcagccgcaccgtcagcgtcgccgtggtcggcaacaaggtgccgctgtacggcggcggacccacgctgacggcggcgccggcggccgggggcaaggggcagcagcaggccagcgccaaggtggcatcggtgcccatggtgctgaggaccacgctgcactcgcgggcctacgtgctgggcgcgctggtcaagcccaagttcacgctcgccgtcgagtgcagggtgctcatgaacccaaacaagcagaacaagcccatctcgctcgggaacgcctgccactactcatgatatatttagcctctcatactagctgctcaacatcaccatgcccatgcatccatctcctacctacctctcaattgtactgtaatggagtatttattgatttatttatgctttgcttcgtcttctcttctctgtattgattttctttgttcattccttctacctttcgtatgcatattttggggttattttcgtctattttaatagtgatgacggtgaggctaggtatgtctttcaagagtcgtcagaaggcggaaactttacatgtaaactcaaaacatttaatctaaattatggaatagtccaatg

SEQ ID NO: 26179 - DNA, 3523 bp, Zea Mays
aggtaggcgtcgatgagtagtactcagacgccgccggcctcacgctgctgctccaggtcagcgccgtcccgaggctgcagatcaggaggtgcggtgcgtggatcagcgtcgaccccatccccgcgtgtttcgtaatagcaaaaatctccgtccatcagggaggtcggtcttgcagttggagttgggcacattcgcctctatcgggcgggcacattccctccgtcccgtgacttccaccttccttacccttcgtatggtgggggcccacctcgccgcccccaccccccgctgcccttctctcttccccgtctccgactccacacacctcccctttccactcgccgccggcgatcccgaaccgggagcagcgcacatggcaggccgggacgagaggtggggggcgcggggcggcccgggggacacgcacgcgtcgacgagccgcgcacccgcgggcaccgccggggagtcggagggcgcgtcgccggactcgctgcggaacacgccctccaacatcgcgcggctggaggacgcgatcgggcactgcgcggcgcggcgcaaataccttgcgcacaccaagagcccctccgacggcaaggacgtccgctggtacttctgcaatctccccctcgccgacaaagagggaggaagtgctgcttgcatactggtggcgtgagtatgctgaatgcagtgcaggaccgagaggatccttggttgaaagtgatgattctgcatatctttataaggtggaggaagaacgggttggggttcctgtgaaaggtggactatatgaggttgatttgatgaggcggcattgcttccctgtgtactggaacggtgaaaacaggcgtgtcttgagaggccactggttcgctcgcaaaggtggtgttgattggattcccttgcgagaggatgtttctgaacaacttgagttagcatataattgtcaggtctggcatcgtcgaaaatttcaaccttcaggcctatttgcagcaagggttgacctccaaggaagtacactggatttgcatgctctttttactggagaggatgatacttgggaagcttggcttgtctttgatacgggtcctaagcttggtagtaacacaatcaaattaaggcgcggattttctccttctgaatctgcaagtacaaagccttcacaggatgagttgcgtcagacaaaagaagaggaaatggatgattactgctctcaggttccagttggtcatctggtattcatggttcatggcattggacagaggctggagaaagctaatcttgttgatgatgttgttgatttccgccgagtaactgctaacctagctgaaagatacttaacttcttatcaaagaagtacccagagggttctatttattccctgtcagtggaggaagggcttgaaactcagtggtgaaagtacggttgagaaactcactttggatggagttaaaggtcttcgagtcgcattaggtgccacagttcatgatgtcctatattatatgagtcctatctactgtcagcatattattgactcggtctctaaccagttgaacaagctgtacatgaaatttctgaagagaaatcctggttacagtggaaaggtttcattgtatggccactcattaggaagtgttctgtcgtatgatatactttgtcatcaagaatcccttttggccccatttccaacagagtatctgaacatggaaacatctgatcgaagtcaaggagcaaagtcagccaatgaagttgctctgcatgattcaggtgcaaaggatcatgatacttatactctagggcattcttgtactggtaatgaaaacagtgccgttgatgaaggtagcaccagaactgacatgtcacatatggacagcattgtcccatcatgtgtgctcgaggattcattaaataacccagaaactggtgtgccacgtggggcagttgttgctgagcaaaatgaaaaagaaaataggattgagaatcatcagacggtgtatactgaggaaggaacaacttcaggtgtaagcacaaaagatgctgaagcatcacacatttcaagatctgctgaggatgtccatgaagaggtccttgacaaagaaaaaatgatcatttcactagaagaagaggtgaaacgtcttaaagctaaactagatcagcttgaacagcataagcatctagtgactgagagcaccagtggtgttgagtatcatggaggcaaaaatggcaatcatgccttgaactttggcgaacttttcactgcacaaggaagtataaaccagccctactcaccacaaatcaaatacacaaaactaaactttaaggttgacacattctttgctgttggatctcccctgggtgtcttcctttccctgcgtaatgtccgtattggtattggcaaagggcgagattattggaaagataagaacataattgaagagatgccatgctgccggcagatgttcaatatttttcatccttttgatcctgtagcatacagagttgaaccacttgtatgtgaagattatcaaaagaagcgtcctgtaattgttccctaccatagaggcggaaagaggatacatgttggagtgcaggagttcacagaagatatttctgcacgttctcaagccattgcctgtcaattgaagtcactgaaggtcaaagcagtagctgctttgctagcattgagcagaaatgacacagaagaggatggtgagagtgctaatgaggaaggaagatcgtatggttccattatgatggaaaggttgaccggctcaccagatggtcgaattgatcatgtgcttcaggagaaaacatttcagcattcatacctatctgctctgggagctcataccaactattggcgagatcatgacactgctctcttcattctcaaacatttgtatcgtgatatacctgaggatcctccaagcgatgtcgttgaaaggatgcatattaaactgttttatgagagagatccggttgaggaagaaacgcccgtgacattttcggaccatgcagcaattaaggagttctgcagaaaggtgagagcctactcaacaaaaatggaggatgatgccaactgctaagcctcttgatggtgtcatttcctgatggaaaccatgttacatccccacgttcctcgccaagaaggaagatgcaggcatgggaagggagaacgattccacaaaatcgtgatcccaggataagaatcctaagaaatgtagttccacgcttgacaccagaatcaggacacttgagaaacgttgtacagagtcggttccccatgttgcttcacttgttcccgtcgtcaatgcagtgctgtacagagaacgtcctgctgtacctttctgtatatgtaatcttgcgtgctgtgcatacagaatatgatggatttagtttcaaacgacagcttacagcgacaccaggctgaaacgaagggactcgtgagagaaaatccataataatttagagacattaataacacagaacacctagctttcaaatgttgtgatgtcacaaagcttcg

SEQ ID NO: 26180 - DNA, 1717 bp, Zea Mays
gcgttatcacgagattcgtccgagcgacgacgtctcgacagtcccgggccgctgagatcttgccgcgggagggagagcagcagcggcagcatcagacatgtcgtcggggcggtacatggcctactcgccctcgccgtcgaccaccccccactccccccgcatcgccggcctccgcgccccgtctgccgccgtggccgaacaggagaagtaccttgccgaactgctcgcggagaggcagaagcttggcccgttcgtcccagtgatcccgcatagtgtacgcttgctgaatcaagagttcaccagcttatagctggcttggaggatcccagggcagctcctctggacttattgtcaagaaaacaatgaaggtcgatatcccagtagacaaatatccaacattcaatttcgttggccgcatccttggtccaagaggaaattccttgaagcgggtggaggcaaatacggactgccgtgtgctaataagaggtcgtggcagcatcaaagatccagcacgggaggaaatgatgcgagggaagccaggatatgaacacctgaatgaacccctccatatattggttgaggcagagctacctgttgaaatcattgatgcgcgcctgatgcaagcccgcgagatccttgaagatctgctaaagcctgtggatgaatcccaggactacttcaagaagcagcagctacgggagctcgcaatgcttaatggcacccttcgtgaggaagggatgcagagatccggttcagcgtcccctttccacaacagccttgggatgaagagagccaagacaagggggtaatgaacaaagctgcaagcatcatgaaggcagaaccaaatgaatctattctgagaccgatcctgtgtgcacatgggattgccttgcttggctattgtactggcccagtacggcctcgagccaccagcatcggggcggccgtaccctgataaaacatatatatctggagttgtgtttgctgctaccgggggagttcggttatgcgccataggttgttcgctatatattgggttgtgcgggattttgtagcaatgtggtttgtgtgatgctcatttggagcgtttgagagctctcggctcgtatttctcatcaagatagtatttaagggcgctgtttgggattttgaagcaatgctctaactgtctctgtacacgacaaacatggaggcttgctatatttcatgaatctctcgtttgctgctatcaatcactgatgcatactagtaaagtgatggcgtcttcagttgcatctgcagtttggattctgctttgctgatgcaggataatttaagttgataactcgaatgttgtgctgataccggctagttcagctaccaactacttgttctaacgataccctgtcctaaattaaaatttattttaggatgttaatggattttggaatacttatgtagattcgtcatcatttaaatatgagtataaaattaagagctaaaaaaatactaatttaggatggggagtaattagtaataaaaagttgcaacaaggcctagaagaacgttgagctaccgcaattgagatgtccgcccaaaaattcgagaaaaaatacaatataccgatccgcattttagcagcttgacccagtgggcacttggcaactcctgaataatcctgatcgaaagccgagttgttgcctcaaatccctcaaaagcacgctaattccacatcgtc

SEQ ID NO: 26181 - DNA, 1154 bp, Zea Mays
agcgctaaaacaccccctcccgtcccgcaccgacgtcgacggagacgtgtcactggcggcgttgagaagacagaagacttcagaccttctagattttttcccggccgcaatggatctctgggagagggcccgggccttcgccggcgaggcggcgaattggtcgcaggagctctccgcggaggcgaccaagcgctcgtctgcgctggtctcggagacggcgaagaagtcgaaggagatcttttccgagaccgcctccaagtcgctggagatcgccgccgaggcaaccaagcaggccgacctcctggccggccagatcaagcacctcgcctccgacatccccgtaccctcgatcccacccatccccgcgatcccacctatcgccgccactgcctcgtcggagcccgacgcggccgagcttgagcgctacggcatcaccgacgacctccgcgagttcgtcaaggacatgaccataagcaccttccgcgacttcccactgcaagatgagcctgaaatgtctgatgtgccaacggtgtcgaatgtgcgtcaggatctgagcgaatggcaggccaggaaatatcgaagttcagatatgagctatgcccaagatacatgaaagagcgcaaattctggcgggtatattttttgctagtaaacagctatatagccccgttcgagaagaaatccttggaggagctgaaagtgaaagcagaggaagagaaaagggattcccagaagcaagcatcccaggcatctacaactttcgaacccaaagacacaaaagcgccaatcaagacctcttcaacaaatccagaacatgatctggatgtatttcttctgggagatctgggtagcgacgatgagggacctgttgatgatgatgatgacctagatgaggacttcgataagattgatgtgaccacgggattggaaagtgatgacgatgacaaaaaaatagcaacagggaaagcagaagatgcgaagtagtagcctatggttttacgattcgacagatgaccacaatgatagcgaactttagtattccaagatggagttttctgcatatgtactagtctatctattgaattgaacttcagtacgactactcgaggctacaatttacatgaaataccggtgtgtgaagaatagaagataat

SEQ ID NO: 26182 - DNA, 752 bp, Zea Mays
acctgaactattgcgctcgtatcttcttccttgtgcgcgtgcagccgccgtgcttgcgggttgcggccctgcctctctcctctccggctctcccaccggccaccggccaccggccgccaccgtcgccgccatgccttttcgattccagttcccatggctcaagaacccaactacaaacggcggcacctccaacatagacactaaccctagcccccgcttccccaaccccttcctccctatccaagcccatgtcacctccttcctctcctccttcccccgggcgctcccgccgccgccgccctgggcgcgcatcacctcgccagcctccacctccggggccctacctacctctgagatcgaggagcggctcgccggggtgcccgtgtacgcgctcgccaacgccgcccaggagttcgtgcttgtgtcgtccacacgcgtgggagggcaagggggcgagagcgtgagtccaacgcaggcgctcgggctgctctgcttccggaaggaagatgctgacgcgctgctggagcagatggatggcgatatgcgcgccggctctggtgtcgttcctgtcgcgctgaacaaggttatccaaatgaagtcggatggtgtggcgtttagattcctccctgattcatctcaggtggctaatgcaattaagttgatgcaagatgaaggactgtatgccggagagggatttccaggagtgccagtttttcagaaatctctactggcattgcttttttttgttcctg

SEQ ID NO: 26183 - DNA, 3109 bp, Zea Mays
ccagtcgttgccgcttggccgcctgctcagtgctcaccacacacgtccaaccgcacccagacacccatccttatatacgcgcgcagcttaacgtacgcggtgacgccgccagcagctcgctctcgcaccgaccgtcccagaaatatctcgtcggcggtcagttgagctgcgagcaaccatcaaccaatcaaggacgacgacgcacggatcgatggccacgctctcctcctgcagccgcctgagtagcggcaccggcgccgcggctatccgccggcagccgaagccgacccgtgcaggagtcctgttcaccagccggcggggctcctccgcgagcgttcgcacggccgccgccgctgccactgcggcgccggccgccgtagagcagcagaacacgggggtgtcggtgtcgctgccgacgtgggcggagttcgagctcgggcgggcgccggtgtactggaagaccagcaacggcctgccgtcctccccgggcgaggggctgaccctgttctacaacccggcggcgagcaagatggccccgaacgacgtgttcggcgtggcgttcaacggcggcttcaaccagcccatcatgtgcggcggcgagccgaggcagatgacgctgcaggtccgcgggaaagccgacccgcccatctacaccatcaggatacgcgtgccgcagcacgcgtcgttgcgcgtgcagccacaagcttgatcttctccttcaccaacggggccgagtgggacgggccgtacaccctcaagttcagggtcccgaagccatggcagaagaagccgctgagcttcttcaacgagggcctggcggacgagctcaacagggagggcgcctgcgacctggccatctacccggacgagaacatcgccatcaccagctgcgccatggacggctacctcgacgaggggggggatcggtgcaagctggatatcgtgagcgggtgcacggaccccagctccgacatgttcgacccgctggccaccgtcgacgacggctcctgcccactcgagtctgattccgaggaatgaaggagcttcagttcgatccttttttttgtggggggcaaggaaacgtggtccatacatcttatcagtgcaagtttgtgatcatgtgatacatgaagcatatacgtgtacgtatttcaccagactacctgcaccggtgagcaagatgatctcctacttgcaccaccattagagcagtggatatgatctcatacttgcgcgttgcactagtagagttgtggatacttaggatccatcattgcaaactctgatacaaaccagtgtaagctgagctgcatggattgcagatctgtatacctacggctcatgcagctataccgtcctggattgtaccacacaatcaatattatcaaatgtaagatacgacttggagggaagcttataaagacttccccgtgaatggaagagcaatcggttcatgaatcatcggagcacagctctcaaccattggcataaacaacactgatcacatccagtgtcagatattaggcacacaaagcacgcatttggctacgctgcaactgcatgtctgaaactgaaacaaacaaaaacaagcatagcgcaaccaacaaccatgctagcattacggttccagagttcaaggcaaccacagacgttaagttaacatagcatcatttcgtcttggttcattcgctacagtatccactcatagtggcaacgaagacttgtaactacaggaaagacccactgcaccacataccctttccatgccaagtagatccgcgtcttcagtctccaccaacctggcgtttccaggagtcctccacaatgagctcgtctactccccagtcttcatagctgttttaaaacaaagtaattaaagatgactacattgtaaaagtattcataaaaaagaagtatgtgcttttccatggaatctcaccttccatcaggtaagtaccgtctgatcgtgaagggtatcttgcgcgctctcagctccttcattgcaatctaaaattggtcagtttcaccctcaagctcaaccatgactggagcattcatgctgcaaaaagactaaggttagtattaggttggaagataggttttttacatgttcaacactcaaaattattaaccttatctgcaaggctcgtgtacccaggatgcgcgcacgttcgtacttcgtcatgtattttgttgttttgcgttcacgcttggtcttttcctgttccttatcttcaccctcaccacctatgacgtcatcaggggcatcttcgttgttctcaggctcttcttcagctccttcctcaatctccggttctgggggctcatcctcatacctgtataacaaaaagaacaataagattgtaaatccaatgatacaaccatgtgaaacttagtgtataagtaaaaagtgacatttgagtgatcagaagaaccacaaagaagtggtggtcaccgttttttgtctaccaacataaataccccttagtttctctaatgtaaatatttacatgaaacaccaagctaagtgattaaagccacctgacaagaatttgatccaataatttatcacatagttctaaccaaccaacttaccctatattattgccacagttcgaaggaaggtgacaaatatatacaagtggcactcttaaattcctaaaatagatgacgaacaaaaggtgcaggtatctcccttcactggaggggagatgtccgataccaaggagaggagatgcgtgataccgaaaccacataggggagctgtcatcctaactcaaggataaactcggtcaatcaactaaccatcgcaggcaccttttattgacgaaaaccgatatgaataattccaacaaaaccgcccagctttcatccctaaaaacgctcctccacccccgaccgccactctcacaagcagcgataaatcaatcacaatcgacccattgctacatataaaccaagagaaagagagaagatgcgctccgtcgaggctgagcgcggattaacggagattatgcctgtacaaataaaacctaataattctccgctaaccattgcgcgcccaaacgaaacaagcaccagagggggggaggatgagggagagatcgac

SEQ ID NO: 26184 - DNA, 1447 bp, Zea Mays
atcacgtgtctcgtcatagagagcactacatactagcaagtaccattggaatagtcatcggtgtcttttgggcataaattcttgcgctttatctacattttgggctttggagtcatcttttttttcctgtcgagaatctaggggttagggattattcatgaccggaactttgacgattgtcccctagctgggatggtattgtgctgatactgtcatcttgtcatttcttgtttggctgacctacactgaatattttggtttcatgtttctatcaaagttgtttagcatagaaacgaatctggagattacttgtcggttcattgggtattaattcatcataattatatggcatggattcctagaccaaaatttgtgtaattgtttattacggaagcttggttgttaaagtttacaactgtcgaacagctttagcacaagatgacaagagggaatgtggaaagataatgcctggatagataatagtttctggagcatctattggacttggcattgtttccatgggttttggaagtaatgaatgacatgcatccataagacgtattttgatattttattgcaatgccctaacagggtttggaaggatctgtacaggagcatactgaaagatgctggaacctcatcagacaataactgatatcgggcgtacagacacccgccagttcagaggcatccgccacttcatccagaccatctacaagaaaaacggcatcagaggcatatacaggggattaccagcatcgctccacgggatggtcgttcaccggggcctgtactttggcggcttcgacactgccaaggatgtcctggtccctttggagtcccccctgtggcagcgctgggttgcagcccaggcagtgacatccatggcagggctcatctcgtacccactggacaccgtgcgccggaggatgatgatgcagtcagggatggaggtgcagatgtacagcagcacactcgactgctggaggaagatatacaggctggaggggatccggtcattctaccgtggtgcattgtctaacatgtttaggagcactggtgcagccgccatacttgttttgtatgacgaggtcaagaagttcatggacaggggtaggttgtaacagctatagaggggtttctttcacagaattttggattcgatatgggaagtgggattaggccaaaaggtgcaaggagcagcagctcgagcattttgtaactggatgctggtttcctcctgcttactaacctgctcgatgtaaccgagcctgaaggttctgactcgcgaacaatgcagcttgttcagttcacctcatctttacctcttcgaggttccacttatgggttgtttgttgcctgcacggaggggcctgcgccatagttaaacccataatcacgtacttcattcttttttttatttgtcttgttttagtttaaaaataaa

SEQ ID NO: 26185 - DNA, 4399 bp, Zea Mays
gaagattgtgcctatatcgattgttctagttttgaggcaaataacatcccacggtctatccgttacctatccatttccatgcaagatcattgtgctcagaatttcgaggaacaaatgggaaaactgaaagaaaagatatacattaacaatttgcggagtttgatgatatttggaaaatacattatgttacatctgctcaatattttaagggacacatttaaggaaataagacgtcttcgtgttctatctatattcatatactcccatagttccttgccaaacaacttttcagagcttcttcatctccgctacttaaaacttttgtcaccttattactcagaaatgtcattgccaaacacggtctcaaggttttatcacctgaaatttctagatcttgaacaatggggaagtgatcgttctttgcctaaggacattagccgccttgaaaatctatgccattttgttgtttcggaaaagattgattccaatgttcctgaggtggggaaaatgatcttcttacaagaattgaaagaattccatgttaataaagagagtgttggatttgagctacaagaattgggtaaactagatgagcttggagggaagctcaatatatacgggcttgaaaatgtgagaaccaagaaagaagctaaagaggccaagctgatgtcaaagaggaatttagttgagttgggattaatttggaacatgaaacaagagtccaccgaagatgatatcctagatagtatccaaccacactctaatgttaggagtctttttattgtaaatcatggtggtaccctcggtcctagttggttgtgcagcagcgacaccatatacatgaaaaacttggagactctacatctagagagcgtatcgtgggctaaccttccacctattgggcagttctatcacttaagagagctaaggctgagtaaaattgttggcatatcacagattggacctggcttcttcgatagcacgacagaaaaaagtgtctcacacttgaaggcagttgagtttaatgatatgccagagcttgtcgagtgggttgggggagctaactggaatctgttctcaggaattgaaagaatcaagtgtactaattgtcctaggctgacagggttgctggtttcagattggtctatttcttctatataagacagcactgtatggttccctaatcttcatgacctttacatttatgaatgcccgaagttgtgccttccacccttgcctcacacttcaaaggtatcccgtattcatatgggagacttttcttatgaaggtcgtaccatgttgaaaattaataacccctctagatttgccttcgaaaatctgggtgacctagagacattggtagcttgggatgcactacccttgtcctttatggatcttaaaaagctacattccttgagacgtataaatgtcactagatgtgaggaaacatttttgagaggactggatgatggtgttgtgctacccacagtccaatctctctaccttggacgatttacacctaccaaaaattatttgtcaaaattattcaaatgttttccagcactttcttctttgcatgtgatggcatcaccatcagatgaggacaacgaggaagtggtactgcattttccaccctctagctcgctgagagatgtcaacttcacagggtgtaagaatctgatcctacccatggaggaaggagctggattctgtggcctctcgtcgctcgagtcagtgaccatacacaaatgtgacaggttattctctcgatggtccatcggaggacgagcaactcagactcagagcatcatcaaccctctcccaccctacctgaggaaactcttcctttcttatatggaaactctgcctcaggaagctctgctcatgaatttgacatctcttgagaaactcacactatgtaattgtcttggctgtgagcaaagcaccgagcgaatggctgtactcgcgaatctaacatctcttaccacgctatatttatataattgcagaaatatcacaatggatggattcaatcctcacatcacatccagcctcaagtatctatgcgtgtacaatgagagaaatgatggaactgatccgtattctgtagcagcagatctacttgtagcggtggtgaggaccaaaacaatgcccgacgtttccttcaaactggtgggactttatgtggacaacatctcgggagtgcttgttgctcccatctgcaagctgctctccgctaccctcgagacgttaaacttcagtaatgattggcggacagagaacttcacgaaagagcaggacgaggcgcttcagctcctcacgtctctccaattccttgagttttataactgcagggctctgcagtccctcccccaaggactgcaccgccttccttctctccacggaataactatctatgggcctcaaaacattagatcactgcctaaggagggcctccccgattcactacgaatactacgtataactaactgttgtgctgagatttatgaggcatgccagcaattgaagggaacaaggccagatataaatgtacttgcctccaaagctcgtgtgcaaaattgaatacctgcttctgcatgtcttcacagtcagctctgcttcaacatgcctttcactctacaggtaaatactgtgaaaacatcttcctatacgtgagatagttgatcttcatcgattctacagccaggatgatgtcttattggatgatgtgttggtcatggttggcacaaaattcagtaggtaattttcataatgtttaatcaaccaatttaatttcttctacaatttcaacttttggcgttcaaggcaataaacgagaacaagcatgggatgtggaaaattttagaaagtaaagacaagtgaattcttgacgacgttggcttggcaccttagtttgagtacataatgaaagaacaaccttttagcaaccctggagcatctagaaaatatcaggaagggctcacaattgtggataataaggcatccagtattatagaggaaacaaaggaaattcaaattagacggaaacctgctagtccaagttcttatatgccaaattcatcaatttgcatcctactggagacattgctggcagaggaattgagactggcataggagaactcaatatatgcttgtgaataacgcatccagtgaaagatagtagattttcatcaattcactacccaggatgttgtcgcattggatgagaatgacatggaagacggcgaactagaggaagacaacaacctcatctaagctgaaaatgtgttgcctgtggttgaagaaaatctagcagatgaacaacactgccttccctgtcctctctagacctgaatctctctgatggtttggattcgtccatgattgatcctgtacgatgaaggatcagctcgtccaacgtttttcaaggaacgaactcaatctgaggaattaccttttcattggtcacctggggtactacgaggaatgacttcacgatagacgactcggttttgcgacgcaaaccaaacgccatggttaggctcagatgttggatcagatgattcctcgtggcttcgtgacgcaaaccaaacgacatggctaggctcagatgttggatcgtatgatttctcgtggcttcgtgacgcaaaccaaacagcctgtaagtccgcacaccttatctatcatggtcattgttgagctgatcagtaattggagtcgtgtgataagcttaatggacctcctatttgtcgtgatcttcacagatcaacaagtgagcggcctttgcatgctgcatgagatcaagcaagccgccgactggcaatgctccacctgccattcagttcgttggtgaggtattaatcaccagccatgttggcacttggcggcatgcagatggagcagaacatccaggtgaagcggacagatacatgatcgatcatgagttggcgcagacacaggccagacaaccagaggctatattccaattcatacattccatgataagcaaaggaagatccaagacaacacaaatatacaaatagttagttatacaagcaaaaatcctgttgttttgtgcctcccattttctagtccagaattaatatgacaatttttcactgaaactggttggatcagagaccaggaaaaaaagggaaatgacaactacagctgtgttttttttttcaaagaaggcagctgcccgtcgatgatgtgctcacttgaggatttcctctgccttttcagtgacactgcttcatccttttcagagtcaaatgaatctctacctcatttcactgcacatacttccaaactgatttgctgtaacatacttgagtttcggtatgacattaatttttaactcataagagaacaaaatcagaagaaaaaaaaacaacaa

SEQ ID NO: 26186 - DNA, 4360 bp, Zea Mays
acaacccccgatgcgatgggtgcccctgcccctcgatagccgcgccgctctcctgcccccgttccccatttgcatcctcgtccacctccctgccctagcaccgtcctcccctattcgacccaacgccgccgccgcctccgccgccgcataggcctcgccgcggcctctgctccgccccgcggcctccggaggttctactcgcgcgcgatccgccgctgcgtccgttgctccgccatcgattcggtggcgcgtggagtatgtctctggtgcaagagtgctgaagatgaaggagaggagctctttatgcgaaagtgcagccgatggaaactggggtttgaaatataaaaggaaaagaagcaagttaacagttagcccatctaatgagaatgaggctacctcaccaacatctgactctcgaatgagccatggttccaccaaaaagaagttgaagcatgacaataacatttctccatcagccaagaagataagagggcacgatgggtattttttcgagtgcgtagaatgtgatcttggtggcaatttgctatgttgtgatagctgtcctcgtgtttaccacttggaatgcctcaatcctcctcttaagcgtgcaccccctgggaagtggcaatgtccaagatgccgtccgaaaaaagttagcttgaagctgttaggtaatgcagatgttgacacttctaaacgtgaaaaaagtacaaggacatatgcaagtacggcatcagatagtccaccttcgcatacaaaagtctcctttaagaccaggaactccacacaagacaaaactggattaaacgaacaaggaaaagagtcatctggtggcacaatgaatgggggtgaaaccagtacgaagaataatgaagttgagaaaaagaagacactgatattacatttgaagaagcgttcaaccaaggaattgtcagagaacactaaaccctcgaagtcagaatttgttgaactttcagaagagaaaattgtaaaacatggaagtgttttgaaactcaagaaacatccacatcgtatggacttgtctccaagtaaatctaaaaccaggaggcaaagtagccagagagagagtaaaagatctggcacaaaaaagattaaatattccatgtctgatgatgacagtgtttcctcatcagaaccatcgacatctcttgataacagtgaatcaccaccaaaaagaaaacactcagatggaaaagcaccttcatccagtaccaagaaagggaaaaagaaagtgaaatttgttgagaaaaagcactctgaggagcagggcgtggtaggtgacaaaatgatgactacccaggaggatcagcaggtcgatcgcatcctaggctgccggcttcagatgagccaaatcaacccgccgtcccatgcttcattggagcagtttgaatcagctaatctccaggtggatggtatggttcttccacatgcttccgctggcattcctaataggcctcatgatggaacagagtcttctagaaatggtacaattgaggatatatgtgctgatgaatcagccaatcatagtggtcacaatttagaaatgcgaaaggatacggacagtaaatcccatgaaaaggagtcacataagcgagaacaagtcaagaagatattatcagtatgttctggtgatgagaccaatataatgaaagatgatcaagtagtcagagaaaatgtttcagcttccaaaaaaggtgaagatgagacatctgatttgccagcagaaaaggatgataccatacttccagtcaccagagcttgtacaatgatcaggaccaatcaagatcatacagatgaaagtaaacagcatgggaaaatagaacaaataacaaataaggactacaatgatgctggatatgagttcttgatcaaatgggttggaaaatcaaatattcacaacagttgggtttctgaatccgaggtaaaaatattagcaaaaaggaaactagaaaactacaaagcgaagtatggaatgagtttgataaacatttgcaaggaacagtggtgccagccacagcgagttattggtcttcgtgcttctgtagatgaagtggaagaggttttaatcaaatggtgtggtcttccttatgatgaatgcacttgggaaagatcagatgaacctaccctgatgaaatatagccatttggtcactcagttcaagaattttgaatgccaggctttggataaagatgtggtaaaagattatgcaaatgcaaggaaccgacatgagcttaatgtgttagttgatcagccaaaagaacttcagggcggcatgctcttccctcatcaattggaagcgttgaactggctgcggaaatgctggtacaagtcaaaaaatgttatccttgctgatgagatgggtcttggaaagacagtgtcagcttgtgcttttctatcatccctatattgtgaatttaagattaatttgccatgtcttgtcttggttcctctttctacaatgcccaattggatggctgaattttcatcttgggctcctcatttaaatgttgtggagtatcatggttctgcaaggtcaagatctatcattcgccagtatgagtggcatgcgggcgatgcaagccagattggcaaaacaaagagatcgtacaaattcaatgttttgcttaccacttatgaaatggtgcttgttgatgctgcatatcttcgttctgtctcatgggaagttcttatagttgatgagggacatcgcctgaagaattctagcagcaaactctttagtttacttaattcattctcatttcagcacagagttttgttgactggaactcccttacagaacaacattggtgaaatgtataacttattgaacttcttacagcctacttcttttccttctctatcatcatttgaggagaagtttaatgaccttacaacagcagaaaaagtagaggagctgaagaaacttgtagctcctcatatgcttcggagattgaaaaaagatgcaatgcaaaatatccccccaaagatagagcgaatggtacctgttgaattgacatcaatccaggctgaatactaccgtgctatgcttacaaagaactatcaagtactgcgcaacattggaaaaggtggtgcacaccagtctttattgaacatagtaatgcagcttcggaaagtctgcaaccatccctatcttattcctggaactgaacctgaatctggttcacctgagtttctgcatgaaatgcgcataaaagcctcagcaaagctaactttgttgcatttgatgctaaaaatattacacaaggaaggccatcgtgttcttattttctctcagatgacaaaacttcttgacatccttgaagattatctgactttagaatttggccctaaaacatttgaaagagttgatggctcagtatctgtggcggagcgccaggcagcgattgttcgctttaatcaggataagacacgttttgttttcttgctgtctacacggtcatgtggacttggtattaatttggcaactgcagatactgttatcatatatgattcggatttcaacccacatgctgatatacaggcgatgaacagggcacacagaattggacaatcgaacagacttctggtttacaggcttgtagtacgtgctagtgttgaagagcgtatcttgcaattagccaagaagaaattgatgcttgatcaacttttcgttaacaaatcagaatcacagaaagaagtggaagatatcattcgctggggtacagaggaactctttggaaatagtgacagtgtggatggtaaagataacagtgaagtcccaggtcctgttgctgatgttgaatttaagcatagaagaaaaactggtggcctaggtgatgtttatgaggacaaatgtattggtggttctaccaaacttgtttgggatgaaaatgctattttgaagcttcttgatagatcaaaccttccatcatcaatggctgaaagcactgacggggatttggacaatgatatgcttggtactgtgaagtcaatagattggaacgatgagctcaatgacgaccctggtaccaatgaggatactgcacctattgacaatgatggtagcgagcaggcatctgaatcaaagcaaggtgctaccaatcgttcagaagaaaatgaatgggataaacttttgcgtgtcagatgggagcaatatcaaatagaggaggaggcatgtcttggtcgaggcaaacgtttaaggaaggctgtttcttacagagagacattcgcaacacttcctaacgaagctttaagtgaggtattcaaaatgctaatggaggcgattgccttgtgtcttgggagaaggttcaaaggccgttgcagtattgtggtctggggg

SEQ ID NO: 26187 - DNA, 1313 bp, Zea Mays
gcccaattcggcctgcacggcccgcctcaaactgagccgacactcctcatcttcctcggttcggcacttcggctcgtcctcctcgcggcgaaaccctagcccgccgccatggacgatccctcctccgcctccaacaagcacaagcacaagcgggggcgcaagcccaaggcatcgccgccctcccccgaccactcctccccctctccctcggtcgcccccgctccggctgggcgccgtggccgcaagccgcgacgtcatgaggccctcgccgacgtggacgccacgcgtcctccatctccaccccgccgcggggagccgaagccggtggcaaacggaggcgatgtggtggcagtggcagagtcaggccccgcgagctgggatgaggtggtgagggtagtgccatgcatggacgctgtggtcaaggtgttctgcgtgcacacggagcccaacatctcgctaccgtggcagcggaagcggcagtactgctccagcagcagcggatttatcatcagcggccaccatgtcctcaccaatgctcactccgtggagtaccttgccaccgtcctggccatcggcacagagtgcgacattgtccttcaggatgcagttactgttgttggctatccaattggaggagataccatatccgtgacaagtggagtggtctctaggatagaaatgcttttatatgttcatggttctatagaacttctaggattgcagatagatgcagctattaattcaggaaattcaggtggcccagcttttaatgataggggaaaatgtgtcggtatagcttttcagtctcttaaacatgaagatgcggagaacataggttatgtgataccgactccagttattacacatttcattgaggactacaaaaatctagagaatacacaggctgcaattgagtacattcattctttatcaagggcacagcctgctcattctctcaatggtgttggtctttgtcctgctagtagatcacttagcacccatgccgccactatgtcaagcacaccacagttgaaagcacaccacgtcaagcacccaggctgccactacgtcaagcaaaacagaagacgagaagaactgatgtagccatgttcatgcttccactgttgaaatgcatattcagcatagcttgctcagctcctatctgctatttcaacgttgatttaaaagatgagctggtagttgtgggcttttgaacaatagttggagtgatatgaaacattagtgatctagttgtgaatgatattataattgtgatgcttttgtgaatatataattgtggtgcttttgtgttt

SEQ ID NO: 26188 - DNA, 1225 bp, Zea Mays
gagaagaatgcagatgttagcccacaggcacagcacgcaacgcaaacggtgagcgcacagcacgcagcaaaccagatctcggtcgcccgccggctctccagacggagcgagcccgttccgtcgccgtcacccagcgcgccgatggagcagcagatggtaccactctgtgtgaagagtgtgaagcgaaagaggaaaagggttgaccacagcaatattattctagcattaccagctatatatccatttccacaaaagaaaacggtggcaagtgctgcaggaaagaaaagggcagcaaccaagaaaaacactacaggaagaaacaagacgcgcaacaaggctgcacgtgcacccaagcaaggactgaggaaaggtaaaagaaagaatgctaaggctgctcatgcacccaatgacgatgcactaacggaaggacgtataggttctgtagacatatcaaatggtgcaagcaatgaacatcctgtccaagaggatcaaaaagacctcatacggcaacaacacaacttctcaaacactggagacgacattattgtggatgatcgttcaggtgatgcaaatgaaccaaaaattgttagcaatgaacaatatatttccgatgaagaagcaggcacagtgcagctaccgaaccctgccaaacaagacattctggaagcggattctgcagtggaacaaccatatgttatcaacaacgaacaacagattatggaggaacaaccaggtgtggagaaccaacaaaatgttgcagttaatcagcaacacaaaccagacgaacaagcaggcataatgcaagaacaaaacattggaaatgctttagaagaaaatgtgccagaggatcctacaggcacaatgaaggtgtacgccaaagccagcaacttcgatgtcgaaaagcttcacatgcgaagctaagggactcggaagacttgttctgcaagaaagaagaatgaggaaggacgacattgcccctgttatatttgtaaaccatatgtgtaaactttattggcatacttgtaatttcatacaaagttgtacctctcccctataaatggaggaattgtgccatgcataaattcaccgttcgagggcccaaagctttgactagctcagcctttgaggtaccttcgtgctatcatttgtgtaaagccgaaggtatatttgtaattgtcaattacattgcaaggaatgaaatgataagtgtggaaatacgaagttg

SEQ ID NO: 26189 - DNA, 716 bp, Zea Mays
cagagcaaggggttgagaacaagccataccggtttccgcctgaccccatgaaggctgctgacgcgggcagcagccccattggcggaggccgacggggacgcctccggcggagaagcggccgccgcaaaacggccgaacgccgtggagtcgctcggcctccacggcggcgccgcgtcctcccgctttccgcagctgccgccactctcctccatacccaatcagctagatcacagctcttgaagctcttactgaagagaaccttcgcctccacctccaatcgcgacgatcacagcattcacgggagcaaccgagcagcggccggaggaatccagctccatcctatgcggcggcggccattccaatgctccctgatccaactcctctccggtcaatcggaattggggcaaggacggacggccaagccggcggggatatctactacaggttggactggactggacgccggatttgggatccctctgtaggattagggatttgggattgggtctggactctggaggaggaccgccgcgtgcaagagagaatcaacaacagtcgcagtccaatccaatcccctcgtcgatttcttccttcctcgcctctctccgcctgtattttcttctattctttccttgcgggcaagatatacttccagatttaattagctgtgaatcccattattaaataattaacgagacgataatacgagcctgcgc

SEQ ID NO: 26190 - DNA, 2740 bp, Zea Mays
cactgctatcgcacgtgcttcccgaccaaccgccgtggtcccctcactcgcggacactctccgggcgcccaccacctccgcctcttccgccgccgtgtgtgccggcgacgatgccgcgcaaggcctcctccaactcagatgcgcgggccaagtcgcggaagcggaagcgcgccgccgccagcgcctccccgtccaagcagccggacgaccactcagacgactccgacaccgccgcggcggcgaacggcgacgatgagacgtcccgcgcagcatccgttaacgggggcggaggaaccctagccggcgtcggcggcgatgacgaccccgtgctcgaccttcgtgcggcggaggtgctctcctcctccgccgagcccgtttccgccttccccgccgccgtccgccgtgccgtgagccggcctcacccctcggtgctggctgtaatcgccgccgagcgtgcggcggccagttccgacgatgctccggtcaccccagcctcggtacccgttctcgagaatatttcgcacgggcaactccaggtgatctcggcgatgctgcccgaccatccgtccctgtcctacgaccctgacaagccgtccacgtatgtctgcaccccacctccactgatggagggatgcggagtgcacaaacagttctatgacaaacttcacatcgtgcccaggcactcagattggtttgtgccacagacagtgcacaggttggagaggcaggttgtgccacagtacttctctggaaaatctcaggggcaaacaccagagaagtacatcatgttgaggaacaaggtgattgcgaaatatttggagcgacctgggaaaaggcttgtgtttgctgagtgccaggggcttgtcacaagcacacctgaattgtatgatcttagtaggatagttaggttcttggaatcttgggggatcattaattaccttgcaacagggtcagtgtaccgtggcccgaggacggcatcatctctgatcaaggaagagacaacaggggagcttcagctggtctctgcaccaatgaaatcaattgatggtttgattttgtttgatcggcccaaatgcagtatccaggcaaatgatatatcttcgttggtgtcaacttcatctgctccatttgtggttaatcatgacggtgattcagcaaatttggatgagaagatttgggagcgcttatcagagagttcttgtagtttctgctcacaacctttacccagcatgcactatgagtcacaaaaggagacagacattgctctttgttcagactgcttccacaatgcaaaatttgttactgggcattcaagcttagattttcagagagtggatgcgatgaaagatggatcagacactgatggggacagatggacagatcaggaaactttgctgttgttggagggcatagaaaagttcaatgataactggaatcatatcgcaggtcatgttgggacaaaatcaaaagcacaatgtattcaccatttcattcgtctcccggtggcagatggtttgttagagaacattgaagtgccagaagcatcccttccatctggaatgcaaagcagtggatttttgcattcagattccaatggcagtacttcaggtagccaacctggaaaccagattccattcattaattctgctaatccagtcatgtcactggttgcatttttagctgctgaagtaggaccaagagttgcagcatcctgtgcaagtgcagcattatcggttttgacaagggaagattccagaaggcattgatgctatgggccatggtactcatctcaactatggaccctcatcatccatttcttctgaaactgtgaaaaatgctgcaagctgtggcttgtcagcagcagcaacaaagtccaagctttttgcagaccaggaggagcgtgaaattcagagattatctgccaccatcataaatcatcagttaaagagactggagttgaaactgaagcagtttgcggaggttgagacaatgctcttgaaggaaagtgagcggttagatctgatgaggcagcagctggtaactcagcgtatccggatgttatcaacccggttcacttccacaggtggtacaatacctggaggcagcagcggtatggtttcaaacctgatgaatcaggccagcggccttagaccgccgctgatgatgccaggctcggtgacccagtccagcatgccggcaatgtatgcaaataacatgcaggggcatccccagatggctctgctgcaacagcggcaacagatgctctcgttcggacctcgtttgcctctctcggccatcaaccccggctcatcctcgtcggcacccaacatgatgttcaaccatggcatgcccaactcggcagctcctaatcatcaccctttgctgagatcaccctcaggggacaattcaaatgtaggttagtgagatgagtttttcatttttttgggtcttagattcctgagctgtagcccttgactcgtgatcattaaccattgtaattcgattgcacaatcacatatagaggttgttaccagcgataggttctcattttctcttaggctgtggaccgtgtgtgcgtgactgtttgctcggatgagattgatgttgctagtggcttaggcgatgcacagaggatgtagagtttctttcaccctgactaattgttattactgcgccaccttagaatgatgtaaaaaatgaatccgcatgaattccccattcttcatcttggtttgcatct

SEQ ID NO: 26191 - DNA, 2811 bp, Zea Mays
gcgagccaggggagagaggcagcatcggtcccgcgccaactggccagtctggctggccgcagccctagtggctagtgcagtaccgcctccgggaccgcgacccgggggaattggttccacttccacccatccccgtgtgtttccgattccccccgttcgggagcagagcatccgcgcgcgatggccaaagatggtggcttcgccaaggcgctgctgctccacgtcgccgcgctgtcgacggccggcgccttcgcggccgccgctgccgccctggcgcggcgccggctgtggggaggagacaggcggaagaagcagctgccggcgccggccatggccgagatgccccggctccagctggcggagtccggccgcctggagtacctcgagaagttctcgcactacgtgggtcagtcgtcgtcatcctcctcttcctctcttcctcctcttctccgttgcctggtcaatcgttcgacgaatgagtgagtgagtggatccaaaacagactatagcttgcgttccacgcgcgcgcgcgcacgcacataaaaaacacacaaagaaaaagaagcagcattaaacaaccgatcgacagccctggtttatgagaaacaacggccacgtcgccatcgatcaagctaggtggctactagtagcgtgtcgtcgtgaaagtctagcggccgcaggagaaatgcaataatctactgctactaataatgtcattatttctgctctctgctctactacctaccgtggcgcgtcgcatgcgcatgaatgcagctaggcagctgggtttccaggacgtgagcgagtgcccacagctctgcaggctggcgaacaactacctcagcagcagcaagacatgcatggaggacatctacgggttcttcgccggcgccaaggacgacgccgccgagtgcctgctttatgtcaagctcatagaggagctggacagatgcatcctcggatattttgcgttccactgggaccatgccacctacctcatcacctcggccttgaccgcggacaccggcagcaaaaggaagctcaggaacatggtcttggaagcaacaaggaagcagcgtttcgagcgcgtgacgcgtgacctgaaggtgacgcgggtgttctcgacgctggtggaggagatgaaggcgatcggcatcatagcggcgggcggcgaggcgtcgcagtgcacggacgtgatggcccccgtggcgcactcggagcgcagcccggtgctgctgctgatgggcggcgggatgggcgccggcaagagcacggtgctcaaggagctgaagcaggaggcgttctggaccaacgcggaggccaacgccgtggtggtggaggcggacgcgttcaaggaggcggacgtcatctaccgcgccatcagctccatgggccaccacaacgacatgctccagacggcagagctggtccaccagtcgtcgacggacgcggcgtcgtcgctgctggtgacggcgctgaacgaggggcgggacgtcatcctggacggcacgctgtcctgggagcccttcgtggagcagaccatcgccatggcgcgcgccgtgcaccgccagcgctaccgcatgggcgtcggctacaaggtggccgacgacggcaccgtcaccgagaactactgggagcccgcgagcgacgacgccaccgagcaacccccgcggaggccctaccgcatcgaggtggtcggggtcgtctgcgacgcctacctcgccgtggcgaggggcatccggagggccatcatcacccggcgggccgtcagggtcaggtcccagctgcagtcgcacaagcgcttcgccgccgcgttccagcggtacagccgcctcgtggacggcgccaggctctacagcaccaactccatgggctccgccaagctcatcgcgtggaaggacgggatcggaaacagcctgctggtggagccccgggagttcgactgcctggagaaggtgagcgggctcaacgagcacgccacctccgtccacgacctctaccccgacggcaccaccacctgcggatcgcgctccatctgggaggacatgatcgtctccacggcccgtgccgacacccagcgcgagctcagggaggccatccgctccgtcgagtccggcggcgggcagccggacacaccaccaacaacgccccagcgcgagctcctgggcttcatccgctccctggaggccgccaacgccgagccagctgcagttgacaatggtctctaaattttaaaccataagatttaagaatcgaatcagataatcggaccatatttctatttatttttgaaaccaacatttaattgagactattttattttgtgaaaaagtatttggatcgtgatccattaccacccttagctgcagcaggtcagacaccgacaactacctcttagctagtgctggaaaaatacgggacatgctttttggtcagcacaaacacaacccaaaaacaataggttaaagcacggaccgacacgaaataatatggaccgagttagtacggtccgaaggcgggcctaaaccgagcctcaaattctggcccgtcgagccccggcacagcccacacagataggttgggcttgagccggcacggtctgatgaaactcatgtgtttaattttatttaatttagtaagtgatagactttatattgttatggtatttagagtttatgtggtcaaataatgatgtgattgtttaacatctttaattgagtaagttatgtattttatatgattgtaatattttgattttatgcggttaaatatatgtgtcgggtttgtgccgacacggcccaataaaaacac

SEQ ID NO: 26192 - DNA, 870 bp, Zea Mays
agggtttgaaagaggattacaattgtacgatttacaatgcacaattaagcatttatcttcctacaggaatacatatcagcttggtcgggttcaggacgatacatacacaagtactatttccgagctttggctgatcagatatatcacaatcctgactatcataagcatgtgagaaaagctgtcatgaaacagctgaaggaattcagaaaacaatatgaaagttacgtaccgatggaatataaggtgtacttgaagaaaatgaaaagatctggggaatggggagatcatctgaccttacaagcagctgcagatcggtttggtgccaaaatttgtttgctgacatcatttaaagacacctgtttaattgagatagtccctagggatctaactcccacaaaagagctttggctaagcttctggtgtgaagtacactacaattccttgtatggaatcgacgatctcctgacccgcaagacgaagaagaagcactggctgttctaggagggttctgaaggatccaaattctttcagcagctcctgctctgtccagccagcgcagcctctgtcttagtacttactagttggccaacactgtatcatatcctaagttgagtctaggctttacgcttttatgtacagtcgatctagatcttgtaaaattccctcaaggagcaacaggaactgtacaactcttagatccatgagattttggtgatctctcctccatgggaatgatagtgcttgggtgtatgtacattataaaagctaccaggggcattttgacgtgggcgtttggatgccattctccataatttttattctgaattcgtagagtggccatttccaggcatggggatctgccggattttg

SEQ ID NO: 26193 - DNA, 248 bp, Zea Mays
tcgtcgcgccttgtgcatcgcttgatcgatggaagcctcactcgtgaacaacatgcgcgactcagtccattcggccagattgtttgatgtatgcaatttatagtttgtctaattatgttttggtccatacggtgtatattggtgtttgaatatgtatgtgtataaaatattttggttatatgcattggtagggtcgtatttgcgatttgaagaacaagatgttgtttgatgtgaaaattgagtttgaa

SEQ ID NO: 26194 - DNA, 2375 bp, Zea Mays
atccagtcgaaacccactcacttgatggcaaagtagcgaatcccacgtttcataatggctcggttccaaatttctcccttcccaagcatggcgtccctgccgcagcccccgcgatccccttctcaagcctggcgtccctgccccccgcgatcgcgcctgccaagcatggcgtcgtcgcggccgttgcccccgcgatccccttccatcgacctgccaagcatggcatcgccccggccgttgccacgcccgccgcacacgccgcgatgagatcctggaccccccgcgacatcctcctccaccgcgccatggccgcccccgacgtcctcgcgcgccgctccccgaggtgggcatggtgcgcacgaccatcgcgggggtcacgacggcggcgcggttccaggagctggtggactggatggaggagtggaaggcggcgttcagggacaacagcaagtggacggagacggtgaacctggggctcgggagcctcgcgctcatcatgtccgggctgcttccgttcgccatcgacggggacctcgggttcgggaagcccagcctcgtgctaccctgggtgcgccatggccggctgggatccgcgtccgtgatggtggtgccctgccccagcggcgacatgtcgtggttcttcggcggcaccaggatgtggctgcggctcatggaggtggtcgaatccgaccctttgatgaagcagacaacgaacctgggaatggcgacagaggcgggatcccgtctgtgactgtgagctcgcgctggcggtacctgccattacggtgtacgggtatcatcgccatcatcatccagatccaggacatttccggatagatgacataatctgttcatctcaaatgccacaacattcgtgggcacatgttgccttgttggcttcatttagctcgcccgacatcatattttagcaactatctgtcatatataatctactaaaatggtttattttttcatttactcttatactctcatttttccaaccaggacttctgagcacatggaagatgaaggagacgttgcaactcctttacactttccaaatttttattaaatataccaatatcacgaggtgaaccttcgagtttagtgatttttcatatccatggtttgcaggcaagtaaacttattacatataatccattgaacttcatgtcttggtttgtccaattcgacatcgaagggctcgccatgtggggtgacgtcgacggggcttcacctgtcctattctatcattattgtgattactgactatgccattgtttgtgctactgctgcttatgcttgcagtgccacaaaggcaagcgaacctttgatttggtccatgttctggtctaaccttgttgggtccacactccatgggtcactttcacattactactaccatatctgtgagacagtgcattcaagtaacggtacaatacaaagggtggcaaatgataatagcctgaagaatgatggcacaaaatgatctagagtattctttatcttacttagattttgtcaacattccatcatcatataatctcgaatattttcataaactggttgtgtaaaatggggggatctttctccatgaatctcaatggatctgttgtgcactgcatagctgcggagaagaaaaaggtatcaaatatcaagcagctttacggcagcgaaggatcattcactatgagtggatattaaactgttgcaaggaaaacatcttcattttcatcctagtctcatcagtgacatgtatcgcttgtcatttgatgaaaatggaagttgaacgatcattctctttttgggcactgctgaaggtgatgttgttcacccaactgagtgtatgccccagctgcttgagcaagttcggcatcacaaagcgaatatcgattgcaatgattatattgtcatggtgactacattggttcttgaggttgaggatttgtctacacaacaagtgaatgataagctcctagaagctgtacaaccttaagcactcgagcaatggagcaatgtggtatgatgagagcataggaggtttgtcgagatgaggtcgaaacatggccccaatgtaactagaccagagcaattgacaatctaggcaatatccgctatctggtccattgtttctctcgtgggtccattgtttctgtcgtgggtcagacgtcttcgacgtgaagagaggttgttttgtcatttccacattctgaagcgtaatgtagtgcagtggacgcatatagctactacgtatgttaaagttgtattttttatatctcatattagatgtatttactattttacaagccttatgaaaatagcaatatgagtggtactaaattattgatatgtattaaagcagcttcttaaaaaaa

SEQ ID NO: 26195 - DNA, 3594 bp, Zea Mays
ggacagttagctgtaacctacctttccccgctcttcatcggcaaaaaagagggggaaaaaaaacgaaccctgaagaggagagggaaaaaactcgagaaaagcaaaccctaggttgccatgtcatcgacgacatcctaattcgccgcattgcatcgcccaggcaaggggcttttggcacaggtcggcgctcccctgtcatcggattcgattcccctgctcaatttgccgccgatccgtggttcggatcttctcgccgctcggcgactgtcgcgccattttttctctcgatccgtctgcgagacactaagcgcttcgccgacggtcgaccctgctgacgccaccggcgccaggtggcttgtcgcctactctggtccgccaaccgacgcttgatgcctccagggctccaaagagaaatggaaatgggaacaccttcaaggaaagcttcaatatcaatgttccaaaagggagttgtctaaagattccacaaaatgtacaggtcgaagagctcttccttcaatgggtctcttctctaagggttttgatgttcaagagtctgtctttcttccagagtctaattattcagatatcaaacctgccatttgttgtttggatgaccggtgtaaattcactcaaagttttctggacatgacaactgcaccttcagtactgctttggcaccatagaaaaatgttaatggaaagcaattcgactaatggttctcagcaatccatgtcatgtgctttggatgaggatcatcagcagttggtaacagaacatgcatctgatacagtttgtcatgctccacttcaagtttgttcacttaatcttggttcatcaccttatagtccattggatatggtctctgctagttgtgcaaatccatctagctctactagtagggaacccaagattactgaaaggaatataagcccagaatgtaatgacaacagtattgatgatgcaatataattgacataaagtttcgagatcaaaatgagccttgtattggtgctgataggccatgttcctccaaccttagtgttatttgctcttcacagaagtttgcagaggatcgtatttccatcaatattcctcaagacaaagcaattgatgcaacaaatgataaacctcttgacaaagatgaaaaagaaaagcatcctatatctaacttggttcaggaattgaatgaacatccaattggtcgtgttacaccaactgcccccagaactacttcccatcggaaccggtttacgtctatatcacgtgcttttggagatggttcaaagttactgccagaagaccacatgttgactggcttcgctagtggttctaagaagccacgaagtcaagtttcatactcaggttctcctagaagtgaggaacttggcttaaaaaacaaagatcatttccgcaagatacaatctcatgtcagtgttaagacaagtgatgcaaaaaaacttcctgatagttctagaagtgggcatagcagtccagagctattgacttgcattgcaaatgttcttgttacagtgggtgatagaggttggagggagtatgatacccagatcacaatggattctgatgttcacagtgaacagaggatatgcgtgaaacttgctgaagggaccaagtatgctcacaaggtctgtcaagttttgcagcctggggccacaaaccgctatacacatgccatgatgtggaagggtggggctgagtggtgcctggaatttcctgacagaagccagtggttgattttcaagcaaatgcatgatgagtgctatagccataacatcagagctgcttctgtgaggaacattccaacccctggtgtccatttggttggaatccatgatgataatgatatggtatcctttgtgcgatctgaagattatcttgtccacatcggaacagatgttgaaattgctcttgatgaggcccgtgtgttatataacatggacagtgatgatgaagagtggatatcaagccggcagaaattcttagtaagagacaacaacgccacacttgagttggcagaagatttgtttgagagggttatggacaaactagagaagtttgcatatagccacgactctaatgaactcagcattgttcagatgaaggaactggagactgatgacctacctctggacattattgaagtgatacatgcatattggcaagctaagaggcagaaaaagggaatgccacttattcgacatttccagttcgctatgtggaaggtctacgagcaacagttacatgaatgggaatcgaaagtatgcagaatgcagggttcatcaaatgggtaccaaggaaaaaaaatgcctcccaagcctgcattgtttgccttctgtttgaggcctcgtggactcgatgtaccatacaagggaccaaagcagcgttctcataagaagcttatgtctacaggctgccatagcttttcaagacagcatgatggcttttaccggcaaggttctctacaagaacaggttctcttcgggcatttgagtcctcggaaagttctacaccaagatttttcaggacaaatattgtcaaaaggagtgcaaccgttgctttctctgatgatcaccagccgtcgccttccttccgccctcagagagttaaacggagcgcatctgaccattggaacactgtcattcatgactggcagaactcaaagcatctctttccgggctcgccccctgttgatattgaggagctcaaactgcgggatgctgcaagcgcagcacagcacgctgctgccatggcgaagctcaagagggaaaaggctcactgcctgatgcagaaggctgaccttgccctccataaggccacggtagccctcatgattgctgatgcaatcaaatcttccagcaggaacaagtctcgggattgccgaaggggatttgatgaatgaggaacgctgacttttttttgccttttgccgcgagcccttggcgtatacacacaacttgaactcgatgcttttgctgatgatgggagcgtgtttgcttatctaatgatcgagtcattagatagcatcccttccccccttctcccccctccccctcctttgcgtctcctgtacataggtttcttttcatcattcttttgtgctcttttacctcccgattaacatattgcccggtgatgaatgggccaggtcaccaggatgtaggttagcaatctggcgtgttgtctgaacagcggctagggaagtggcgctttacggagggttatggtcctgttgttgcactgtgatgcctttacgacattgcatattctagaaggagcacatggcatatcgtgggtcagtgggagcagtgccacatgacccctctgggtcataaataatctatttccgatggctcataggttgtgttcgatgacctaagccgtcggaaattttattgtggtcaacatatagtactcattggaattctggaggaacttgaacatgaggtccaacaacctcttagatatattttcgattccttgtgtgttctccaaatattttgcatccaataaacttacaaacactttcttaaaaatttccatgttttctcgatccctgtaggtgctgcgacatatgtt

SEQ ID NO: 26196 - DNA, 188 bp, Zea Mays
tagcccgcgcttggagtcgacttggcttgtcttccgcattacgcgattaattaacgtacctgaatgaaatgcattatgcacatgaatgcatatcgataagaatatcacacacctaaatagtgctacgcgatagcgaataaaacacctagcggcgaggagttgtaccgttttattcggaaacactagtt

SEQ ID NO: 26197 - DNA, 1696 bp, Zea Mays
caggcctccacaacaaagctagggtttgcctcccccaccctcctggcctcctcccgctttccctcatcctcgtgcgaacctcgcgagccaaggaccgctcgtcgtctcttgtctcgccgtcgccatgggtacggagcggaagcggaaggtgagtcttttcgacgtggtcgacgagacctccgtctccggcaagctgggccgcgccgcctccaacggcgccgccgccactgcggcggggaccaatccgtctgtcaaccggtggaacggccggccctacacggcacggtacttcgagatcctcgagaagcgccgcacactgcccgtgtggcagcagaaggaggagttcctccgccgcctccgcgacaaccagaccctcatcctcgtcggcgaaacgggaagcggaaagacaactcagattccacaatttgttcttgagactgaaggcttgggtaaccgttccatggttgcctgcactcagcctcggagggtcgcggcaatgtcagtctccaggcgtgtggcagaggagatggatgttactattggggaagaagtgggttacagtattcggtttgaagattgcagcagccacaaaactgttctcaaatatttgacagatggtatgcttctgagagaagcaatggcagacccacttttagagaagtacaaggtgattgttcttgatgaggctcatgagaggactttggcaacagatgttttgtttgggcttctgaaggaggttctaaaaaatagaccggatttgaagcttgttgttatgagtgctactctcgaagcagagaaattccagggttactttagtgatgcaccgttgatgaaggtgcctgggagacttcatccagttgagatattttacacccaagaaccagagagggactatctagaggctgctatcaggacagttgtgcaaatacatatgtgtgaacctgctggtgatatccttgtattccttactggagaagaggagattgaggacgcatgtcggaaaatcaataaggaaatcaataatatgggagatcaggttggcccagttaaagtcgtgcctttatactctacactgcccccagccatgcagcagaagatttttgaacctgctcctgccccattgaaggaacgaggtcctcctggaaggaaaattgttgtgtccaccaacattgctgaaacatccttaactatagatggcatagtttatgtgatagacccggggttttctaaacagaaagtttacaacccaagaataagggtggaatccctcctggtgtcaccaatttctaaggcaagtgctcatcagagagctggtcgtgctggacgaacgcaacctgggaagtgctttaggctatacacagagaagagctttaatgaggatttgcaaccacagacatacccagaaattcttcggtcgaacctggcaaatacagttcttaccttgaagaaacttggaattgatgatttagtgcattttgactttatggatcctccagcaccagaaactctaatgagggccttagaagttttgaactatttggctgcactagatgatgaaggtaatctaacacagttaggtgagatgatgagtgagtttcccctggatccacaaatgtcaaagatgcttgtcatcagtccaaagtacaactgttcgaatgagatcttatcaatatctgccatgctgtcagcaactgta

SEQ ID NO: 26198 - DNA, 2124 bp, Zea Mays
cagttctcgacctggctatgctgtctcgtcgccttccccctcctgccgcggccgtcagccgccgcacgcacgttcgcccacagccacagctccacttgtccctgtccatccattcatcattccccgtcactccaccaattcaccacccaaaaccctaaaccccattccgtacctcaacgccgccgccgccgccgccgccgctgcgatgcagtccatggcgctcacctccccctcactcccggaggtcggccccgtttccggccgccgtctccagcgcatccgtgccaccgcggtcggcgtctcgtcggtgtggtacgaggggaacacctgcaacatgcacctgctccgcctcgcggaggccgtccgtgacggcgtccgcgaggccggcatggtcggcttccggtttaacaccgtcggtgtcagcgacgccatttccatgggcacccggggcatgtgctacagcctccagtcccgtgacctcatcgccgacagcatcgagaccgtcatgggagcgcagcactacgacgccaacatttccatacctgggtgcgacaagaacatgccaggtacaataatggcaatgggacggcttaatcgacctagcataatgatatatggtggaactattaagcctggtcactttcagggcaattcctatgatatagtatctgctttccagtgctatggagaatatgttagtggttcaatcactgatgagcaaagaaagaacgtcctccgcaattcatgtccaggagcaggtgcctgtggtggtatgtacacagcaaacactatggcatctgctatcgaaactttgggcatgagtcttccatacagttcttcgacacctgctgaggacccactaaaactagaagagtgccgtcttgctgggaagtatcttttagagttgctaaagatggatttgaagcctaaggacattatcactgagaagtcattgcgaaatgcaatggttattgttatggcacttggtggttcgactaatgctgttctgcatttgattgccattgctcgacctcaagcccagtggcaaatatgtcatggaggatctacataagattggtgggacacctgcagtcattcattaccttttggagcaaggtcttcttgatggtgattgcatgactgttactggtaaaactctagctgagaatgctaaaatcttccctcctctgtctgaggggcagcaaataattcgaccacttgacaatcctatcaaaccaactggccatattcaaatactttatggaaatcttgcaccggaaggttctgtcgcaaaaataactggcaaagagggactgttcttctcaggtcccgcattagtttttgagggtgaagaatccatgatcacagctatctcagaaaacccagcgaatttcaagggaaaggtagtagtaatccgaggagaaggaccaaaaggagggccagggatgcctgaaatgttgactccaacaagtgcaataatgggtgctggtctcggaaaggagtgcgccctgctgacagatggtagattttcaggaggctcacatggatttgttgtcggccacatatgccctgaagcacaggaaggtggcccaattggccttgtccatagtggtgatgtaatcaccatcgatgtaagtaagagggtaatcgacgttgaccttaccgagcagcagctcgaagaaagacggaggaaatggaccccaccgccatacaagtccacctgtggagctctttggaagtacatcaagcttgtggctccagcgtctagaggatgcgtcactgatgagtaggatgtgttacattctgttaggtatgacaataaattgccggtttctaagagcttagcaatgctgcagaaactgctgaataatcgagtgtaatcggggtccgtgagcaatcacatctttgtcagtctcccttgttttgtttgtctcattgtttgtagtaccttgttcaaagagatgataatgtcgattattctttggtcctccacatgtaaccacttagcgtctggtgtggttaaggtagtgtttggttccagagtacggtgggctgaagctgtttcactcctaatttattgttgtttggattgatttcagataaaatggagctgctttaaaaaaa

SEQ ID NO: 26199 - DNA, 1395 bp, Zea Mays
taaggcgtaaagccccccctctcgtgctcgtgacccgctgcttatgttcggatggaacggaacgtagggatttcgcgatagctttctgatgaaatttcagtctccgctccccggctctccaaaacggcttcatttgtgctcagttcaccgtacagccggcacgcgcgtccactggcccgtcgatacgtgtcgcagcccattaacagatgtgcagcacgcagcagcattattgcctgcgcctcccccgcagcagcgaacgacgcccccacgctctcctggcccgccgcgcacgccggcgaccagacgaatcaaagcgtcgcgtcggtccaacgggtggcaagcaaccgcgctcggtcaagtggtactacaaagacttttaagttttacaccactcgtcggtcgcctcacctcccgccggacagcgccggcgccggcgggggatacctggaccgtgacgactgacgaggaggtgaacaacgccgccgtgtcgttcaacgagatcgacaccaactcggtggagcacgccgagactgtcctcaggaccaacttctacggggccaagatgctcaccgaagcgctcctgccgctgttccggcagtcgtcggcgaccagcaggatcctcaacatcagctcgcagctgggccttctcaacaaggtgggcgacccgtcgctgaaggcactgctcctggacgaggagcggctgacggaggcggggatagaggcgatggtgtcgcggttcctggcgcaggtgaaggacgggacgtggggcgagcaggggtggcccaaggtgtggacggactactccgtctccaagctggccctgaacgcctactcccggctgctggcgcggcggctggaggcgcgcggcgtgagcgtgaactgcttctgccccgggttcacgcgcacggacatgaccaggggctgggggaagcgcaccgccggcgaggcggccgacgtcggggcgcggctcgcgctgctgccgcccaccgagctccccacggggaccttcttcaagtggcgcacgccgcagctatactctaagctgtgactggctctgggctctggctggctggctagctgagctgtcgtccgtcggccggggcgtacagcatttcggtccggcggtgtaggcgtgtagccgctcctcctattcctcctgctgaatagtactagcaagtatcaacaacgtgtgcagagaagtcggtaaccggagtgtcgatctgccaaggtgctttggttgaacactggctcagcccgtttgtgactctcagctatgtgtacaatgtgcgcttatatctgtcttaagatttaggccaacttctgagcactggttgaatggctgttccttacagttctgtccgttcacaagtatgttccttgtccaaaagtagagat

SEQ ID NO: 26200 - DNA, 1873 bp, Zea Mays
ctcgctcgccacccaccctgacccagagtccacaccgaaatatccgcgtggcgtggactcgggcaccactctccattcctgcatcccattcccatctcttcttcgcctcctccgcctcgccggcgtcaccgtccggccccgcctcttccccccgctcgaagctcgatctctcctcccgttctccgcccacgcaatccctgccaccgccgaatgcggaacactcgcctttggtgaccgactgacctaccctgcttctgccgggttagttgagtgtccgcgcctaccggaccccgcgccgcgtccggatctcgaatgcgccgccgccgccgtcgcgcgatctagcggctgcgcgctgccccgcaggagggtagagctccaggggcccggtgtggtcaggcggcggatatggcaacggaggcgtctacctctgcggcgggcgggatctgggtggaggggatgtccgcggacaacatcaaggggctggtgctcgcgctctcctccagcttcttcatcggggccagcttcatcgtcaagaagaaggggcttaagaaggccggtgcgtccggcgtccgcgcaggtgttggtggttactcttacttgtatgaaccattatggtgggcaggaatgattacaatgattgttggagaagtggctaactttgcagcatatgcttttgctcctgctatcttggtcacaccacttggtgcacttagcatcataattagacattatgttgaaggaaaagctgcatatatttggtatacttgggtgtgttctttgtgttgtgggttcaacaactattgtacttcatgcccctcaggagcgcacaattgaatctgtagcagaagtgtgggatcttgctactgaaccagcctttctatcttatgctgccatcgttcttgctgcaacatttgtcctcatatactactttattccacgatatggtcagacacacatcatggtctatattggtgtttgttcccttgtaggatctctgtcggtcatgagtgtgaaagctcttggaatagccttgaaactgaccttttctggcatgaatcagctaatttatccacaaacatggttgttcaccattgttgttgttgcatgtatagtaacacagatgaactacctgaacaaggctcttgatactttcaacacagcagttgtatcaccgatatactatacaatgttcacgtcactaaccattttggctagcgtgataatgttcaaggactgggatcgtcaaaatccaactcaaattgtaacagagatgtgtggttttgttaccattctttcggggacgtttcttctccacaagacaaaagacatggttgatggcctcccgccaactctacctgtccggattcctaaacatgaggacgatggagctgaaggaatccctctcagatccgctgaaggcatcccgctcagatcaccgagggcaacggaatcgtttcgatcaacgctataatggttggtgatccttcttcaaaggccatggtcagccattctttcatttgataacacacctttgtagattgtattttaggattccaaaaggtaaaggcaccgctccccatgtaatttttttgagacaccggtgtagagtattgggggaacttatgttatacatctcgaaatgcccagaatgggcttagatccagtttttgatacacaccagacaccacggtggcatacaagacccgttatcagcgacacagttactgttgtattcttttggatagaaaattagaagataggggaagaatctgaagaaggctcctcgaagaaacttctttacctcccatccacatgtggtgttctagtttctgatatgcgttttttttttgggttaattcattcatcttatgtt

SEQ ID NO: 26201 - DNA, 1707 bp, Zea Mays
tgccgtcttcgcaggagcaggacagaggaaaagcagaagcaggccagcccaaaagaagcacgttcacggttcaccaagtcaagcaaacctctctcaaattccaaacccccacaatcaccgcacccccttcctccttccacattgcccatttgcccccccaagcaagagcaaccaagcacgccgcggtccgtgctccctccctccctccgatctagagtagagcgcgcgcccaagtctagaacggagaccaatgcgcaaggtgctcatcaacgccgtcctcttcccggctctcgcggcggcggtcgctctggccatcttctgcttcgtccgctgccgccgccgccgcggccggggtcgcggccgcgaccgctcggtactgccctcgcacggcggcggcgcgagggcggaccggttccaggcgggcggcgcctcgggcggatacgccgccggcgggggggaggaggcgctgatgcggttccccggcggcgaggcgctcacggtggccgcgatcctcgaggcgcccggggaggtggtggccaagtcctcgcacagcacgctgtaccgcgccgggctcagcgccggcgaggccgtcgcgctgctccggttcgtgcgcccggcctgcgccgcgggcgccgacgaggcccgcgcggccgcgcgggcgctcggcgccgcgcgccaccccaacctcgtgccgatccgcgcgctctacatcggcccccgcggggagaagctgctcgtccacccgttctacgccgccggctcgctgcgccgattgctgcaagaggtgggagataatctgcaagctgtcgatcgggatcgccaaaggactggaccacctccacacagcgtcgcacaaggcaaacgttcacggcaacctcaaaacaaacaacgtcatgctggacgccgatttccagcccaggatctcagacttcgggctctacctcctgctgaactccgccgcggcgcaggagatgctcgagacgtctgcggcgcagggctacaaggccccggagctgatgaagatgagggacgccacaagggagagcgacgtgtacagcctgggagtgatcatggtcgagatgctcgctcagaaggaggtcgcagacggccgtaataagccgccgccgaacgcgcgcgacatccacctgcccgcctccttcagagacctggtcctggagaggaagatctcagaagctttcggctccgagcttcttctgaagcggagcaaggactccgggatggagggccgcctggacgcctacttcgaactggcgacggcctgctgtaatccgtcgccgtcgttgagaccggatacgaagaaaatactgaaaaggcttgaggacatagcaagacaataatagtagaggcgtgcggtcgggtgcggcggtgaggctatccccggtcctgtttagaaagtaagtgtggtgttatagcagcaaccgcccaacagaggattacttgtaatgtttggttacttgttgcatacgacggcagagattgtactggcgcgggccggcgtttggagaatgatcgtaacgtaaacttaggagccacaagcgtgcatgtatagaaaaggtacacttttcaacgtaactacataggaactcatcccagaacataaaccgtgggtgctttctttcgacgtggaaactgtatcaggcaactagcatctgttgaactctctggtgactgaattttgtcgacaag

SEQ ID NO: 26202 - DNA, 2693 bp, Zea Mays
caaaaacctcgggcttcccctggcttccatgcagcagtccccccttcgtgtcgcactcgcacagtcgcactccataaggcaaggaggaaaacagagagacgaccaccgctccgcgccggccggccattccatccggcaatggcctccgccgccggtgctgcgttcgccgccatcaccctcctcatcctcgtacccctcaccgccgcttcggactccgaccacaagtaccaagcagcggagcctgtgacgctctgggtgaacaaggttggtccgtacaacaatccgcaggagacatacaactactacagcctcccattttgccatgcgtcagaaaaccatgtgcataagtggggaggactcggcgaggtccttggtgggaatgagctcattgacagccagatcgacataaagtttggaaagaatgttgataaggccacaatttgttcgctagacctcgatcttgtcaaggctaagcaattgtcggatgcgattgagaactcatattggtttgaatttttcattggttttgttggagaggcagacagaaacaatgataacaaatatttcctattcacgcacaagaatattgtcatcagatacaatggcaatcagattatccatgttaatcttactcaagaaagcccaaagcttattgatgtgaataaggcattggatatgacatattctgtcaaatgggaaccaacaaacataacatttgctcaccgttttgatgtgtatctggactatcctttctttgaacaccagattcattggttctcaattttcaattctttcatgatggttatctttctcactggactagtgtcaatgatactgatgcggactctaagaaatgattatgcaaagtatgcccgtgatgatgatgatattgaaactctggaacgagatgtcaatgaagaatctggatggaagcttgtacatggtgatgttttccggcctccttgcaatctagttcttctttcagctcttgttggtattggtacacagttggcagcactgattctactagtgattttgttggcaatcattggaatgctgtacattgggcgaggagctattgtcacaacattcattgtttgctatgctcttacttcattcatctctggatatgtcagtggtgcattatactcacgtcatggaggtatgggcttatttatcatgtaaaattgaactgtatacctatagttctataaggtgctcagttgttttaaatccttttggaggaggagcagggaaaaactggatcaaggcaatggccatgacagcatcacttttcccatttatgtgctttggaattggcctggtgcttaacactattgctattttctatggatcgttagctgccataccatttggtacgatggtggttgttttcatcctgtgggccttcatctctttccctcttgcacttttgggaactgttgttggtagaaattggagtggtgctccaaacaatccctgtagggtgaagactattcctcgccctattcctgagaagaaatggtacctcacaccatctgtcattgcgcttatgggaggactgcttccttttggtagtatctttattgagatgtactttgtcttcacatcgttctggaactataaggtatggtagacaggcctgtgttttttttttttaaatctctaagcttcatactaaggctgtcctcatcagtgggtataatggatgtgcaaaacactgttttggtactgtacatggactgtggatagagcggtgcttgaaatagttcctcattggtgaggatagcctaaggaggcattggagttgacattgatgtctcatcctttttgattaaccactgacaggtctactatgtttatgggttcatgttgctggtctttctgatactcatcattgtcaccatatgtgtaacaattgtcggtacatatttcttgctaaatgcggagaactaccactggcaatggacttcattcttctctgctgcttccactgcggtgtatgtttacctctactccatatattattaccacatgaagaccaagatgtctggattcttccagaccagcttctatttcggctacactctaatgttctgcctaggcttaggaacactatgcggtaagctcttctgctatcttgtggtagacaaactatggtatcgttagtttaatactgcttggtgcttttgctaggtgccgtcgggtatcttggatcgacattgtttgtgaggaggatctacaggaacataaagtgtgactaagtgaagataatatcgccccattttgggtcagcgcagagaaaatgtatggcagagccttatttgattgagcgatcactgattctaaaaccaagaacgcaggtcattttgtgaaatatgatcgttgcttggcgccgagctgaaagccatgtttttctattcttgtcctcgtttctctctgatttcttctggacttggacaggcaacaaattttcatgttgaattagttatatatatagcggtggttgtagttgttgagtagttctgtagtatataccacaattgttatccttggccccaatgatacctcagattgatgggtataaactgtaacatttacattacctgatgtttgacgatgaacacagttccaaataatcatgttcggtactggaggatcgagatttttgagaggcaacatcaaagaaaaaa

SEQ ID NO: 26203 - DNA, 6677 bp, Zea Mays
gcagattatgggctgcgcaggctctaacccggcccagaaacttccccgcctcccccgcgctcttctttgttgctgttgttgttgttgggcaaatcagtagggtttttggtttcgccggtcttcgcttcgctgccgccatggcgtctcctcccgagcgtgaggtcgccgcactcgagagctgcttccgtgccctctccgcggctgacgccgtcccagcggttgtcgactgcgtcctcgcttcctccgcctcgtcctccccttcccaactcttccacgcgctcctccgttcctttcctccctcccagcgggagcagggtctccaagcccagtctgaccgtcatgccgccatctgccacgccgcggcgctccgccatttgctcgcgcaactcgacagcccccctaaggttagggaggctctgcgcttgctgctgtggagggtcttcctgcccttgctccaggatatcattgaacccactcatcctgcccactttgacctggtaatcgagatgatgtgcaatgcagtctctgacactggatgctgggacctgcttggagctacaatagtatcattctgcattcggtcatctgttgttgccatgggtttgtccgccgcagacgccaactctatactttaccaaagtataatggaagcggattttcctgcggagactctctcatgcctactaccgctctccaattcaagcagtgtgttagcatcattgctggtggacatgctggagaggcgaaggactatacctacctcccaggaaggtgctgctgatctagctgcattggttcagaatttgacatgggaccttgccaagttggtactcaagatgtttacacatgctcaagagtatcggtcttgtgccactcgggtccttcttcagcctgtactcatatcgcttacagatgtttcttctgtcactgtatcgtttggtgcagtccagcataagctatcgaggtttggtttcctagaatgtatatggaattcctgtatttctctatttcctttggggcctggtgagcggcttgatgcatacagaatactctctgtatacttctcaacactgaaatcaggacatcaagccgctgtcttgggagttggcattgtccaggaatttgaccttaagaatgtcagtgaattctgggatgaactgcgcaggggactggttgacaaggattctttagtaaggaaacaggccttctatgtcttgacaatatcacttagcatctttacctcttcatctggaaatgatagctgccagcatttttccagtaggagcccagctgctttgcctgctcaaatcaaagcaaatgctggggaaacaaaaagggaaaggtgggctaacaaagaagccaagtcccttggtgttggagagatggaccaatcaggtgaaaattgctcaaatggtcaagatcggtggaaggtctttttgttactctatgagatgctccaggagtatggcacacatttagttgaagcagcttggacacaccatgtagtgcggctgtttgagtgtacgctacaaaatgactatctaaatcacacctcctgtggagcctttcatgctcagatggaatcttgggaaagaattttgtactggatggcagttttgtgggagcgtgggttcagtcatgagaatcctcaagtgagatgcctggttatgcaatcctttttggatattgcatgggaacgctacaaggtttgcactcatataattccaaggggttttgtgctcggccctctgatacgtggtttgaatgatgtggttcatcataaggattttggcattgggggtgcttatagttcgaaaaccataaaagatgctcagagatttttcagaacttatacccacaacttggcgagatgtgaccgcatacatctggtttggagtctggcttctgcggctaagcaagattcatttggccgagcaggattgatgactcttgcatcctgtgttgcttcatgcacacgtcagtcagagacaaatgatgtgccatgtgctatatctgggaaagcagtgaccaaatgtgatggatgtgtacctacagaagttaggccaacagatttgttagatgtcttatggattctcagtgagaggagtaaacaacactttaatccaaagtatcgtctgaaagtttgtgaacaggttatccaagttgcaacatcactgataaatgccactgaaattccacttaaccagcttctgcatttcattgccacaattcctcgagagttcactgattatattggaccattgagagtagtagttcaaaaatggttttttcagaaggaagaatgttctcctggtgacactttgttgagtaagctgatcgatttctctgccaccttcgtaagtcaaaaacggaatgaaggttcgaatgtttttgatgacgaggatgtggatgcatgggaagctgaagcaaggaggtgggctagaacccttcttcttgtaaccgaggaggaggaacatttgaaacgaatcttcaggtttttggaggcatatggctacaagctctctgagcaatgtcccagtggagatttcatacccataaaattttttatcattgttttaagcttcattgaggaacttgagctgagacagagaaagcttgtttgccggagtaatacaatcttaagaggttcagatacattaaatggattagtgctcgatgatctcaacaaaatgttcacagaatcacttttgctaattttggaaaatatggtggcattcagtaaactgtcttgctccattttctggttagatgtggacaacaaggatttacccccttctatcaaaggaaagcttggaggcccaagccagcgtcgtttggctacctccattacttcttcagtattacagggtatttggtcaatgcgatgtgttagttctgttgcctcatggtgtaatccttacaactccgatgattctgtttcttctgcattttccgtgctatgggacttctatttgaatgttacccatcactccactattgccaatgagatcggagctgaacttcacctggcagcttatgaagctcttgcctatgttctggcagttctatctactgcttccagtactcagtttttggattttgtggaagcgaagcagacagatcaagcccacaagttttcattggacattttggtcaccactttccttgacaacatcaaccatcttcttacagagggaactctgacgcgaagcagaagagctgttttgatgacttggaagtggctttgtatggattctcttctatctatttcaagctgctatagtgacaatgaatctcaaatgaagaggttggaacctttattttctgattcaaccctccgatgcatttttcttgatattatcgaaagccttgaaaacactggtgaaaattctgtcttatctatcttgagatgtgtgagatctgttttgagattgctacacctgaatgagggcaacacaattttttcctctttaggcatcagctatgagatgatgatgcaattagcaaagtcttcctggatcttgcaccttaactgcaacaaacgccgagtggctcccattgctgcactactatctgcagtattgcacccagcaatattttgtaatttggaaatgcaccagacaaatgaaaaagggccaggccctttaaaatggtttgttgagaatcttcttaatgaaggctcaaaaagtcctcgaactattcgcctagcagctttgcatttaagtggtctatggttgatgtacccaaaaactcttagattttatatggaggaactgaagctgctctcgttatacggatctgtggcattcgacgaagattttgaagctgaactctctgaaaaccatgaagcaagatttgaggtttccatgctagcacaaagtcctgatcgtgaattcacagaggtgttcattaatacagaattatatgctcgtgtttcggttgctgttctctttcatcagctttggaaacaaatcaaagaacatagtatattggaaactgaagaagctcttgaatgcggcaaactatttctactagaacttctggactcagcggtgaacagcaaagatctttcaaaagaactctacaagaaatatagcagtgtacataggcgtaaagttcgtgtgtggcaaatgatatgtgttctatcacactatgtagaagatgatattgttggagaagtgacatctagcattcacatctgtctttatagaaataatttgccagctgtccggcagtacttggagacgtttgctatactcttatacttaaaatttccaaccttggcagaggagcaacttattcctatttttcatgacaaagggatgcgacaacaggcactatcttcatatgtttttatagcagcaaacgtcatacttcactcaagacagtccgtccagatataccacctgaatcaattgcttcctccaatactgccgtttttaacatcccatcatcacagtttacgtggttttactcagcttcttgtccattcagtgctatcgaggttgtggcctactctgcatcccgaaacttcagaagatgcagtctttgagaggaggtgctttcaagaattgaaagattatttggcagaaaattctgactgtgttaggcttagagtttcaatcgaaggtttccttgatgtctttgatcccaatgcatctgggaccccccctggaatatttagcgcccgtcctgaggtgtctgacttcgaatgtgttccggtgtcagtgatggagcgtgtgattgagttcctgaacgatgtgagggaggacttgagacaagctatagcaaatgatacagtaacaatcaagaatgaggatctcgcggtgggagagcatcacaagagtgacgagagcgtgtctgagatggtaaaaactggtcaagaggtacttgatttccagaagaaaataacaccccataggggggactccgagcaagcattgaacttgaacaccagaggtcattcaggcgttggtgacgaatacatttcaagaataatttcagagatggaggaagatgaccaagttttcgacctagcgctagaagcaagattgcatgctgcggaaacgatcaagcagagccggcaagaactgatcgtggttgcgtcattggtggaacgcataccaaatcttgcggggctgacgagaacgtgcgaggtcttcagagcagccggtctggttgttgccgacaagagcgttcttcaggataagcagttccggctgatcagtgtgaccgctgagaaatggctgcctgtgacggaggtccccgtggacagcgtgaaggcttacttggagaggaagcggggcgatggttactcggtgattgggctggagcagacggccaacagcatgcctctggaccggttcgggttcccggaccggacggttctggtgctggggcgggagaaggaaggcatccccgtcgacatcatccacattctggacgcgtgcgtggagatcccgcagctggggcgtggtgaggtcgctcaatgtccatgtcagcggcgccatagccgtctgggagtacacgcgtcaacaacgcaatcagcgttagcttgttgcttgtttttgctccattgaccattgacgacgaagactactactactacctgggagggagagtagaaatcaacatgcagcactcacaggaaggagagaaagacctgggctgggctgggccgacagtaatgaacgctagcccaccttcctttcccaccaccaagacgtacaagtcagactatattacttcatttatttgtgctaatatcgtaacgttttattgtgtaagcaatttggtacttgaagcctgcctgcatttggatttggagcggcatcagaagttttttaaagtatttattcgtagaggggtcgatcgagctcgcccttttattgctgcaaatatataatacacattattactgctgcaaacataagattacgttacattacattaaatgaaaagctatattacctcccgttctcgttatcccgctagttcatttttaacgaaacagtgacaaatatgaactaaacagcaacaaataaaaagaaacggaggggtactacgcttttttttatttcagtgcgcgcgtgtctgctccagacggtgctgctgcgcccagtccttgacgatgtgcggctgctgacccgacgacgaggtcgtggtctgaaggtagcggtacacccacgccagcacagccaccgcagccacgccgaaccctcccgacgaaacgatgcctaccgtgagcagcgccaccgtgatggccgccggcaccagcacggggctgaagatcaccatcaatggcgtcgccacgatgagcgccagcaccgtgcccgtcaccgccagccccgacaacaacaacatggagaaggctgccgtggctgtggctaacgccttggccaccgccatgggcgcgggcggcggccgctgctgctgctggtgaccgtagtgggtggcgttgtagtcatcgtcgccgtagaggcccctcatgtagttctctccgacggcctcgcttcttctccctgcacgatggtcatccgcatgatgagcagtggccatacaagctctggctagctagctagctagtatacaatgattcaaaagaaatagatgagtggagcagctagtaggttcttgcataatatatatatagatagatagataggataaggactgga

SEQ ID NO: 26204 - DNA, 2366 bp, Zea Mays
gcgtaactgcaggcaacctcatgtgtatattgtagcaaagggaattttcacttcccaccactacgccacggcagtacggcacacgccatagcccttcccgcaagcagccgagctcctccccaaatccttccccgatgctgcggcgcaacagcgagtgcgaaatcgagtccgagctctgacgcgctcgcatggagctctggttctaggtgtgggctgcgctcctcgtatggatccagatgttctcgtggaaccgtaagcagtcctcctcctccggctcgccctcgccctcctcctcctccggccgccgccgcggcggggcggacgcctccatggactccagcagccgcggcggcggcgggagcgggagtgggagcgggagccgcggacggagcccgcggttggatcgccgcaacgcggtgaagcgcgtcgactacgaggcgggcgcgggggcgtccgtgtcggtggccgcgtcgtggtcgtcctcgtcctccgcggatcagcagcgttcgccgggcccggggctccagccttcgcgctccctagacgttgcccccggagcggacctccggatcagcgggagcgtagagggggaggtcgacgaactctgccgcagcctggggctctcggggcccgaggatttcgccatccccgtcgcggcctgggaggcgcgcaagtcgcggtctaactccgacctcctcccgcgctcccaccccgacccgtccacacccgccgacgaaccctcgccaattgcgcgtgtggtctcggcgcctgatgttcagccgactcgcttcgtccctgcccccattcctgctactgttgcggcgcccgaggagtcacccaaggctgcccctgccgttgctgttgcggctcccgtcgggggtttgcccctgccttcgccaaggaggggaggcggggagtcgtttgctcccagggaacagggaagtgaaccgggagagcgtttggacactcgttgcaattcggacacagaggaagagagtgaggctgaggatggggtggcagctgtggagggcgagctgaaagagttgaggataggagagaccttcgaggggctcactggaacttcttcattgtcaacgacaaatgatgatgatgcgtccagtacaaccacggaggccatgttcatcatctcaccgaatggcaagttcaagcgtaagattaagtcatggatgcgtggtgctcttctgggaagcggctcatttgggatggtgtacgaggggatcagtgatgagggtgcttttttcgctgtgaaggaagtatctttgcttgaccaaggaagcaacgcacaacaatctattgttgcacttgagcaggaaattgcactcctcggtcagtttgaacatgaaaatatagtccagtattatggaactgacaaggaagaatccaaactctatatttttattgagcttgtcacacaaggatctctttcatccctctatcaaaagtataaactacgagaatcacaagtctctgcatacacaaggcagattcttaacggattggtttacctgcatgagagaaatgtggtccacagagatatcaagtgtgccaatatattggtgcatgcaaatggatctgtaaagcttgcagattttggattggcaaaggagatgtcaaaaatcaatatgctaaggtcatgcaaaggaagtgtttactggatggcacctgaggttattaatcctaaaaagatgtatgggccttcagctgatatatggagccttggctgcaccgtgttggaaatgctaacccggcaaataccatttcctaatattgagtggacaaatgctttcttcatgattggaagaggggaacagcctactattccctgctacctgtcgaaggaggcacaagatttcattggccaatgtgtaagagttgatcctgagagccggccttctgcatcacaacttttggagcacccattcgttaacagaccactgcgggcttcatttgaatcttcatctcccccagccatctgattgtactattgatatagttgatcatcatgatttacgctactggttccagaatagaattatgtgggcgtgttagtttagtatctctgtagtacatagggttggtaggcagcattgctatgtttttgtattctttgggtgttcttcatcaggcatagggttttcttcctggttactacgtagatttgtgtacacttgtaggtaaaagggttgcaaacttgcaattgcctctggtgtagggttaggcagttagctgatgtttgtgaatattagacatcaccattctttacttaatggtttgttgaagcatccgcagcattgaatcgcgtggtccttctgtttttcgtcgcataggaaactggttcttctgat

SEQ ID NO: 26205 - DNA, 1307 bp, Zea Mays
cctcgccattgctttgcgctctccggccccccgctcctccctgttctgcactcgccgtcagatttcgcaagaaccctcgttccctgcggcctcttgttggtttggtcggccgatacgtttgatctgtagagcaagacgacgagcctggagagaggaagaagtgcaccggcgattgtagaaccagcaccggcggaggagttgaagacgccgattcgagcccggcgaagtgctcgggacgtggcctcgtcgagcccggcgaaggccgcgtcggcattgaacatgatgagatacccgaggcctagctcagatggcctcccgctgcccaatggcatcgggagcggcggcggcggcgcgagcaagaagcctgcaacgccgccgcccagatcgagcaaggatgacgtggcgccggccgtcgccaccgacagctcccgactcgcggcgttcctggcctcgacgtcgctcgagtccaaggcgcgcgcccgcgcgccgccggcgcagcccgcgcctacctcggcggccaccgctgccgtcgccgcgaccaagagccctgttcgcgaccacgaccacggccatggccacagccacggcgcctcctccgaccactccgaccccgcctccccgagctccaccggaaccggcgaattgctgctccagtggggacagaacaagcgcatgcgctgccgccgagactccgcgtccccgtcgccgcagcaccggcaggccggcggcaagatccagcggcgctcgtcgtccccggcggtggacaagctgatgccgcccccgagcgcggcgccctacacccgcgggtccaacctccgctccgtctcgtctctccctccgcgctccggctccggctccggctccggatcctctgccggcgccctcccccacccgctcagatcagcggaggaccgtgcggcggggaagttctcggcggcgagggccgagaagcagcgtgcggtgtccccgggctccgtgatgggcatgggcgtcccggtcccggacccgaggcggcagcagcagcagcagcatgccggcgcggcggcagcggcgacgtcgaagccggcgtcgaaggtggagatgccgcggatctacaccacgctgtctcggaaggagaaggaggaggacttcatggccatgaagggcaccaagctgccgcagcgccccaagcggcggcccaagatcgtcgagaagaccgtcagtgcgatctgccccgggatgtggctgacggatgtgaccaggggccggtacgaggtgcgcgagaagaagtgccccaagaagcggcgcgggggcggggcggctcctgc

SEQ ID NO: 26206 - DNA, 772 bp, Zea Mays
tcatgtgcaccgcctacccgactaatggtcgaccagcacacaatatgaaaaatttccctcgccgacagtgctccctcatcttaccatgcctcgctgcacaccaccaccactaaagctcgcagccgagttcctccatctccggcgccggcccactacagcagagggcctcccatggcgtttgtttccccaacgctcaccccgtcaacaaccatcgacctcgcacagcagccgcgacgccagttcacgcagccacgtggattccctcctcttcgcgccctcggtatgctcgacgtattgcagcggcagtcccgacgctatgccgtgacccttggtgaggctctttgctgtcctagccgctggatcgagccttgttccagctcggcgagagcagccgcgccgacgatctacacagccccatcctcgacgccaaaattcttcgccccttgtcgtcgtcgcgcttcgcgcgtcgtttctcgacagaaagccaaaccagcatgcaggcatgcgctacacgagtcggccaggttgttcgctttagaaaaattgtgattttgttttatttacgattcagtcgatggcgtgaatatgtgcgtgaaagtataatttgtatgaatggacgcgtgtaggaaagaaaatgaaacagaaaagaactcgggtatttttattttgataggaaaaaataagcgatgcgttgtttgatgcgaaaactaagttacaaaatgcggattatgttttgggaaatgcatcgatatgtgtttatgtgaaaagtggt

SEQ ID NO: 26207 - DNA, 1379 bp, Zea Mays
caatggcagctcctaaatgtaatccatttatatatgttccaggctctcgaacgtcttgttgataattatatgttgacatgtgaggaagaatctgagttattatcctctctgcaatttggggaagaagatgggtggctatcatcattctactcgtgtttgatcacgaagcatgaaaaagaatatttagttgaagcaaaattcaagaaacttgaagaagaggcctgcaatattttgtcctcgagttctggtgaaacaatgaaaaacaacattgatgttttggtttgcaaagctgaatactaccaccagagtggagagtaccaaaagtgttttaaactcacatcctcgttacttgagagagaccctttccatctaaagtgcacattagttcatttggcaactgcaatggagcttggtcattccaatgatctttatcttttagcatgcaacttagtgaaggattatcctgaaaaagctctttcatggtttgctgtcggttgctattactactgtattaagaagtatgatcaagcgcgaagatacttcggcaaagctacaggtttagatgggacgtttcctcctgcttggattggtacaggcattgcctatgctgctcaagaggaaggtgaccaagcaatggctgcatttcggacggcagctcggttatttcctggatgtcatctgccaactttatacatgggcatgcaatatgtgcgaatgcacaatttcaaacttgcagagcagttcttcacacaagcaaaatccatctgcccatctgatccacttatttacaatgagttgggggttgttgcgtataatatgaaggagtaccgaaaagcagttcagttgtttgagttaacattggaccatacttcatcctctctgaatgaaatgtgggaaccaacattggtgaatcttgggcatgcacttcggaaactcaaggaatatcagaaagcagtatcatgttatgaaaaggcactcacttttccaaccaaaagtttgagtgcatttgctggtcttgcttatagttaccatcttatggataattttgaggctgccataaattattaccacaaggctctatggttgaaaccagacgaccagttttgcacagagatgctaacatatgctcttgagtccatctgtcaaagcactgctcgtagaaggcctagttgaggtttgctaatcgcaacatgctaggatattctttaccttacaagactagtagccaaattatatgtaaatttgttgttgtacaatatgtaattgctcaagttcatttcagccacttgaggctgatcgcattgtaaagccaaagttttcgatcttttaatttttatacaccccctccgttgtcatataataattaagttcgtcccgat

SEQ ID NO: 26208 - DNA, 2304 bp, Zea Mays
gtggcgaccggcacatcaacatcagagagagggtggaacagacagagaaagagggactgtggtgtgcacatggaggagctctccaacaaggctctggcaccaagcttgctttcgctgtgcctggatgcggtagctgatcgtctcatcagcgacaacgccgccgcaggcggcggcgtgggccgaacgggttcgtcaggagggtgcagcggcggcggcggtctcgccggattctcggaagatgatggaggggaggcagacgaggaccgcctgcatccacaggagttggcggaggggcttccctgggagcttctccatcggctggcgtcccggctcccgcctgtcgtacttgagtcactccatcacgctgcacatgcccgatactgttctgctgaaactacttctggacttggagtgcaagatggagaaagacgtggggtgaaacgttcaaggtgtgaagatttcaacagcacttggcagttgttgttcaaacttcgctggcccctgggtggtaatactggacataataatttggtcactgtggattggcagcaaaagtattgggaaaagcatttacaagagtgtttaaatgaagctgcagaacatgcttttcttccttttttttgtgggagtattggtgagctgagtatatcagctaaaatcatgaattccatctaccagagcatgggcacatctcaacaacattcaagattagcatatcaatgcagcaaatttggttgctatgtgaggagcttgagactgcaaggtgttctttgcactgcagaaacttatgtcttgttgcaacaatgcaagctggaaagattaatgttcataagaattatatcagacctagagattgctggctggctttcggaattgaacaaatgttctacaaacttattagcgctgaaatcagatatttttatgaactccctgtctgttcttaacctgagggaaaataatttgcaaaaggatgatgttgtagatcttcacaaaattctaataaaaatgcctaacttaagagatttagatataagtggcaatccagtcatggatgaaggtatcagatcattgatccctttcatttcatggtctattcaaaaggaaaatccacttctgagattaacagttgagaactgtgagttgtccagtattggtgtgattatacttctggagtgcctcacaaatgcgaagcaactccttgatgtgctatctattgcagacaatcatctagggagttctgtggcagctgcattggccagattcttgggttcacatgtacgggctttaaatgctacagatatcggcttgggaacagtaggcttccaaatacttgaggaaacattgccaacagaagtagctctttcccacatcaacatcagtaagaatcgtggtgggatcagagcagcatattttgtttccagattaatatgtcgagcaccagaccttgtctcagtcaatgcagcagggaaccttttaccacctgaatcattggaagtcatctgtaactccttgaagcaagggacttgtaatttggagcgagtggacctgactggcaacatgcatttatcaagcaatatttttcctgcattccttgaattcaagaagcatggaaagccaattctggtagtaccaccaaacttgagcacttctgctccatatgatgatgacccatgactactatgtaccgtataagccctagtgctgctcaagtcacttcagttggaactaaataaatagtgatagtatttttttggatcattcccaagaatcctaaccactagatcaaaacacaacacaaattgtacatctgtttagattcgacacggctttcgtcggtgaagctttgcgctagggcagcgacggtcgggaaagcgagcttgatgtcgacggtggactttctgttgctgacagacttccctctagatcggttaaggtttgaggtggagatcgaaaatgattgtgaatcttgtacctttaggtgtcggcctccacctctttatttatagggctacgcaacagatgctcaacaaccttgatgctctcgatcagggcgtgaggtcaggggtctagttttcggttgggtcaagttgggtcaactagtggagatcaattctaacattttcccctttaatctcattttataccttcagctttatacctttaatttttttgatattccattatagataagtgcatagagcatgtttcatcgtcacgattaatcaccgatagacttagcaactacagtacatatctctatcctgaaatagattctttaactttgggccttttattgttcggaaa

SEQ ID NO: 26209 - DNA, 1549 bp, Zea Mays
aaatggccgccagcgccaccgacgccgacgccggcgccgggctcagatcggagttcctgcaggtcctgctcagccgccgccgcgatctcctagtgcctctcacggtggagcaagggagtccggtgaaggacccgatgtaccagaatcctccgtcgaccatggaggcaaatccgatggagtcgtgccccagtaaagaggtggagaacttgagggagaagctggttgaagaaaatttctaccttatcactgagctaggtgaacaaggacgagtacctgtacttctgctgaagcttgacgaccccgtccctagaagaaaaccagctatcgtgttcctgcacagctcttacaagtgcaaagagtggctgcgcccactgcttgaggcatatgcttccaagggctacgtctgtgtggctattgactcgcgctatcacggcgaaagggccagcaatgaaaccacttacatagatatagatttttacgacgcgcgcgacgaggaatctcagccaaattttgtttggacgtcgacttttctgcaggtgtgggacttggtaaagcttggagactacctcggcgagagggaggacgtggatccctgtagggttgggatcaccggcgaatcgctgggagggatgcacgcgtggtttgctgcttttgtggacacacggtacagtgtcgtcgttcctatcatcggtgttcaggtgggccattgacaacaacatgtggctggctagggtgaatagcataaggcctttatttgaagaagcaagaattgacttaggaaagagcgaattagatacagaagttgttgaaagggtttgggaaaagatagcaccaggcctggactcgcaatttgatgccccctattcacttcctttgcttgcaccacggccgttgctacttctaaatggcgctgaagatcctcgttgcccaataagtggtttaggagaagctatttcaaaaactgctaaagcttacgaagaatctggttgcgcggagaagttcatgtattatagtcttaaagaagaatttggagagttgtagcatatcaaatctgggccctttttaaaagccacccaagataagatcatggacttttggagttttctccaagtagagggtctaggcatgcaaattattataatcctcatcactttacaatgcaatgaggaatgtaggttgttattcaaccaaaaatatcatatatttagatatcttcgtactcactctgttcttttttatttatcgtgttttagttcaataatgaactatcgaacgataatattcgagaatgaagttagcatattttatggacgcaaactagaactgattattgctggtgagtgacagaaaagtagcactgactaccagctaggtctaatcggctagcgttttaggttgtctgcagtggggcactcaacgtaccgagatagcgtaataaattcgctacagcaaagcactgcatgtgctaccctattttaccatagggtgcacgaacgacgcgtcgatccactgcatgcgggtgtacgtgtatagaagagaattgaaaaaa

SEQ ID NO: 26210 - DNA, 807 bp, Zea Mays
cttgcccaatgcggtcgctggcgctcatgctgacgtggtccgtcgccaccgtgctcactctcctcgccgtgggctcgccccatccaccacctcagcaatgctagaacggaaaaccaggttgtgcaaaagagtacttgcgactttgaaggtcttatggtcagtaatagaggatatgacgaagtacatatcaccagaggatgcaaaaagattgatatctaaagagactgtattttgtaatgtaacatttggtgtggtggatgcaattccatgatagcgaatggcataagatttaatgctaagaagaaacaagttggaaattattactctaccaaggtatatactagagcgaagagcgaacaacaatctaagattgcagcaagaaaggtccagcaagaaccagattatgtacatgtatatgtgtggatagaactaaccgccgatattatcctaaatctaagcacggtcacccacaaaaaatgtgtaatttgcttcttcccagacatacgaaatgtgttatgcggactatgttggctattggaaaggcattctaaatgccgtctgtaatgtttgatggttacaaactattgtcgtgctatgtaatatgcggtcttgacataaccgctaggtttgtgatgttgttgcatgttacagctgcaactttatattattgtgccatgtgttatttgtgttcttttcttttttgctatcattatgtctctctctattacaagagaaaataatgtagtatctataactttggttaagcttcattttcagcggttgatcctaacacctccaactgtaggg

SEQ ID NO: 26211 - DNA, 3986 bp, Zea Mays
gccaaaatccggccagaaacctcgtccggcggcatcagcatttcctctcccacatttcgccccgccctacgcctacacgacggcgctgcggcaagcgccgaccaatccatggcagacgaggcggagtggaacgaggctgaggccgggatcgcggccccgggcgcgggcgtggctcctccagcgcccggaggcggcgaggaaaccaagaggaagagggggaggcccaaaggtagcctcgacacgtataagaggcggaggcggaggcggcgcaccggcgacctggtgtcggcggtgcccgcggctagcctcggggatatgggccactcatgtggctgcattcccgctcccccactccctcccccctgcactgtgtacactgtacgcgacggcggcgtggcaatcacccctcaatccatggaggacgaagcggagggggtcgaggctgagtccgggaatgcgggcgcggcctccgccgccagagacggcgaggaaaccaagcggaagaggggaagtcccgaaggtagcttgaatgagaggaacaaggacaggacgcctaagcccaaggccaaggggaggcggaggcggcgcaccgacgaccagaccttgtcggtgtccgcggtgagcctcggggatctagggctcggggtagcggcggggaccaggtcgatcagagagaggaggccggcgcccaatgcgttcttcgacgtgggcagcgacagcgatactgagcatgatgatgatgatgatgaggagcaaactacgattgatcaggccaatcacgagagtgctaaaacaggtgattctgtaaagaagggaggaagacccaggaaaatggaagcgggccaattgcatactaggacgcagatttccaatggtaaaagcaacggccatacaaatgggaatcctgctgggaagaagaggggaaggggaagacccaagaaactgacagtagaacaagcgattactaggtgccagttctccaatggtgaaacaaacaagagtggtgccgaggcagcaaggagcaaacagtcaaggaatcgtaggatttcacagaatgcaaagaagcggaaaagagatgaagggaaggagtctatgacaaaaaagttgaacaaacggagtaagatgttgactggggaaaatgccctcatgtgccacaagtgcccatattgtcgcaagaactgtaattgcaaggcatgcctaaggatgaggggagttgaagagcctccaaaaaaggagatctctaaagaaaatgaaattcgctatgcttttcatattgtaaccatgctgcttccctggatgagagaactgcgacaagaacagttggaggagaaggaagtagaggctaatatacaaggagtttcaatgaatgagataaaagtggaacaagctgagtttgacctagatgatcgtgtatattgcgataggtgtaaaacatctattgttgattttcatagaagctgcaagcgttgtttctacgatctttgccttaattgctgcaaggagcttcgcaaaggtgagatcccaggaggagaagaggtggaatatgtgccacctgaacctaaaggtaggagttattcttttggcaagattcatctactgaaggatgctgatagaagtaagaactcctcaaatggcgagtcttacaacggcatgcctgctgttgggaactccaataatggtctgttgctctggaaagcaaaaagtaatggtagcataccttgtccaccaaaggaagtaggaggctgtggtagtacacttctggacctcaagtgtttgtttccagagaagatgtttgccgagctagaatatagagctgacaaagttctcaggagtgggacattagctaaagcaatggttagtagaagtgatcggtgcccttgcttcaatcaatcaggcaagataagaactgaaagcaaatcagtaagggaggctgcaagcaggaagggctcaagcgataacttcctatactgtccagttgctattggtattcaagatgatgacatagtgcattttcagatgcattgggcaaagggtgagccagttgttgtttctgatgtccttcagttaacctctggtctgagttgggagccaatggtaatgtggcgggcattgcgggaaagatccaaaggcaaagcagaagatgagcaatttgctgtttgggcgatagactgccttgattggtgtgaggtggaaattaacatacataggttcttttcgggatatacaacaggcagaactcatgctaggactcactggcctcagatgcttaagctaaaagactggcctccttctagttcctttgacaagcgattgccgcggcatggtgccgaatttattagcgcattgccatttcgtgagtatactgatccacgatatggcccgctaaatcttgcagccaagcttcctgctggtgtcttgaagccagatcttggacccaaaagttacattgcttatgggttctacaaagaattgggcaggggcgattctgtgaccaagcttcactgtgacatgtctgatgcagtaaatatcttaacacacacagctgaagtcacttgtcagactgatattggcttaattgaaaaaatccaaaaagacatgagagagcaagatctgcaggaactatatgggggtctaaattcccgctctgagctcaagttgtcaccagctccaactgaatgcagggatgaatctgttgatgaaggattgaagacctcatatagtagagaaggcaattgtgtaaatagagacaattataatggtttggacatcaatgcattaccacctgatgacgatggagatattgcaaaggataaagaatcatctcctggatcagagtggcaaagtgaactaggtcagagttcagatcacaacaatggggtcaacacaactgatgagatgtacaatggagctcattacatttcacacaatcaaaaaagcactggcaggaaagttggcattaaacctcaagaagagaaatctgaaaaggctgattgcagtggcacatgtgcttatctaaaaggaagttctgaagataatccggaaatgcctattgtggagagctcagaggagcagagcaccggtggtgctctatgggatatcttccgcagacaggattctgataaattgcaagattatcttaggaagcattgctctgaattccggcatatttactgcaatccagtcaaaaaggtattccacccaattcatgatcagtccttttacttaactgaggagcataagagaaagctcaaggaagaatatggtattgaaccctggacgtttgaacagaagcttggtgaagctgttttcattcctgctggatgtcctcaccaagtgagaaatttgaagtcctgcatcaaagttgcgcttgattttgtttccccagaaaatgttggtgagtgtgttaagctgacggaggagtttagacgacttccatctttccacaaggctaaagaagacaaactagagatcaagaagatggctgttcatgccctgaacgaagctgtaaacttcctggatcctcgttcctcagaagagttgaaaattggggttggtgagaacatctgtgaggatgaatctgtagatgagaaggagctgccgcctagaagaggagttgaagtgtcaggcgttgatgagaagcctaaatagaaggcgagggaggcatcaagtccaaaagtgaagctgctgatgaggtcgcccattttaggttctcggaatcgtggttaattgatttgtcaaagcccctgttcatgtatggtgatcgctggctgacaccgatggatgaagagaagcaggacacgtgtgtgctgctgatatgtcgtgtcggcgagtgacatgaatatcatccctatccctatgtttaagtgcgaggcgccatcagaaatcagaacatcaaaaggaagcaaaatcaccttattatcaatgtcgcgatccagaagatcattcaccgtgcaaccagcccccctgagaaggacagctccacatcc

SEQ ID NO: 26212 - DNA, 2072 bp, Zea Mays
acgacacgcgccgtaaaagaaagcgttagtccctttccagctcgtaggcgaatcccactcgccgtcgccgcaacggctagtgttgaaaccggctcctcccgactgttgcgatacgaactctttctgagtcccgaccgttggaaccgctcctctcgcctcctcgacccactccgccttgcctggcagcagcagcgctcgcccgcgcgctcgtttatattatatctgtgcgactgtgcctcccctccccgagccatagcctcctcgtcccctcgagaactgtaccatcacgcgccgcctttgattgagcagggactgggagagaggagaagagagggtgaaagggggcaagaaaacgcttcttgttgcctttgtgcttcagcggatccgcggtggctgcgcacgccggcggggaagaggagtcgcgggcggcgcgcctccagtcttttttcgcctccgtgctctccgggctcttcggccaggccgaggccgaggacgaggacgaggacgaagagatgcccacgcgcaaccacaacgctgccgcggctgccgctccgcagcatcaccatcacaaccgaggaaacctcagctgcaggagcagatcaatcgccccatcacgcgaagcttcggcgctcagctcgtgaagaacgtgcaggcgaatgccgcaatcaagaatgccgcaatcctacccgcgaggcatgcgccgaggcaggaaaggaaggctcctgccaagcagccgcctcctgaggatgtcatagtactcagctccgactctgaacagagcaggacgcagttggagagcagcgctagctccgtccggtcgaggaagaaggtcatcaacaccctttcttctgtgctctcggctcgctcaaaggctgcctgtggaatcactgataagagacggcaagtagcagtgatcgaagacatcgacaagttggacgtcaacaatgagctcgcagttgtggaatacattgaggacatctacacgttctacaagattgctcagcatgacagacggccatgtgattatatagacacccaagtcgagatcaaccctaagatgagggctatcctggctggttggataattgaagtacaccacaagttcgagctgatgccggaaactctctacttgaccatgtacatcatcgatcagtacctctcgctgcaaccagtcctgcgaagggagctgcagctggtcggtgtttcagctatgctgatcgcctgcaagtacgaggagatttgggccccagaggtgaacgatttcattcttatatcagacagtgcatacagcagggagcagatcctttcgatggagaagggaatcctgaatagcctggagtggaacctcactgtccctacagtatacatgttccttgttcgttttctgaaggcggcagccttgggcaacaaagttgagaaagagatggagaatatggtcttcttcttcgctgaactggcgctgatgcagtacggcttggtgacgcggctgccttcgctggtcgctgcttcggttgtctacgcagccaggctcactctcaagagggctcccctctggaccgacaccctcaagcaccacacgggcttcagagagtcagagacagagctaatcgagtgcacgaagttgctggtcagcgcacactcgtccgccgctgacagcaagctgaggtctgtatacaagaagtattccagtgagcagttcggaggtgtcgcgcttcgcccacccgcagccgcagtggagatcaagtaaacgaagataacttcgtgctagtgtttgttagtataatgtaatggaaggcgagcctgacattcgctagggtctatccgtctatgtttgcttgtcggggtagtcaagaaagtttgaatgcttgaggcagccgtttgtttggtaggctgttctcagagtccaggtgttatctgacttgtgatggcatgttgtgtttcatgtgatggatatcattagaatcctaatctagtacgatatctattcatgaatataaatggtatttattcatttgttcataaatctgaattgaaaatggccctacacttttgaaaactaaaatagaataaaa

SEQ ID NO: 26213 - DNA, 2423 bp, Zea Mays
gaggggataagcaggggcaagtttctgcaacttaaataaatagagtgaatatgactgacatgaattctgatgagattcttgaggttcctgacactcctgaccgattacagcagtcaaaataccatgtttccagctctattgttgggagggatggtacaatggcagctgctaatccatcaccacagcgcaaatttagaattagattcaagaacaattccgtgcaaggttcatcaagtcaaaataatggttgtagcatactgcctgcagctttagatactgatcatattttcaaacaagctgaagcagcacagattctggaactgtctaaagactataaggcaaaattttccctacagaaacctgacagcacaaggatatctgttgacagtgaaaagagggctggaaaacatggctttgatcagagcagaagcatttcgaacaatataagttgtagtgtgactggaggaaggaaccctaccttccaagttaaagatggagaggttggtcagcaagatgcaggtcatcagagtgcaaactttctagacataggaccaggttttcctactattcaagtgggaaaaccaggatacagattatgcactcgcactactgataagctgaaaggtgtaacaggtgctgatgtttgtccaggatcaagttctggggaggtcaaaggggacttgatcactaacaaggtcattgcaggacctacaagccctctgcgtgtttttcctcgaaggcatgtgggccaaaaaaggctggtacgcaatggatgtatttccccctctaacatagccaagacagatgcaaaagttaatgaaaaacaggaaatgtgctctttaagtgaacatttggaccatccgcatcagcctgatgcatttgacggaggtgatgtgattgacctcacggagaattcaccaataatgacaaggcagagatctgaagtgaacaataaattgatgtctggacacaatatggacacaagggccgcaaaaaagctgagaacagacagatttggcaggactttggttcggcagtccaaatgtcatgcaaacaacagcagttgttctgaagttagcttatcaggcctcaacaacaatggaaaaggaattgactgtgatatcttggatagtgatcaaactggagaagctaatttgaggggggttgatcttagtactgctggaacttatctaaacaaaaacttttctgatataagcacggagcaaggttggagaacaacacacaaccacacaagtaaattacccatttcgtttatgggtaatataactagcagttccggatgggaatctggatcttctaccacacgatctaatcaaaaccatggatctgctggaggcaagcatagctctgttagtggagcaaacataatagttcctgataagatagggaataaaacaataatgcttggtagagaaaggagaaaacaaacctcaacttcttcccatattggtgaaagctctagtgctgctgacgaacctagaggtgatcttcaatcgtcaaaaatatcagctggcccaaatcatagcagtcatcagcataatattcctgtaataaacattgatgacgtatcccctgaagctagacctagttcgagtggattcactaatagaactcttgatcctaccatagaagcacaattggagtcggatgagttattggctcgccaactccaggagcagctctacaatgaatctgctcgttttgccccaacagaagagattgatgcaattgtagcaatgtcacttcaacatgaagaagatactcatcggacatctaggaccttaaggaggttccaaaaccatactagaggtgctcgggctactcgtttgagttcttatcgaaatgctcttagggctgaattagcaacagcaaacaatatgatttcccgtcagcggaatactgctccaataaatttgggattgagagctgctttagcaagatatcctggtgctttgcacattcaaccaaacattgacttaaatgactatgatgcactgcttgctctggatgaaaataaccaccagcacactggtgcttcagaaagccagatcaataatttgccacagtcagtagttcagtccaatagcattgaagatccatgttctgtctgccttgaaaatccttctgtgggagatactatccgccatttgccttgctttcacaagttccataaagagtgtattgacgagtggcttaggagaaagaaactgtgcccagtctgcaagtttgggattaactgaagtttgccgtaccagtctacagtggagttctacttggtagtggcagcgacgaggttctgcaagtttgggattaactgaagtttgccgtaccagtctacagtggagttctacttggtagtggcagcgacgaggtgctgcaatttctcatacgggatgctttcc

SEQ ID NO: 26214 - DNA, 1549 bp, Zea Mays
tgattctgctctagcctcagaccggccgtcgctctaaaaagatcattacgcacacaatctgctggtacctatttggacagcgcaattacttaagctatttgtattcggatctgatccaaccctggtggtcagctggactcatcgcccatggagcacactaagtcaggccccagcagttggccagaactggccgacgtggtgccggtgccgcaggacgatgggcctagccctgtggtgtccatcgcctatcgagatgactttcgtgaggtcatggattacttccgcgccctctacctcaccggtgagcgaagccctcgcgctctccgcctcaccgccgaggccatcgagctcaaccccggcaactacactgtctggcatttccggcgccttattctggagtcactagattttgatttactagaggagatgaaatttgtcgaaaaaattgctgaatgcaatccaaaaaattaccaaatctggcaccataagagatggcttgctgagaaattaggacctggtattgcaaacaaagagcatgaattcacaatgaagatacttgctattgatgcaaaaaattatcatgcttggtctcataggcagtgggttcttcaagcgttggggggatgggagactgaattagaatactgtgaccacttacttaaggaagacgtcttcaataattcagcttggaatcagagatactttgttataacaagatcaccatttcttggtggccttgcggcaatgcgtgattcagaagtagactacacaattgaagctattctagcaaacgctcagaatgaaagcccctggaggtacctcaagggtctatacaagggtgagaataacctgctagtagaggacgagcgcatctctgctgtttgtttcaaggtcctgaagaatgattggacttgtgtatttgctttgagtttgctgctcgatcttctctgcactggtttgcagccttcagatgaacttaggtccactcttgaaacaataaggagctcccatcctgaaaccgcggatgatgatcctgcagccgctgtttgctgtatcctgcagaaatgtgatcccctgcgggtaaattattggtcttggttcaaggacactctttctcagatctcatgacttcacatgggttcaccccttgtccgcgctggtccgggctctgtgagatagacatgttttagatagtttcattggacacccaaacagagcggacagagtgtatggctgctaccttctccgtgactgaaagcagtgcttgtaacgattttgtttagtaaaatttgtgagtgttactgctccaaacaacaccttatgcaaccatatttgaatatttcacatgtaagcttgaatccaggtgtgtttgttaatgtattacaattgccatgggagcctaaatgagacccataatcacttccactagagtcggaagaccgtgtcgagcagttcactcatatggtcacttaaagcactcttctgcactgtaaattgtaatattcgcagagttttaaatatgggtatgacgatgagtacgctgctgaaa

SEQ ID NO: 26215 - DNA, 1719 bp, Zea Mays
gctagctctctctcccccatcagcagaccaccacccaatcacaccagctctctctagagctagccctctcttcctccaacacttgttgatcccctcccatctcctcaagccttcttcactgaatttctggccggtcgatcgtcatgcacagctacagagccatgcacccgtacactcatcactcgtaccagcaccacaccgcggccgttgcgcccaccaagcacggccacggccacggacatggacatggccatggcgacgaggaggacgaccagtccatgctgctcctctccctctggcctcctggccaccaccacggcaacgccgctgcttcatcggcgtgctcgtctcccccgatctgcgccagcgccaccaccacctctatggcagccgctgcctcctcccccgcttcttacccttggctcacccaccaaagcctttacaataatgccggctgcggcggagggagcagcagcagcagccacagtagcttcctgttccaggagcatcagcaggagccaggtgtcagcatctcactgtccatagccccgccgtgcagcaacaacgcggcttcgtcctgtggtggcggtggcttcgctgcaccgccggcggcaccgtcgacggtgacgacgaccgtgacgccgggcgggggccaggttcccagacagtactggatcccctccgccgccgagatcctggtcggctccacgcagttctcctgcgccgtctgcaacaagaccttcaaccgcttcaacaacatgcagtaccgcaaggggtcggagtccctgcgcggcgccatcacggtgggcacggctccgccggcgtcgctgatgcggctgccgtgctactgctgcgcggaaggctgccggaacaacatcgagcacccgcgggcgcggccgctcaaggatttccgcacgctgcagacgcactaccggcgcaagcacggcgcgcggccgtacgcgtgccggcgctgcggcaagcggttcgccgtgcgtggggactggcgcacgcacgagaagaactgcggcaagctctggttctgcgtctgcggctccgacttcaagcacaaacggtcgctcaaggaccacgtccgctccttcggcggcggccacgcgccgcacctcgtcgagtccgtcgctgtcgaggacgaggaggaggaggacgacgaccacgacgacgacgacctgcagacttttgacgacaacggcggcgccggcgcagaccccagcgacatggtcgtcatctaggtctaggcttcctcattcgaccgatctagtactactactactactccatcgattgacatgaatagttctcgatccgccacttattaagttattagctagcttgctcatccctaaattagctgccgacttttttagctagctatagatttcagtagcttatatactagcttgttggttctgattagagctgcaatatttcatgagtcgtcgtcgacgacgtaggtattacgtataggtacgtgatgctttgcgactgcaatatttttgcatggcaatgcattactgctaaggtcgacgtacgtacaagtagactagctagcatgcagtttgaacttgttggcttttaatcgcatgtgtcaaagctcagtttgtcgtactgcggccctgcagataggtagagagagaaagagatagtttgtacggtgtgtcatggtcatttcctgtatctgtgtcgtatggtctttatctgtgc

SEQ ID NO: 26216 - DNA, 3141 bp, Zea Mays
ctgcaactgcaagtctgcaaggcggagaagccggtcgttcgttcatccggtgcgctatcccaaatacagcggacaacttcgcacctttttcacccatcactcgcgaacgcaggtcgcactgtcgcagcatgcttcgcctctccatcgccgtcctcacctcacctctcctccccacgtccgtccccgccgtccgaccccatccgcgccgcctactccgcctccgtctgcgctccctcgccgcctcctcctcgctctcgccgtccgcccgcagcctccgcctcctcgagtggggcaaggtctgcgacgccgtcgcctccttcgccggcactgcccacggccgcgacgccacaacgaaacaactgtgggaggtggaggatgtgagctatgagcagagccagatgctgctccaggagacggaggcggccgtgttgctgcttgacaacgctggtggggcaatggatttctcggggttggatacagttgcgatagagtcagcaatacatagtgtctctgggggcgctgtgataaaaggcctggaagcaatggcagtcactagcctgatgatgtttgttgaatccttgcaagtaaacattaaagctgccatgaaactggatgaaggctcatgtagtcgattaacaacacttacagaaacaattttagatgctgtcattaacaagtcattagtgaaatccatacaagatattgttgatgatgatggctctgttaaagacactgcaagccctgagctgagacggtatcgagagcaagtacagcgtctagaaaacaggttatatcagcttatggacaagttgatgcgcaatgctgatgatgaagcttcattgtcggaagtatgcattgtaaatggaagatgctgcattagaacaaccatggataattcttcattttttgatggattattgctctccaggtcagatgctggaagcatgatagaaccaattgttgctgttccgttaaacgatgagttgcaggaatcaagagcattagtggctaaagctgaactggatgtcttatcaaaacttactgataagattcgtcttgatcttgatagcattcagaatttgcttcaggaaacaattaaactcgataagatcgcagctcgtgcaaaatacagtattgcatatgatggaacatttcctgacctgtatttgccgaactttgagaatgaaactgtcactagtgctacaggtggatctatcaaacaaatttcctcagctcaacttcctaagaaggcatggaaactgtatatgccaaatgcataccatccactactacttcagcggcatcaggaaaatatccatcgtgccaaaagggatgttgcaagtgccacagcggagatccggaggaggaggatatatgggcaagatattgcagaagaagatcaattggcatcagaccttgattccatgaaacttagggtttcccaactggagaaagaccagccagtaccagtagattttatgattgctgaagaaactactgtcttggtgataactggcccaaatacagggggtaaaacaatcagcttgaagacggttggcctggcatcattgatggctaagataggtctatacattctagcttctgaaccagtaaaaattccatggttcaatgctgtttatgctgacattggagatgagcaatctctgacccaatcactctctacattttctggacatctgaagcagattggtgccattcgtgcagagtcaacttcagagtccttggtccttttggatgaggtaggcgctgggacaaacccacttgaaggagccgctctggggatgtctcttttggagtcttttgctgaagctggctcctttctgactctagcaacaactcatcatggagaactcaaaacactaaaatacagcaataactcatttgagaatgcatgcatggaatttgatgaagagaacctaaagcctacattcaagattctgtggggaataccaggtcgctcgaatgcaatcaatattactgaaaggctgggtttgcctttggatatagtagaaagttccaggcgtttacttggaacagctggtgcagagataaatgctttgataatggacatggaaagactcaaacaagaatatcaacaacatcttcaggaggcacaatatcttcttatgcagtccaaggagcttcataacaacttggaactggcacaaaagagcattgtagaccacacttctgctcagagaaaacgaaaggcgagagtaatttcagagtatgctgttatggcccgttctatcattcgtaagaagtttcagcagttccaagaatctgctatagctgaaagagtgaaagaagaagagaatgctgtgaatgatgccaaatctgacagagtgaaggatcctatgccggcaaatacatctgccattggaaacatacagaacatagataccagcttgggcatgacagccaacgatgatgaagatgaggttccagaagttggagattcagtgtacgttcctaagctcaagaatgaagctaccgtggtgaaaatagattcgtccaaaaatgaagtgcaagtccaagccggtatgatgaagctcaaactaaagctgaaagatgttaaggttcagaagcggaaagtatccagatagaacatctacactgtcctgcactagcagatattcagataaatatgcatatgctgtttcgtccaattcgtaccatttcattggcctcattttcagcaataataataatgtggtctttcaagtgaaaatatggatttattatctgcatgtacttctcattcttcactacttgcggtactcaaaaccttcagcagagttccagaacatcttcagattatcacttctttatagaaaatgagcttgtgatttatcacttgtctatataaattttagttcttcgaaggttcttaaaaagaagtagcatgccaatgaaatagttggcactagctggttatttgaaattgccaaattggccacattgtagagatgtttctgtgcggcgccggttttatatggcttcacgctatttccaggagccttctatcccatctatctcatttcttattttaaattttactatgttttttccctaaaccctaaattgtactatgtaaacactgcaatataatgaacggca

SEQ ID NO: 26217 - DNA, 1758 bp, Zea Mays
gcgggtttgattatgcgttaagcacgactataatccctaccgagctatcctatccctatcccctcttttgctttccttcccccgcctgctcaattcttctcgtgctgtcacccctttcttcaatcgcctcccgattcccgcggggctcgcagatcccggaaggacaccccgccgcccccgatgagccgccaccgggtcgagacctgcgactcgtggcggcccccgcggaagaaccacgccggtgcgccgccgctcctccgcgcggggcctcggctcctcgccttcgcctcgctctccgtccgcgacggcggggactccgccgcggccgtcgccaaggcggttgaggaggcggttgtcgtacgatccgatgaggtgaaggaggcggtggccggggaggagaggaagaagacgaagtcgacggagcgcaggctgccccccgcggcgcagctggtgagccatccgctcgcgctgctggcgctagtacccaacagcgccgcgatctttgccgcgggggccgccgcgggcactgtagccaagaccgtcaccgcgcccctcgaccgcgtcaagatcctcatgcagacgcatagcgtgcgggtggcgggagagagtgccaagaagggtgttggatttctcgaggctatggcagacattggaaagaaggatgggcttaagggttactggaaaggaaaccttccacaggtcattcgcataattccttacagtgcagtgcaactcttctcgtatgaagtttacaagaaaattttccggagaaaggatggagagctttctgtatttgggagacttgccgctggtgcttgcgcgggcatgacatctacacttgtaacttacccactggatgttctccggctcaggctagcagttcaatctggacacagcactttatctcagagaagtacaagaatagaccagaaacatctctggcaaccgctcttctttcagcaacatttgcaactttgatgtgttatccgctggacactgttaggagacagatgcagatgaaaggcacaccatacaatactgtttttgatgctattccaggcattgtggagcgtgacggtctaactggtctttatagaggttttgtgccaaatgcgttaaaaaatctaccaaatagcagcattaaactgaccgtgtttgacacggtgaagacactgatagctactgggcagaaggagatggacaaattaattcaagaaaatgaggagaaaagaagctaggaaaagagccttggtcaatcttgaaggctttggtagaaagcatgcctcgttgcacactccatatcgctatgtttcctcgtttgctggtgacatattttaggatctaggcagcgcatctttctgttccttttcaaatagatctagtttccagtgctttccgtagcatccacattcatagagatagaggttcgcattgagttgatctctttatctagtgtcggtagcattcccctacagatcttacctattctaatagaggatagtgtatcaatgtgaccgccccagattccttaaatgtaattatacataatagccagaacaatcaaatgtcatggagcacaggagcatgttctccttgtcaatgaattagcatctttgatttaaagaacatattgggtgtctcgtacatcacaaaccgaaggccagatttgctttggaatggttccatccactttagacttcggctagcatgaacttttggttgtgaagccagtttgtattggaggatgcaacaaacgaa

SEQ ID NO: 26218 - DNA, 827 bp, Zea Mays
aaaacggtcatcgcccttgtcttcttcttcttcttcttcatctcaccaacctttcccttcccgtcccaaccgccgtccgcctgctcccttccgctcacctgcttcatctgttttgaagaaaaaaaggaaaacagaaggaagagagtaaaagaggcctgcgctgccctgcgccccaggttggaaaacattgatgaagttttgagatatgcacggctttctggctatctctacattagaagtcgatggacccaactccctggtgaaccacctatattagatgatgctgatgtggatgactggcttcctcgctttgttgttctacaagggcagtgtttatactattatctgaaatgtacagatctgagcccacaggaatctacactcttatgtgatgttgttgaagtagggcagcttccagactttgtgccagaagatgaaaagacgagatatgcgttttacctgttgacccgtcaagggttgaggtttgaatgctccagtacctccgaaatacaggttgattcatgggtaagagcactgtcaagtgactgcaaattgcaggatggcgctggtgatgataagatgatgaatacgaggagtagccaagtagaagctgggtcatcatggtagacgatgtatggagtgctgtacagtacaatagtcaatgaaatgtacatacattacatgcatgtaaagggagcaacatagtagacgcattcaacacgagatgacatgttgctcgtggtatttttcaacttttagggagcacacaaatgatgtatttctgtagcaaaaaatccgtcgtccgtttgagtttgatagaccgtaag

SEQ ID NO: 26219 - DNA, 262 bp, Zea Mays
gagtgattacaaaagtgattcaaagaaatatactttgaaatgttataaatatttataagtttgaaatatatgctagctcaatgacaatcctcaataagaagcatagaagagctactttaacctataagaaggtcgtgcccaccggcgcttagcaccttccacagcagcacaaatctagtacctgcaataacatgggttcgaaaaccctgagtacaaagtgtactttcgcaagccttacccgtctaaggaaaaagactctcaa

SEQ ID NO: 26220 - DNA, 4019 bp, Zea Mays
gctgcttgttcttgtcaatagcgctcccaatcctgtcaccatcatcactagtccctcccgccccagctcctctgcctgtaaagatttcgttcgttcctctttcgaatctctgatcccgttctcggtcctcgattccgcctgcgaaagaaactcgtctttgctgcaatctatagaagtagcagggaggactttgtgcagagtttattttccttttcttcttcttcttttggtccggaggaacctagttcgccagtggttgcttgccactgacgaatcacgttcgggttgcgttctccgatccgtcccagcctaattctgggggcgcaggggaaggattcgggacggaaggaactagtttctgtgcttccttggattccacggcaaagcccggctgcgacgtcggcgtcgtctccaccgcattccggctacggttcccaagcaaccttgctgtggtggggatggtgtcgcaggctcccgtggcgggcgccagcctcgccgcgtcgctgtgcaagaagagcaaccgcgtcgcgcgggtgctcgcgtacgcgctgctcgagtggatcctcatcgcgctgctcctcgccaacggcgtcttctcctacctcatatcccggttcgccgccttcttcggcctcgcgccgccgtgcgcgctctgctcccgcctcggcgtcgacagcctcttcgagacccgcccgccgcaccaccgaggcgccgagcccctgcgccgcttgctgtgcgacgcgcacgccgccgagctgtcgcgcctcggctactgcagcgcgcaccgccggctcgcggacgccggggacatgtgcgaggactgcgccgcggcggcagcgcccgggaaggcgctgttgtcgtggatgggccggagcgagctgggtgagcgggacctcgcctgtgcctgctgcggtgtcgcgctcgagagcggcttctactcgccgcccttcttgctcaccacgtcggcgccgcgtggttcagattgtggcctcaagcaagaggaagaggcagcgatgccaaatggagacgtggtcgttgtctccaaggaaggtcctgtgatcgagctcttcgacgataagccgtttgtggaggatgactcaatcggcgtcttggctgccgaggttgttgccaatgttgagcggccggttgctcttgaatcaattgactcgttggtggtcaccatgggcaccgtgtcatctcaatccggtggcgaaggaaaggaagcagttgaccatggtgttgtaaggcagaacaacgtggacatggagaacacagttagtagcaatgaggagaaaattatgccatctgatgataaggtggatgtggttgatcggctgattgatgaacagattgttgccgtagtccttgtgccagcttgtatagaagctacacttgatggtggcataaatgcagacaaaaccgtggatgcctttgctgatcatcagtctcttgaggatgacagtggattggaagttaaggaccagaaaatatcatttgaagatgaggtatttgaaggtgagcaagctgaacaggttactcaacaacaggaactgtgtgctatgccaacagatcctagtgaccatgaatttgttgagaggttagatagaagtactgagttggagcattttccactggctgagtcaaagcataaaatgaactctatgccagtggaagcttctaagcacgttgctgtaactcagattgaggggaagcaggttcaacaagctgaggtaaatcaggagttggattcaataccaaaacgttccagggagcatgctgatcaagaacttgaagtagagagaactgcacaggctgggttggaacaagagtgtgactctgtgccaattgattctgaggaacacggttgcctgttttcatatgctcatactgatgatgagcaagatgaggtgaagcagaaagtcacttctgaaacagcagatgttctacattatgcagcagacacttttaatgttaacacaaactcatggaaagaagatattgaagaggattcaactgaagctgctctaacagccatacatcaaatttgttacgaacctttgacgagcatagtcaagttctctctagatcatagtgtctccgaagaagacagagagcctgatacgccgactcatattgaaggtatatgtgattcacaggaactgctggattctaaagcagttgtttctgatgctaaatctgtagattcaagtgttgctactttgtctactgatctggaaagcactgaattggtgagtgtggatcaactaaaatctgctttggcttccacacgcaaatcattgaacaccctatattctgaacttgaaaatgagaggaacgctgctgctatagctgccgatgaaaccatggcaatgataaaccgcttgcaagaacagaaagctgcaatgcagatggaggcgattcaataccagcggcttatggaggaacagtcagagtatgaccaagaagcactgcagaggttgaatgaactagttgttaagagagagaaggagaagcaagatctggagagagagctcgagctgtatcgccacaaggttcatctctatgaggtaaaggtgaggaaattgtccaggcacaaggctgatgaccagaatggatcatcgtcaacttcatcgagtgctgaggatagtgatgacctttcacaaagtttctatgaaggtgatgaatcttcccatggtattaatggaagcaatgggagtattcctacagatgttgtgctacaagaaactgccaggcatcttgttacccttgatggctcactagctgattttgaggaagagagactatccatactggaacagcttaaagtgctagaagataaactttttgatcttgatgatgaagagtccgataacatgaagcatttctcagaagaaaaccatttaagtggtgcctcaaatggtttctctgatgatgatagctgctttaagctccatgacaagagaaagaatgtaacctacagaggaaagaaactccttccattgttcgacgatgctaccgtggaagctggaaacgtcccccaaggtaatgatgcacagcattcaacagaggtcacactggaccttgctagagagcaacataagcttgcaattgccaatgaaatcgatcaggtacacgagaggctgcatgctcttgaggcagatagggaatacataaaacagtgcgttaggactttgaagaagggagggaaagggtttgatcttcttcaggagatattacagcatcttcgggacctaagaaggattgagcaacgtgcaagtgcaaggaactctggggagctttcgcctcattacctacatcatcacacggattgaagatccctgcctatgtccagcgaatattgcttgaagatggaaatcatacaacaatgataaggggaaaaaaagattgccgactaagtagtattgtcattggagaagttttgttggttcctggagtggaaggagctcctcctggaacacccgtcacagtcggttcgaagataccattgggaaggcagatcacggagcaattctgccttccaaggtccaggattttttttgtggaccacttcccacgttctctttttgtgttggtttagttttcccggtgggttccaaacttttgcccaagggcaagagggtggttggtgagccgcccgggcccctgtggggctgtgtgtttgtggggggtgtggcggcaatcatggccttgtgcagaagctttagaattcattaacctgaagacatgccgatgccagctttgctgccagatatgttgggcttcactagtttttgttttcttctttttttctaaatcctttccctgtaaatcttctagctgtatgtaatgtgctttcggcctttggaatgatgaggtgttgggtgtgtgcatagcatgactgttgttttatgggtctttttttttctttcccttttgttctttttcgctgttattgttctggacattgcaatattttgatgcaagtgctgcttattagttattgaactctgaaagcaacc

SEQ ID NO: 26221 - DNA, 267 bp, Zea Mays
agagtcaagtgaagacggagccagcaacgtgatattcactaagtgcgcgacaaaaagctcgagccaggatttatcagcattcgtacgagatttgggtcgcgtttgatgctggtacgtttattgaccacgtgatgcggagaaccaaagctgagtcgacgccaagatgacgtaacgggtggactaattcgcaagatgattgccaagtggacgacttctaacaacactaacctagtgttatccaggcaagccccggtgcatgcaacccct

SEQ ID NO: 26222 - DNA, 1084 bp, Zea Mays
aacggactaagcatctgaccgacctcttgctagggtttcattccccctctccctctcggccagcaccacctcacatcaccgtgatcctatgacagccatggcggccgaagcaccaccgtcggcttcaacgtcctcctcctcgacctcgcggctacctctgcctccagcggtggggtggtcagatccgcatagttgtacatcgggagctgcattagcttgactttgaagagcgagatcgggtatgagggcgtcctttacaccatcaacaccgaggagtccagcatcgggctttgcaataatcttggaaatgaacactgaggattaagctgaggaggatggtgctaacattgatttaaactcacaaggaaaggaaaatgtgttgttctaaaaacctccacaagacaactatcagctaggaacttgtgagatgatattattgataaggattacaacacacatggatatgtgaacttaaggtgcgaaggttgacttggaagaaattgtggcagcaccagttcaggatggacaacaaccaaaatctcctacaaaagttgtttctaatgtgctatcgagctccagtgtgttcctatgcaatctggtcttcataccgcctccaagaaaagctccgcaatgacagtttctgcaaaggttcaacaactttaggatcaactagaggtcgagcaacaagaaaaagatggacttcatgaagaagtggaaaccttagagactggagcatctcaggacaccattgatagtatgaagaggtcaatgaaaggaaataacaatattcttcatcaactattaagcttcaatcgaggccaagtttttccatcttaactccgcttgaccccaataggacctgcaaccttatgactactttagtagctagttacaatagctctggatttgtagttataggattattttcaattatgcttactgtttaatactttgagttgaagttattggattatatttggattttaagttaaaggatttgcatctatatgttttgaagttatattattatctgttggatgaaatatttgtgttgaacaaattcatatgatattttggttgtgat

SEQ ID NO: 26223 - DNA, 1005 bp, Zea Mays
ttctgccgccctgtggattttttttggcgccgttcttatccctggcagcattcatctcttgctcgcgcttatcttcctctctgctctctgccgttcagaagctcccagccgaagtccatggcgctcggcacccatcttcttcctctccctgtccgccggcagaaacgtccggccggagctctactgcaccgcgcctgctctctggtgcttcctcgccgcgccctcccggcctccagctcgctcgcctcaacgctctggccgagcccctcacgcgcgctcgtctctctcctctacccagccccaagctcctacgtgtggctccctgctcgcgtctccggtcatctatagcttgccggagctctctgctccctcgcgcgttctgcttgtgcttcagctatggcgcttcatcgccacagttccctgtcctctgcgcgctctgctttttgtgcgcgtgagctcgccgtctttgttccagtcatccgcacaattttctctgctcccttgccgtggtcgtcgcgcgcctgcgcgcagctcacgccctgctagcccctgctacgggttgtcgagctctctgcccacgctcagctcgctctttccttgtttgtcgcgcgcacaaattttatctgctcgccacagcgtgttgagcttccgcaccatcatcgcttctgtcgcaagatcgttagccacaattatcttgaccacgtcagcttgccagacctgcaactctatatacgttaccctctcgtatcgtcgtcaagcccgtcgattctcgttcttctatgctcgatcttgtcgaaccccgaatttcggatattagacaaaaataagcgaggtccctgtgtatcgcttatcaagtactcgattgaagacttcaatcgaagatcgtcaccgttccgcgcgtcatcaagaatcccaagaatcgggtgaagacgaagctagcagcgcgatattcctcaagtgctcgacaattgcctggatcagaaaatcactatcgatctcgcggat

SEQ ID NO: 26224 - DNA, 949 bp, Zea Mays
cgaaagggcccggcccaccacggccgctgcccgccgcctagcatcgcctactcgccttgcagttgcaggttagcagcactgcagcggtagccacccaccaagagagaagaaccgcagtcccgctccttccctgccggctgccgctgccccgtctctgtctccaactccgaatatgtcgtcctcgcccctccccaccacctccggcggggctcacatcttcccgtctccgcctcgaccgcgccaccgccggtgctcccaagtaatcgtcgccgccgccgctccgccccgttcctacggcgtcggtcgccgcgccgtctccctagccggcgtcgccgcctggcttgccactaccgtcggccgggcagacgcggccagtccatttgacaagtacgtcaagaggaagaagctggagcctttggagacctacgttccggctgtcctgctgaccattgaccaattcgttgatctagagaaatccttagaatttgagaaaccaaggtatgacgagagcagatcattacttcgctctggaccggcatcatctttaagagtcaacattcgggcagtggcacaatatgcttctagtaatggtcaaggcaaggctgcatcagatgctgtggacgagtgcttacgagcactggaagatctcgactcactactactacatgcatcacggaatgatccgtcagcatccgttgaaaccatgaggagcaagatcagtgttgcccttgcagcattagacaatactggataaaggaaaggcgattgctgatgcataccgaactccagtagatgattatgtagagggctgaaacagttggaggatattctttaaggctgaattttgttaggttctatatcatgtatacctgtttggattactaaattcctcgaactgtacatcccaatttataattcgttttgcttttttttatgaagtttgattggc

SEQ ID NO: 26225 - DNA, 6472 bp, Zea Mays
tggatctctacagcgcgatttggcgccacttttggtatgtctctggtgcaagagtgctgaagatgaaggagaggagctctttatgcgaaagtgcagccgatggaaactggggtttgaaatataaaaggaaaagaagcaagttaacagttagcccatctaatgagaatgaggctacctcaccaacatctgactctcgaatgagccatggttccaccaaaaagaagttgaagcatgacaataacatttctccatcagccaagaagataagagggcacgatggggagcagggcgtggtaggtgacaaaatgatgactacccaggaggatcagcaggtcgatcgcatcctaggctgccggcttcagatgagccaaatcaacccgccgtcccatgcttcattggagcagtttgaatcagctaatctccaggtggatggtatggttcttccacatgcttccgctggcattcctaataggcctcatgatggaacagagtcttctagaaatggtacaattgaggatatatgtgctgatgaatcagccaatcatagtggtcacaatttagaaatgcgaaaggatacggacagtaaatcccatgaaaaggagtcacataagcgagaacaagtcaagaagatattatcagtatgttctggtgatgagaccaatataatgaaagatgatcaagtagtcagagaaaatgtttcagcttccaaaaaaggtgaagatgagacatctgatttgccagcagaaaaggatgataccatacttccagtcaccagagcttgtacaatgatcaggaccaatcaagatcatacagatgaaagtaaacagcatgggaaaatagaacaaataacaaataaggactacaatgatgctggatatgagttcttgatcaaatgggttggaaaatcaaatattcacaacagttgggtttctgaatccgaggtaaaaatattagcaaaaaggaaactagaaaactacaaagcgaagtatggaatgagtttgataaacatttgcaaggaacagtggtgccagccacagcgagttattggtcttcgtgcttctgtagatgaagtggaagaggttttaatcaaatggtgtggtcttccttatgatgaatgcacttgggaaagatcagatgaacctaccctgatgaaatatagccatttggtcactcagttcaagaattttgaatgccaggctttggataaagatgtggtaaaagattatgcaaatgcaaggaaccgacatgagcttaatgtgttagttgatcagccaaaagaacttcagggcggcatgctcttccctcatcaattggaagcgttgaactggctgcggaaatgctggtacaagtcaaaaaatgttatccttgctgatgagatgggtcttggaaagacagtgtcagcttgtgcttttctatcatccctatattgtgaatttaagattaatttgccatgtcttgtcttggttcctctttctacaatgcccaattggatggctgaattttcatcttgggctcctcatttaaatgttgtggagtatcatggttctgcaaggtcaagatctatcattcgccagtatgagtggcatgcgggcgatgcaagccagattggcaaaacaaagagatcgtacaaattcaatgttttgcttaccacttatgaaatggtgcttgttgatgctgcatatcttcgttctgtctcatgggaagttcttatagttgatgagggacatcgcctgaagaattctagcagcaaactctttagtttacttaattcattctcatttcagcacagagttttgttgactggaactcccttacagaacaacattggtgaaatgtataacttattgaacttcttacagcctacttcttttccttctctatcatcatttgaggagaagtttaatgaccttacaacagcagaaaaagtagaggagctgaagaaacttgtagctcctcatatgcttcggagattgaaaaaagatgcaatgcaaaatatccccccaaagatagagcgaatggtacctgttgaattgacatcaatccaggctgaatactaccgtgctatgcttacaaagaactatcaagtactgcgcaacattggaaaaggtggtgcacaccagtctttattgaacatagtaatgcagcttcggaaagtctgcaaccatccctatcttattcctggaactgaacctgaatctggttcacctgagtttctgcatgaaatgcgcataaaagcctcagcaaagctaactttgttgcatttgatgctaaaaatattacacaaggaaggccatcgtgttcttattttctctcagatgacaaaacttcttgacatccttgaagattatctgactttagaatttggccctaaaacatttgaaagagttgatggctcagtatctgtggcggagcgccaggcagcgattgttcgctttaatcaggataagacacgttttgttttcttgctgtctacacggtcatgtggacttggtattaatttggcaactgcagatactgttatcatatatgattcggatttcaacccacatgctgatatacaggcgatgaacagggcacacagaattggacaatcgaacagacttctggtttacaggcttgtagtacgtgctagtgttgaagagcgtatcttgcaattagccaagaagaaattgatgcttgatcaacttttcgttaacaaatcagaatcacagaaagaagtggaagatatcattcgctggggtacagaggaactctttggaaatagtgacagtgtggatggtaaagataacagtgaagtcccaggtcctgttgctgatgttgaatttaagcatagaagaaaaactggtggcctaggtgatgtttatgaggacaaatgtattggtggttctaccaaacttgtttgggatgaaaatgctattttgaagcttcttgatagatcaaaccttccatcatcaatggctgaaagcactgacggggatttggacaatgatatgcttggtactgtgaagtcaatagattggaacgatgagctcaatgacgaccctggtaccaatgaggatactgcacctattgacaatgatggtagcgagcaggcatctgaatcaaagcaaggtgctaccaatcgttcagaagaaaatgaatgggataaacttttgcgtgtcaggtactctgcaatactatgggagcaatatcaaatagaggaggaggcatgtcttggtcgaggcaaacgtttaaggaaggctgtttcttacagagagacattcgcaacacttcctaacgaagctttaagtgaggactctgatgagggagatgaaccaaagagagaatatacagcagctggactggccttgaaggaaaaatatggaaagcttcgagctagacaaaaggaaaggattgctcagcgacacattatcaagaactatgctgatgataatcttgaagagttcatgactccatacgactctattgctaatgaacctgctgaaaatcctttggtaatcgtagaagatctaaattcttcacagctatctggcgcgaaacgtttcagtgactcaactggagaaatgaggcaatcctccaagaaatcaaagagatattctgaaatccctcaagatctttatgccaaaattcctggtgaactcatacaaaaactcaatttgtgcaccaagcataaaggagcgtaaaagggccagtggtgacattgtcaaacaactgtcaactcctgctgaccattctaatgtgcatagaaacgaagctcaatcagcttctgataaggccatctttcctggtgcatctgaggaggctttgcgaagaataagtaacatgattccagatagttattttcccttcagtcatattcctcctatatcagggaagggggttgatcctgttgaaaatcctggaccctccattgcatcatttcaagggaatctgggtcttccaaacttcagtctggaagacaacgctccacttaagcatattaagcctatacctgatatatttcctagcctgtcactgggtgctcataaggattatattcgtagttctgtcccagagttgccagatggttcattgctgccaaacttcatggcagatattactggtacttcgaagcaaaagtcatttatgtctggtctacttcctgggctgggtcttagcccagggcaaccaatacattcggctatgcctgataatcacaagaaagtcttggacaatataatgatgcgtgctcagtatgcgtcaaacaaattcttgaagaagagatcaaaactagattattggtcagaggatgaacttgatgctctgtggataggagttcgtaggcatggaaggggaaattgggatgctatgcttagagatccaaagctgaagtttttgaacaaccgaactagtgaggagctggccttgaggtggattttggaggagcaaaaaattatagatgaacctatgtctacatccaccaggcgttctaactcagcagcatttcctggaatatctgatgcaatgatgtctcgggcactgaatgaaagtaatttctctaaaatgaggatggagcagcctaaattgcagtcccacttaactgatattcagttaggttcgagtgatatcctatccacatttcctcatgttgacgctgctagttacattaactcaggggagggtggcccatctcaaataccatggcaggattttaagcatagatcaagttatgctggagattttcctgccggtgcatttgacaagttggagaaacctgatgttggaccgatcccgccatttatgccaaatcctttcatgactgacagcattggttcacttcccataaacagaaaaaacaatagttccatcccgcatagtgaaatcaggtcaagttctcgtgagaacattctttctggtgtttcggatggacagatcaacttgcttcatgagatgcagcgtcgtcgtcgtgtgaggtcaggcaaagaacccattgagatgaatctcaaccacatagaccactcaaatctccagcttgataatactagtgaccttggaggtttaaaaccaaacaagttacctcattggcttcaggaggctgtacgtgctccttcatctaagccacctgaacgtgagctaccagcaacagtttcggcaattgctcagtcggtctgccttcttcttggagaacaagaaccatcaatacctccattcttgatcccgggaacacctctttctcgcccaaaagatccaaggattaattcaaagaagaaactccgcaaggctcagcaatctaactctcatgtagagcattcaaaaattggatctggtgagggtgattgtgtcactaccccagcacccccatccattgaagcttcacctgcacttcctgtcgattgcgatgatggtgagccttcactcaacttgaaatctgcatcgttgtcatcttcagctggcagcaaggggctagatgaattacctcccacatttaaagaagcaaaccaaaccgtggatggctcagaagctgttgcggccaagtcagatgctcctgaaattggttgtcaggtacctggttcctctccattacatgacaaaggtagtgaatcctcggggtcgccagtgaaggacactcctgacgctggaatcagattgccaggatcagataactcagttatggcattttctgcactcccacttgttgatgaagcacctgggacaagcagcagagcagctgacacgcctgtgccatgtgatggcaatgagtcgaaagaggatgttccactagacaacgctgaaagcaccaggaaactggagccgaacggatgaactggctcctcttgcgagcatggatgcatcgcatcgagtttctgctaatacagccgacgaagatgggtggatgaaatgatcattagactcgagctagttagctcaacattcctttcttttgcgttcagcataacactgggattttccctctcccaatgtttccagtgttgatctcgtgttgtgtaatgctttagtgcaggtctcgttgcagataggatgaaacgcaaagggctagtggtacttagcagtagttgggcactagtccgtcgggggagcaactcgtggaaacctgtatacaagaaatgtatattttgctaatatggtgctggttgggtgtgtagaaggtagaccgctattcgtttatttatgcgtatatggtttagtaatttgccatctgtctagcggtggctgtaagagtagacgtgatgatgatattgcctagccttgactcgttggcctccatgcctagccgaagagaagctgtgttcatactgacataactgacatactgagcgacttttgactgtttttttttatttcattagcggcaacgaagccaagaaccatgatcttcactcttttgtccccaccccccaaaaaaaaccccggaactctcaactattgttgtgcactgtaatttacctcttcaaattagaaaagtgatgttttg

SEQ ID NO: 26226 - DNA, 236 bp, Zea Mays
ccatcttatctgatgagttgttgagttttcttgatgctagtagtgacagatttgaggatgggatggttctttctcttaatgcattgtctggtgctgagaaccctaaatgtacccacaaatgtgtcaggctgagagccatgataaaggatcaagtgattctgcagttgttggactctggtagttcaaacacatttatcagtgatttagctgctactagaatcaattgtgtaatctaa

SEQ ID NO: 26227 - DNA, 613 bp, Zea Mays
atgacccctgaagcagctttggatcatgtacgatccattaggcctcgagtgcttttggcgccctcgcagtggcatgctattagttcatttggagctctcaccggtggacaacttccagtatggagtacgaacttggcctgtttcctagaagccattgaagctggctgtacgaacacaggaaatgatactatagtgcagcaagataacatagataaagagaatgactctgctatgaaattagacgtttccagttccatggaaaaaccttcaggccaggggccagaggagtctatccttgagagcgattgtattggtgatgtccccatagaatgtgataaacatggtgatagtgaaccattgagcatggaaggcaaaatcatttctggcaatgtgaatgtgaagaaccaaatatcgagggaggatctaaaagaagcattcaaaaattttggaactgtccggatgcgccaacagagtgaaaccctaggaaaacatgccatgcactttcttgctggttatatttccatgttttctacacagggtccttttcagacagggataacacggattatattgcttggaacaatgttactattctttctcacctgctattgct

SEQ ID NO: 26228 - DNA, 1375 bp, Zea Mays
cgcgattccccaccccgcgcccgcagcccccccccccgtcctcccggccgcagccgagcacagccgccgcgcccacaaatcacgcgactcccgcttccatgtcctcgcgtcctccattgcagccgcatacatagcgtcgccccttccatcgatggcagccagccgcgcccgcaaatcacgcgactcccccttccatggcgtcgcccccttccatccatggcaggtccgcgcccctacgccccaaatcacgcggatggaaggccgaagagaaggcggtgagctgcggcggaggaggggcatctgaaatccctgagctcgctgtcatcagggagctacatcttaggacaattgatgagctcggtttagataagtcgattgtttcagggacccttctccccaacacgcaggggtagcgtaggaggtgttgtggcggcattatctaggaagcggtctgtggacatgaggcagatcaacccgaaggtgcctaaggaggaggctgtcaccatctccggtcgactcgtccagatcctctccgaccatgggcccctcaccatcggcaacacctagaacaacacgaaggtacccaatcaaccagtcagtcaggcagagtggcaaaagctggggagcgatgcaggcgtcagagcagcaacaacggaggagtaaggcgcgatcctctgccagtgtagatgagaaggaaacacgcaaagagcatcaaaagcaagttcaacgatcttatgtcaacccatccacctctgaatgaggcatattcagatgtgtgtgtattcagtttacagagctcaatatgttacatcgaccttcccaacccgccggcagagcttaagaagctcaagcacaagaagtgcctcgtccagtccccccaactccttcatggatgtcaagtgccaacgatgcttcagcatgtccaattcgcttgtggcataggaatctcatcctagattcaatagaggggctgcaatgccggcatcgccatagctggaaatcgagcactgacggacaccgggcgccgagatgggccgtcttgtccaccgccgcaagaaccgcatgcgttggagccatccttacacctgctcctacttccgcgccagcaacccaacacgccgacgacacgagctcctccttataaaagtgacatctttattgtatagataacgaatggttatagttatttattcttgtgtccaagtggtattggatttttttagcttggggttaaagaaaagacagtcatgtactttgcatcttttttgtatttatgttttatgctaaattgtggaataacactatattagttgttagcaaagaatttctgagatattaaggttgatgataatatatgttgttatttcatttaatc

SEQ ID NO: 26229 - DNA, 2510 bp, Zea Mays
cgccacatgagcatatacgtaagctagagttatatatacacaggaaacatgaggagagccacaagtgccaactttggtttggaacaaatcaaccacaagcagatttatctcagccaccaccaccagcagcagcagctcaaatccatccaactactgtaataaatgaagaagaatctcaagtcttttccctctccctcctctctctaatgtacatctttggtattaaaaatgttattacacctcaacagatcaaaattgtgcagcgataacacctaaccaactccattacagatcccagcctcctggcagccaacactgtttgttcgactttccacgcagcacgcccacggcaaagggagtggtgcatgaagctatctatctatgccacacaagctacttgtaaaagctggcaacacatcccagccacacaaagttgctgttgttcattgatgtctcagcttcacaggtgattgtcactcagctaaaagggtatcacgtatggcagagcaatgacatcagcatggtcaattttcagagcctgagcccacacttgggggactccatcagcctcaggcgctgaactggccggcttccttggctgggtgccgcctttgtcgaacagccagtcctcaccttcctgcccaggcaattccatcatttgaggtgcttcaggaatgctgtatatctggctaagatacttgcagtcggggtgaggtggcttcctagagcttgtgccattctcataagcagccaccggatcgactggacctcgctgctgaccctgttggttgccattgaccttctcttccttgtggagcctttcagccttttcaatatttatggcttcctgcttcacagaagagagtggcgcggctacatgagatgctgtaccattctccacacgattgctggggagtgctggtctcggcaactttgtaggccgcatatcaaggttgtctgtacagcagcatcagaagtcttataatataaagcaccataaaaaaggataatggtgtcatacaagactcgcatgctgttaagtgcaaaagaaaaaaagaaaagctaggaactcactttgtaagtaaccattcgtttcatggttctttcgcttcttcaggttctcatcaggcacaacagattttccatcatcaactggtggggctaaaggagggaccgagtgcttcaagttaagactatctatgggataacttatactgttttctcttgttttattatgctctttgtggttatgttcccttttctccttctttgcctctttctcctttttcttctctttgtgtttatctttctctttccttttctttttctcatgccgatcactctttttgtcctctttcttggcaatatctggtgccccatctctgaccttctccatcctttcagctctcccatctgcagctttctccacagctggaggctttgacataaccagtttctgatcagttgaaatattagcctgcagcaaccttccaccttgttccttttccttgcccatagcaggtgaaaggcctcctgcatcaggtttcttagcagagacagaaagattttcagctggtcgtaccatgccattcggtctccgtattgtaatgctcgggcttgggatggatgacctaggtgctcctctatccatcccccatgttgcacttgatgttgatgggctgccaaatctctgcatggatccttgtgtgttgtccattggcctaccaaccttgccatttcccttatgcatagcattagcaggatttggaggcaatggagaggaggtgccaacttctttcttcgcgacatctttgtttgtgttctcagttctcttttgaagcgatatgctaatgttactgattcgctgtccaaccccctcttttctgggtgcagcttcattactggatgaaagccttgcagctttgaatttatcctccgttgtaggtgctggtggaaagccaccagcagttcttcgagcagaagtggtgaagctttcagaatgttgtactgatgtcccattcttttgtcgattggcattgatgctctgttgtataaatccctcagttttccttgaagcattaccagactgaatatgcactttattatgcgcggacctttcagtctccattgcaggtgaagcaatgaagcctttgcgatttcgatcatttgaaacagcataattttcaatagtttgactcgctgcccctttctcatcctgtactcctctgaccaactcctccctgaatttaagatccttaatttcttcagaccccctgctgctctctccaaccttctgaccatggagagcctcgtcatttctttgaattccttcgcctgactccctgtttttatctttgctcttgtcttttttctcgtctttgtgtttttctttacgatctttcttatctttgtgcttatccctactcctgtctttatccttcttttctttaccttcctttctatctttgtccttcttgtccttcttatgtttcttctctttgtgtttctcc

SEQ ID NO: 26230 - DNA, 2145 bp, Zea Mays
ctcgcccgcccgcccgaccgaccgctgtctcgctcgcctcgtctcgtctcgtctcgcttcgtctccgtttcctccgcacaccaccacagccgcgtcaagccgtcaaccaaccaaaccctagaaggctctcgcccccgtccccaatccttcgccgctccccgatcctcgccgcccgcaggccaaaaccccacgcctctccctcgacgccgggtatatccagtgtaatcactttgtcagaaatgccttctgcatccaagtccaagtcaaaagatagatcagctgcaaaagttgcaaaagagcaacccaaggtttctgcaaagccactgggaaatggtacgcttgcaagttcttataacaacctctctggaaagttccatgttctggaaccatcagcttctttgttgggtagccaaggcatcaataaattcaggaataccgatgagatagatgaacattctcgcagctcccatggtacaggggatttcgattgtgcctccaacaacggtagctgctctgacgagtcagaagatccaaaggaaaaaccaactagtagtgtgtctcgagtagagtctgttcctggatgtgatattgataaacgagagaaaatcagacagaaaaatgagaagaagcatcaaagacagaaggagaggcgtgcccaagaattgcacgagcgttgtaagggttatcttatgtctagaaaattggaggcacttgcgcagaagcttgttgcgatgggtttctcagcagatcaagcaacgatggcccttatacagaatgagggttgcgttgaggagtctgttacctggctctgcaactttgatggcagtgaggaagctaagcaacaacttgcagctgatcaacagtccggtgttaacttgaagattgatatagctgatgagctttcaaagattgtgagcttggaggtaaaatataagtgtacaaagcaagaagttgaaagagcagttgtttcctgtgaaggtgatctagaaagggctgatgaggccttgaagacacacaagcaagaatcaactgcagtcccaccaaagcctgagggatctagtgactcaagtgccttgcctaacaagcagcaagttgtacttgcacagaaccctgcaagggctcaaacaaatggattttcatcagtaggatctcagcagacgagaagagaggaggagataagctataagcttttgatgaatggtagtggtccaaaggatcctgcaattaaagggtttcagccaatggcagcaccaactaagccagatttgggccgtcagcaatttgttcaacctgagaagagacgtctcaatcccaactcgattccatcaattccttatgtggcatcatctcctttgcctgttgcagtgccacaactgaagtcagacatgcggcatgtggcaggaactaatgaggttaaaagttcgatgcccaatggaagcttgcgagagtcggtaattgtaatgcagcgtcctcaatctgcaggtaccaagcaaagcctaccatccactagccatagcatgtttgcgtcagaaccatctgcaagggattggtacttaaatggcgcatcaggtgtcaatatgatgttgaatgggggcttaggtcatggactaaggaatatgagcttggacagtgttagttctggcaggtcgtttgggcatgcaaaccatcaacaaagttttgtttctaatcctatagagttggctgccaatggttggggtggcacatggagttctggaggtacatcatcttcccgtcctgtggtgtcatcatttggggcgtttagagggtggagttcatccgagtcgtcccctgcattgcctcattctgattggagagccaatggggcagcaccttatgactacacctcagtagactggagcctggacacaacgttattgaacccagcagcaaagagcgagcggctgtcggacacatggtcaaccatgttcatgggtggcagatcaacaaggacacctgggaacctcagtggcgcaggcatagctgggttgcatgacagtaaccatccaatggatcctgctccatcacctcgtccatatgagtggcctactttctgcaggggaggatcttcctagttccccctaccatgtagtagaatcgtccatcctgctcgcttgtctttctgag

SEQ ID NO: 26231 - DNA, 4487 bp, Zea Mays
ttcgcgccgcagacagtgctcgcgaaacgagcgttcggcggcaacggcagcggccagccgtgagagaagagatgatgctgataaggccgccgcggtttctctccccttcgccctcgccagggacacgcgagccccgccttcgccggcctctcgatgcctccagaatcttctcctcccctcgtcctcccggtcgccgttcccgcccccgcccccggctcgtctctccgtccaccgatctccgccgcctcactgcccgcatcgtcgacctcacccgccgcagatcatggaggaggtggaagcagcgcggcgtcgtgtgcgtgggggcgggttgctcaacaccatcgtcatgaacgcggttctcgaggcatgtgtgcgctgcggcgacgtcgaccgagcgctccggctcttcgaggaaatgcgcgggcccatggggtgcggagtcgacgatgtttcctacggcatcctgctgaagggcctgggtatagcaagaaggattgatgaagcattcgaaatactggaatcaattgagaaagattcttctattggggggcccaggctctctcctcatctcatttgtggttttctaaatgcccttatcgaagcaggagatatgaggcgtgccaatgctcttgtcgcccgtttccgcatggtcctttacgaggatcactctgtcttactatacaacttactgatgaaggggtatattaagagcaacttccctctcggagctttgactgttaaagacgagatattgcgtcaagggttgaagcctgatagattgacctacaataccatcatttctgcctgtgtaaaatcagcagagaatgataaagctatccaatttcttgaagatatgaaggaagaagctaatacagaaagtaaccctgaacttcttccagatgctgttacctacacaacattactcaagggtttaggaaatagccgtgacctttattcagtcgtgaagattgttgtggagatgaaatcttcactaatttcaatcgacaggactgcatacactgctatggtagatgctttgctagcttgtgggtccatcgacggtaagttctataccatctttttagtcactacagtgaattttcctaaaaaacaatacaatgaatttgcaagttggaaaacaacgttggtgtttgactaagaactaacaagtggcctagcacccacttttcatcctcacatttgatttattttcaaactgacacttctcttttcactttacagtggttcagcatttagcgttccatttgacgctaacaagtgacatatcacattcttatctgtacccttttatgtcccagttgcccaagcagcatatccagtctaaagtatctaaaatggtgaaactgttcttcgtcagttgtgtttgcataattttttataattacatcaccgatgtgtataacctagttgtacttctcaaatcatcacatgcagtgactataagttacaccaaaatcattttctgaggtatagactatagatcacttgttagtatggttcatttaaccttactgttgtgcacaagcaaattgcttgacaaatgacgatacttgatgcctctcgcaacctattaggatcatgcctggttttaaatattatggtccatgcaggcgaatgtttttcatattttaagttatcatttcctcacttgcatagtaaatgagaatgtcaactttagcactatttgcttagcatgaccctctgttttgtatcctagatatctgcctctgggtctattctaatgttttgacaatttatcgcatgtcttgattactctctagcaattcagcattatccataattcttaatctagttggtcctgagatgataatgttaccagtttacctaaatttagtttcttcattacatttgttcaaaatatcttcaaataatttacacatatccttcattgtaatgtaatatgtgtgcccctagccccaacaaatatttgtgacaacaaatgtgttcacatttggactttgtagaagaaataaaaatggataataactatgcatatgttaacatgagtattgtgttaaatttgagaatctttcagtgttcatgaatatacagaactacagactaacttatttttactttccatcttagtgtataaactctttgtccttgtttaagtgaatataaatgtggatgaggcaatcaaattaccttgttgcgagaatggcaatgctgtttcatgtgttcttgagatcatgggttatgagagtgaaagctgttattcagacaaaaaaaaacctcttgtttatgatgtgtactagatttctgtactgatatgctttgaaccttattggtgcttatcgtaggggccctttgcatttttggtgatataataaagcatgctggcaagaacaatgatttgagacctaaacctcatctttatctttcaatcatgagagcttttgctaccagaggtgatgttgatatggtcatgagatttaacaagcgcatgtggctggattcagttggatcaattagccgtgccgccaaagaagagacacatgagctattaatggaagctgccataaataataatcagatagatttggctagagggcttctaagaagaatagtaaatgagaaagaatgtttctcttggacaagtagagtaggcctggtcgcagttaaagttgaaagcttatctggattcaccaactctcttctaaggccccacgtatttccacagattatcttgaatgatccagttgagaagtatatggttccatttcaagaatctcgaccattacccgccgacttaatattgcggaaggttgtgatgcgtttgttgaaagagcgtgcagttcctcttgtggatgattggggaggatgcattggcatagttcaccgcgatgattgtaccaagctggacgcacctcttatttcaatgtctagagggccacctctgtgcgtacctacttcaaccaccgtggagcacgtcattgacctcctcctgagaaacaagtccgagatggtgatcgtggtgaagagtggtaacatgtacgaaggcagctacacatccagctcaagacccttgggcgttttctccctcgccatactatggagcttcaccggcgactactcgtcaggatcagatgatgtccccgacgcaggcatctcccgggcagcaaaacccaaaccagacgccgaggcctgcaaccacagctagtttggtgtttcttttgctcagcttatagcaactccgcgtcgtgttgccgggcaaactagtcatgtaatggtcctccagttggacaaggggtgcatgcgaaaaaaggttttgatcctgacctgctgtggctgcgtgctgcgtacgatgtcttctgatgcacagagcgaaagtgacagtggactggagatttcctcccagccttcggttgaggcgccccaccgcgcagtgatggtcctgagtcctgaccggtttggtggcatgtggcatccctgctctcactcacggtgccgttttccgatcagtaattggtaatccccttggtaactaatttgggtctatgctaagatgttcaccgatcagtagtactgtgcgcagtgtattgctgctgcctgatgctgggactgggatacagaatcctcctgttgccgtgcacagttgctcttatcttctgtgaaccttcagtatggactggcaggacagtggatatgtgtcgatgaacggcccgagcactccgttggggccccgcttggacgcctcatgccataggccacaggccatagctagcattatctgccttctgggaggtgcatgtgcagtgcatctacccatctgggaagcggtaggtttccattggagggctctttgcctctttggtagtttggtccctgttgtgtcatgccagggtgtggcactgttacgctcgaaagtcgagagatttctgggtgggtagcttgggtaggcctgggtgcttctgcccccttgtccaggagtgtctcggtccagctttgcatcatccgtgttagttggaccggtgtcactacccggcagtgacggctggcgcctggcgctcgtactcggggtggcccgccagcggccgggtgattattgctgcctgaaagcatggaataataagggccttaatttcaatccacgtggatcgaggatcgaaggggttaagggtttgtaagtattgagaaggattgaagggattaaatgtcttccaattcaaaattaaatagaagatgatttaatctctataaatcaccttcgatctctgtgtggccaagtaggtttaaattcgtagcatgtcaaaacctttgttcattccttctcatctatgtaagggcacgtacaatggtatttaatgtagagatttttgatgtgtctaaagagggtttttgcaaaaaaaaaatgtgaagatgtctctgtctttgtaacccaagtattaacagatgtctcaatttctactgtacgaattcgtcgtttgttctatcgatccgat

SEQ ID NO: 26232 - DNA, 995 bp, Zea Mays
ctaagcatctagaatggaaataccttggagaagagttgtctcattagctcctttatgaaacttgcctctgcatctggcttttatcattttatgatgctgcagttgattatttgtccaccacaagagttatgccaagacttgttgaggttgtcaagggatctactaaagagaaggtggtcagagttgctgtgttgtctttctgtaatttgctggcaaagggtgcatttgctgcccagatgatcgatcttggattgccgcaaatagtacaaaacttgaaagctcaagcatggactgatgaggatctgttagatgctttgaatcaactagaggtgggactcaaagaaaacctcaagaagttgagttcctttgataagtacaaacagcaagttcttcttggtcatcttgactggtctccaatgcacaaagatccaagtttctggcgtgagaacattaacaattttgaagagaatgatttccagattctacgagttctcatgacaatcattgacacatcaagtgacaccaccgctcttgccgtggcctgctacgacctctcacagttcctccagtaccatccatctggccgaatcgtggtggcagacctcaaggccaaggaccgagtcatgaagctcatgaatcatgaaaacactgaagtgcagaaaaatgcgctgctctgtgtgcagaggctcttccttggcgatttagatccagagaactcctggccatttttaaaaatggctgttaagaaaaccttgaaaattcttgtccattatatcctattgttatttgatttctgagaccgatgtataataaataattagagccataccatgctcgatgtaataaagtgtccatgggcttgttgattcatttatgtaaattctgatctccaactttagcaatccttttttttctgtacacctgacttgtgtgaatatggacgtacatgtttgcaattgttccacaggtttttatgttagttcattctcctgaaa

SEQ ID NO: 26233 - DNA, 219 bp, Zea Mays
atttgtttgcaaggtgtaggataaaaatgctagggaaatctattaggcccccatcaaaattaacctgatcatgtaaaagtgattaatagagaacattattgggtaaagaggagtgatgaagggcacaacttgccttgtacttgtgacaacctgttgttcatatgctgacccaaaagttgggcatcgggttctcgtcaccttgcctctactcgtagcaat

SEQ ID NO: 26234 - DNA, 166 bp, Zea Mays
cttcctcctccctctagatctccccccacgcagcaaggatcgagaagaggaggagcaagatggattgaagaggaagagaggatcaaggagatgttctaccccccatctcttgcagattttcttggggaaaccctagcaggtggctacactctagatcatgcctagt

SEQ ID NO: 26235 - DNA, 4830 bp, Zea Mays
atggagatgatcggttctggctccaggagttgtctgtgtcactcttctttcctgcctggtttctttactggtggggaacatgcagaaaaactgagtcacaaaagaactgaaaggtcacaccctcttccatttcttgtaaaggaagaggagcttagtggcgatgagcttgaggaatttatcaagaatcgatacagtaatcgtgtgaaatatgctgctgatcggagctattctagagaagacgatgacattttccccatggattgtgcactcaaggagcctactatttggagagttaaatgcatggttgggcgtgagcgccaaatggccttctgcttcatgcaaaaatttgttgacctgcgaaaaattggtaccaaagtgccaattatcacagcatttgcacttgatcacataagagggtttgtttttgttgaagcggagaaggccggttatgttacagaggcatgcaaagggttttgtagtgtgtacacaagcagaattacttctgttcctgcaactgaagttcctagcttgttatccagccgtacgaaaccatttgaaatctctcgtggtacatggatacgcatgaagaatggtaactataaaggtgatctggcacaggtcgttaacatggattctggacggaaaaaagtgatgataaaaattatacccagagttgacctccatgctatttcgaaaaaatttggtggtgcagtttcactaaaagaagctgcagttcctgccccacggttcttcaggcctcacattgaaataaagcgcgatcgtcagactggcgaagtttttgaagtacttgatggtttgatgttcaaggatggatttctgtataaaaaggttgcacttagttctttgatttattgggggatacaaccgacagaaacagagcttttgaaattctcttctagtccaagcaatagagcttctgctgatgacctggattggctctccggcatgtatggttctaagaaaaggaaccttccagcagaacgagatatgaagtcatcatcttctaaaataaaatcctccaaagcaccagaccttaaagggtcaacttctactgaaaattatgacgacaatgatgaattcaaccttcatgatcttgtactctatgggcgaaaagattttggtgtgatcattgctgttgagaaagatggttttaggatactaaagggtggtcccgaaggatctgcggtgacagtgaggaagcaggatattaagaaaggctgtgtagacaaaatgtttacagctgttgatcatcataaaaagacgatatccattaatgacactgttaatgttgtggaagggccatttcagggtaagcaagggctcgttaaacacttgtacttgggaatactgtttatttttaatgaaagtgaaagtgagaactgtgggtttttctgtgctcaaagtgggtcatgcgaaaagatacggaagggtctgggaagctctactactgaaaattcggactttccaactcccatgttttctgaacctgcttatgagcaaaatgagcataggaacactgaagggccttacaggagcaccagagaacaacttttctctattgggcagatgctgcgcattagaaagggtcctttgaagggctacctctgtcgagtagttaggatatttcggaatgatgtgactgttaagctagactctctactgaaaattgttacagtacaagctgatcttctttcagtcccagctaataggggggataacttgtctggtgctccagctagtaaatttggaagtcaagatacacccttcttcgggtcagaagcaggcaaaacttcatgggacagggggttgccatcatttggcagtgactcatggcaacccttttcaagttccacgctaccagtccagaatgcaggtgcagaatcagaagctgatccatggtgtaagaaaacttctgctgaagatgattctgatccatggggtaagaaaacagacggtgattctgatccgtggggtaaggaagcggtatctgctgctgacggtgattgcaatccatggggtaaggaaacagtaccttctgctgctggtgattctgatccatggggtaagaaagtgttttctgctgatggtgattctgatccatggggtaagaaagcaatatcatcagctgttgaagtttggaacactagtgccacacaaaaggaaggttctagtggcaatgcatgggacaaacaagctggagttggtggatctgatgctgctggcagctcctgggacagagcggttgtcaataaggagagtgaaaagagtgacaactggggagaggcttgcagggttatggacatgggaactggagctgacacagacccttggggaagcaaggtcaaagcagtagatatggaaggaccaaatagctgggaaaaggctacaatgcctccagacaataagctggaggatgtcagccaaggatggaaccaacataagggcaactcaactgaagaccaagcaaaagacaatgtttctaaagatgaggacaacaatagggcttggagcagttctttgcctgtcactgaagatggtacctggggcaaatcaaaagacgacaactgtgatggagcaggtggtgcaggaggttgggatgcttctgttgccaactggaacaaatcatccgttctggctgatgcacaggatgagggttggggaaaaggaaattggtcatctgctaagtctgaagaaacaaacaatgaaattggaaattggaacaaagctggagcttcggaccaagctggaccgaaatcttttggtggtgatggttggaacaagggtggtgatcagaatagcagttggaacagtcctggaaattttggaggtgggcgtggctttgggcgaggacgagggagagttaggggtcgggaatctggagatttcaatggcagaaatgatcaaggaaattggaagaattcatggggtggtgacaatgctgaaaaatcttcttggaggtctgataatcaggtagacaatgaagctggagattctggtggatataggggacggggaagaggaggaagggggcaatatggaggacgaggaagagggagagacaatggttggagaaatggtgatggaccaaaatggggtggtggagataattggaacgctacaaatccaccaagtaatcagccttggagtagcagtggaggcaccaagtcatatggtcaaaatcagccttccacttggaataatccagaggataacaaaccatctgtaggtgaacaaggtgatccttgggcaagcaaggtgtcttctactgaaggtaaaggacaacagaatgattcttggtcaagtaagatgacttctcgtggtgctgaggataccagcggtggctgggacagcaaggagaagggctcttcctgcaatggtgggggtgaaggactacaaaatgatccatgggcaaacaagattggttctaacgaaggtaaagaacaagaagctgatccttgggccagcaagatgtcttctgctgtgggtgctgatgacaagaatggtacctgggacacgacaacaaagggcactctatctaacgaaaaggctgacgacccttggaatagtaagcggggtaatgatgatgacagcaagaaaactgacgcctggggtgctggctcgtcaggtgggaatcaggaatcttcttggagtaaacctattttctctctgggggatcaggaacctacttggaacaacccaaggtttggtgacgatgacaatgtaaataatagaggtgggtttggacgcggaaatcaaggcagagggagaggaaggagttttggtggtggtggtggtggatcatcatggaatgaaagcaacaaaaacggtgaatcaggtgggggaaggtctggagaaccatggaacagaaggggttttgatggcggcagaggaagaggccgctttgggcgaggtgaccgcaatcaaggcaacaacttggggtcaggagatggtggcagctggggctctggcaggggaaatggtggtggccgtggtggttacaggaactggaacgataacaacgaaagaaggcccttcggtcaaggtggtggctggtctcagtcttccgactggaatgccaacaaaggaagtggcgaaggaaatcaagctttctcgaagagcaagcccagctgggacgcgcagaacgcctctggtggagatgaccaggcaggaaagaagagtgacacagacaactcctggagccagaaccgatcatctccatctatcctgggtcagccaagcggtgatgctaataacaagtctagcgcttgggacggcgctcccaacggaggagctggcaggggaggttcaggttcttggggaaagagcgacgaggatggctggaactcgtcgtcgggaggatcagccagagagaagccttcgtggggtggtggggcagaagctcctcccaggaaggaggacgacggcgcatggggcaaaggcggcgaggggagccggagcctaggaggaggaggagagggtggtagcagcagttcctgggataaaccggcagatggtgcatggagcggcaacaacaagggtggcagtggcagtggtgggtggtaactggtaagcttgcgacttattggcgctgactgcatgtaaatattgtgcccgcgctgtgtgaactgttctggtgcgtgtctagttcgtatcagttacttggccatgcgtactctaaactaaaataaaacatggcttgtgactgtgactagttaaatgtagcctgttgctgacagtaattaggtgccttaactttcagaaactcatttgttagcatcctcgattcctagacctacgaattaaaaaaaa

SEQ ID NO: 26236 - DNA, 1740 bp, Zea Mays
gaacacggggcgtaaagtccttcgagatctcgcttctgcaagcttccgcgccggcgcggtgggtgatatgaaccccgctccggtggcgaacggcgccgcggccggcgctggcgtgggcatgaaccggctgggcggtaggttgtggtacgcggccgccggcgccctcatcgtggcgctcctcgccgtggccgtgagctaccgcagcttcccggacatcccttcgtcgtctcctggaagctgcggctgcccggctgcgaggaagtacacggggatggtggaggattgctgctgcgactatgagacggtggacgccatcaacgaggaggtcctgcatccaatcctacaggaactcgttaagttgcccttctttaggtacttcaagatagtatgatgtgccaagaaggaaaaccacaggctgcagttgataaaacacttgacagcaaggttttcaaaagatgggttgaaactgacaatccgtggacatctgatgacgagactgataataatgagatgacttacgtgaatcttcaactgaatcctgaacgatacactggctataccggtgattcagcaaggaggatatgggatgctatttataaagagaactgtccaaaatatccctctgaagaactgtgccatgagaagaaggtattgtacaagcttatttcagggttgcactcctcaatctcggtgcatattgcttatgattaccttcttgatgaatctactaactcatggggacaaaatctttctttgctgtatgaccgtgtcctgaagtacccagaacgtgtccagaatctatacttcacctacctgtttgttcttcgagccgtgacaaaggcagcagattatcttgagcaggctgagtacaatactggcaatcctgaagatgacttgaaaacagaatctcttgtgaagcaattgctttacaattcccagttaagatctgcatgtccattgccttttgatgaagccaaactctggcaaggtgaaaatggtcctgagctaaagcaagagattcagaagcaatttagaaacattagtgcaattatggactgtgttggatgcgagaagtgccgactgtggggaaagctccaagttcttggccttggaactgctctgaaaattcttttctccgttgatggagacagccatttgaatcagccgttgcagctgcagcgaaatgaggtcattgcattgttcaatcttctgaacaggctctcagagtctgtcaaatttgtacatgaaaaaggatcatcagtcgaagaagtcatcaacgaacagagcccttcaactgttcaaaagggtgcttccaagacgaatcttaagggcttgttcggttattcccaatacacatggattggatgggattgaaaaaaattgtgaagaagtttgacttgtttgggattcaaacccatccaatcccgctcaatccacatggattgagagctaaccgaacaagccctaaactggtacccccacccctccccggctttgtattgtttcttgcattcatcgctcgtaatctttcgttattgattcttccgcaggacttcctctgagatgtaagggtgtaatttgtagttatagaaggacacgctggaagattaacatagatatgcacggatataccgaaagattaacatgcgctggccgtacgtactttgttgcaaagagatacaaaccctttttagctaaatgtgatgccacagttaaccaaatatacagctagagaactaa

SEQ ID NO: 26237 - DNA, 2719 bp, Zea Mays
gggtagtatcaatccatatccgtctacccaatgggtaggttcttgcccattaacatacccgtggcggctggagatatcatcccgtatccgtctttgtatgggggtaaaaccgtcggttattcgggtttccgttatgtattgccatcgtctatgcactgcatttcccttcctcacctccggcgcaaaaccgcagcagtaggatcccagccggtcggccgcccaggatgccggagcctgcgtccccgccctcagcggcgggagccggccgccacatatccactccacatcaacaagggagtggagaatgctcccggcgcctcttcgatctcgacctccggccggcctcatgtgggagacgagggacgatgggctcccttccctcagcgtcagcgggttgtgaccccatatagccggatgtcagtcaattcatccatggcgatcaatccattcctcgagcaggccaaggttcttctctgggttttgaggaaggacccatctgcgatgctcatctaattaaggttacctggtcatcttgctactcggtcgcctacaggatcggatagcttactctatctataatcacaccgagcaaactgtccatcctagctacaatgggtagcacgcacaaggaagaagtaggtgtcctggaggaaatacttgacgggagaaaagagccgaggaagctatctttatcagttctaaaacacatcacaaatgacttctcgcacgagcgaataatcggttatggtgggtgcggagaggtttacaagggcatcctgcaaaacggaagcgtcgctgtgaagaaaatcttcagcaacctaaatgttgaagataaggaatttgatcgagagattcagagcatgatgcaggtgaagcatccaaacgtagtgcggtttattggctactgttctaacacagagcatgaactgatgagaaaagaaggcaagtatattaaggtcgaggtgcgagaaaggctgctctgtttcgagcatatcagcaacggaagcctccgcagccacattacaggtgtcataatgctggagctggtgaccgggagcaaggaggagccggacattactaatgtacttcgacggtggagccataggtggaaaaaatcaggacagcgtacaccatcatttcaacgccatcaagtgagtaaatgcataggtttggctaagagatgcaaagaagtagaaccaacaagaaggccttctatatgtgatatacttgctgccctaggcaaaatggaagatatgaattgcagtgatcaacaagtggacgaggaagtcacttatctggaggacatgctaggaatcgagcctcttgatctgcatttcctagtcgaacctaccaagcagatatcctgctcagtccatctgaccaacgctacgaatgactgtttcgccttcattgttcagacgacgaacccgaagcagtactgcatacagccggacagaggcgtcgttccaccacgatctgagtgtagtgttgccatcgtattatcgcaagaaccgacgcataataagcgatgcagcatggaggacgagctaagcgtgcagagcaccagagtggatgagggtgtgacagctgcggatgtgagtgaagcgttgttcactggaaaggaagatagaacggtcgatcacgtgagcctgatggtcggtttcgacatgtcgccatcgccacctgaggaacaaacggaggacttcacgtttgcaccactggcgtcgttgtacgacgaggagccacagttaagcgcggcgaagttggggcgttctggtcgcttctctaagaagaagctagtgtctattctgaaatcctggcgagcaagattaaaggtatcatcccataagaaactcgagactccaaagcatgactgtgagattcctgaagctgtagagcatgaagaagttgccgcgcccaggtgtcccaaaggaccactgccacagcgcgatctttctccactgggcgaagcatgttctaggatgaacatgacggcgatccatgagatcctagtgaacagacattacagagatgatgacctagacccaaacgtgccgtcgctcgaggaatggacacagcagagcagggatatgttggatgataggaaacgtggggacttcacttttcgtgataaagatttccgagcagccatagactggtataccaagtgtatggatgtggggccaaagaaggcgtcaccaacagttctcgttcgacgcagttgctgccacctcatgtgcggcaacctggacgccgccctccgcgatgcaatgcaagcgcagcgtcagtatcccgactgcccaacctcactgtacatgcaagcagtggcactttcaaagctagggatgcatagtcaagccatgggcatgctgattgaggcgtcggagatggaagcgaatcagaaaaagacccgaaaagcagcttaagaagactcaacatgggcgaaacctatataccttcgttttgtttctgtaagctattcttgattgttgtatctgcttgccaaattgtctaggttggagtggaattgggaagctttacctcttggggataatgcatttcttgttgtattcccctctgaggatgaaatgctccgtatggctgatattgagtataagctcaagagtggaatttctattcatatggattaggcctggagatgctaatccggcctattttttttggatgagatttgggtgcatgtttctggtgttccgca

SEQ ID NO: 26238 - DNA, 5777 bp, Zea Mays
atgcacccacgccccgtctctttgaagccgcccgcgtctccacccgagaccccgacccaccccgccctcccccgccgtcgcgctcgcgctcccccgcgacagccgccatgcgccctatctccgccatgcctgcgcctcctcccccgcccgcccgagaaccaccaagtttcccttccttacacagcgaggtccaccatcaacgcccccttccctggcaagccacagccgtccacgttcctggccaccagcgacctcccttctctagcccttagcagcgagcaacacctcctccccatggctgcccccagaccccagtcccgtccgcgcatccgctcccccgtcagcgacgcacctattctcctcgacgtcgcccatggcgtggacggcgacctccctcaccctgcactctggtatgtcaccgtattgcccgcctcctttccccgcaccggcgcagccccctgttgcggcggccccttccccaaacagcacggcaccacgtgctccccctgccgcgcccgcactctccttccccaaacagcacggccccacgacgctcacactctccttccctggcgatatcccctcatctgcgccttgtccctcggagatccccttccatcttcggcaccgagaggaaaatggatggcaatcccatccatcggcgccaaaccctacacatcctccatagtaggcacccgcccctccttacgcggcaccatcggtggggatatcccccaatctgctggaaggagtccgcgccaaatcagagcccgaaatccgtgccaaatccacgctggatgaggtggtggggagaccccccaatctgcgtcccttctacatgcctacacatcctccatagaaggcgccctcctactaaccactaaaaaaccccttccacacgctgacaactccatatatattagtccaaagggagagcacgattaaggccacgcctaccagcttcaccctcctcgcatttgtaagtccaatttttagatttatgatttcagatgttgagttgattttgcaaactggtaagtgttttgtttcatacggcaactctgcacatggacagaatcacagctctgttagcgttgttttatcaaggtacgtccaattccttctatttagttgactgtgattcaatatgcttgttgttcggttttacttgcgacatgctgttggggcatgtgtttgggatggatgacgtttggactagatagtttcagtcagtagccatctaaacaagcccttacagtattcgctatttcatattgaattttcctcatattgtagagaaaatcgcagctaatctgttcactgtggatgagttgccccatggtttgttcttaatcagaagaatggacgtgtgcaccacagtttagtgctaaatcatatggatataggagagatgtgctctctcctgtcctaaaacagttcatgttctcgtttttctattctgacagttcataagcgccggtcttttagatgcccactgacctggacatgttggtagaaatactgggcaggtgggatcaactccgatatttggtcaatttctcaaccactttctgttaatacgcaatttttattgaaaaacataatgacgtgcaatgcaaccaccctattcaatattcgtatggttagcaaaccatacgatcaatagaagatctttttggtagcactaaactacctacatacttgcatgcatgcgtcctaatccttgagtttgagtcaaaattaaatcaaaaattgtcatgatcaatcaaacaggaaagaattgacattctatagtttgcgtaggaaagtgtctctgtgtgttttctttttgaaggatcaaggattgaaggattttcctgcttgacggattagcacttcagtaccagtagttaagttattaggagcagtagcaaaaaggggctatatttgtttagggcttgttcgttttcatctcaatccatgtggatcagaggggtttgagtagctttaaatctacaataggtcaaaagctctactaaaatttttcaatctcatcaaatccatatgtcatatgaccgaacaaggccttagcgggtagggcacatcatcttaacgccaaactgctgcctcgaaaacgagtgtatagggcacaacatttgaaccacatatatgatatcaatcttatcaatctattgtgttaattatgaatcctgcatcaatcaaccagggcccggggcacattttcccaagccattgacaaatgttggtagatgcaggattcatagttacagaaactatgtggttcaaattttgccagtatttgactcatcacatttttcttctctatttcagttcttctagcagttgaagtagtgttttcttggcagatgttcgcctttaggacattgctgcgaggggaatcggatatgccacaggctgcatgttgttggagtttctatgtatccccatatcaaatttgtttttccctaatcagggaactcaattgtgcgagtaatagcaggagctcttccgaaaggccttcacatgttaatcctatcgaagaataacatatcaattattgaacgcctcagagaattgacacgattgcgcttgttggatatcaactataataggatatctagaattggccatggtgcagaggatgctaggaaaatactcaataattatggtacatgtccaattctaagtatggtatattgtgctctaatatttttaggcatcattgtttctgttaaatactttgcccatggttaaggttatgagtgcattggttaatgaaatgtatgacattaaacggtggctgcgtggtgttccatcgtttcgccttgagccattatttaggcgaagagttccacaattgcatactgcacttgaacatatatagtactcatgaagttgttctacatcatattggatttcaatgcttttttatcagtgacagttttctcttttttggtgagtacaataattgtatttttatcttgtaatagattagttttattcatacgacaagcactatgcactgtgatatttgttgatttttcctttacctgccccccttgcactttctaattaaatgtttttgactatggaatggatcttttccattccatgtggtttgggggacaattgatgtgctttgctttgaagacagttgtagtggtcatctgattgtgaatttgtggtgcacaagttggctatgtgttttttccaagaaaatattttcttaacatagtccagcactaggattctcgagtccccgatccccagcacaaacttgctgttgtttccacttttatcgtcaatagttgttagtacttactgattaaattcacattctttaatatatgaactttattgctttctgattgtgcattcagaggggcaacagtacatcattaatccatcaaatgttcaaaaatgtgcatccataggtgcaacattataacagggatacagtcactgctacgtacaataattttatggggctactgtaccacctgtacagtttttcatgatctgtttgagggaccttaacctaggtactaggcaaattttaccattgttgtgaactgactataaaactccttttaaggtggccttaaagtaaatttaagcatgtttgcttgaagccgctcagcctcagatcatcttaagaggttgtggatttattgagtccaacacaagtttggtgttcctttgtacagttttactatggagtaccagactacgagtcattgtttgtgccatgggtccttgacctttgtaactaattcaagtcagatgatatgtatctccttatgaaattcttttctcaactaccgtgatgatatttcaataattgatttcagtttcttctatgcattcaaagtagccaggctatcatgacggcattaagttcttgtatttaaccgttcgaccaaatttgtccaattgttataggtatctgtgaaaatccatgaacaacttatgtgttcatgtctctcattttatgtccttgcatgtcaataactataggtatctgtgtttatcacatatacaagctaacaatatacagttatgggtgagacaacgtcttagttcactgatcacacacatatttttgacagtcaatacttgcaataatgtgatatttgtaaactaatttttcctcaaaaattgtaacctgcatcaggcaaatatgagaaactagcatttgttgatgtttgaagtatatttatgtggatttgtgacttccttacatctcctctttcaaacaattggttcattattattattggtatggtggtgttatcgccccatttgcattaagctgctcactaagtcaaagtagtaaaaagccatggctgttgttacctagaagatgttgtgtatattcaaatcatagtgcttgtgttttgggctggagatagcacaaaataactactaaaactatctattatcaagtgatccatttgcagttttttcaatctgacactcacagactcactggttatatttcagagctgggaagaagctaacgatataccatacttagactcactggttaaggttatgagtgcattggtttgtaaaaaaaatatttcatggtcaccacagtaggagcaacatatccctgtttagcatattgggtaataactgtgctgatagtgtcacttaaacttggtaaacctgcaactgtaaatactgatacgtggactataagttttggccgtgcagttgctgtgtgataactattttgagttttcctaaacagtttcttacctagattgtcgtgaacttgcggtgtagtagcattgtacctattttaacttggccttgtttgtttgattttgtaagtgagggttttaatttagttgctagctcgatgaaagactatgattcgcaagactggatattttcctgcttatgaagaagcggtggcaaccaaattttcgaagtatgtgagttaaaaatctcgtcatgaatgaactcatgttgtttatagatttgcactggaatatgggcatgtagtgggcactactgggctaggagaagatgaagtgtttgtttttaattgcgtctttttgattgctttggcatgtatggctggcaatgtcatgttttttcatttttgtccacttcaatacacatgaaaccgttttggagactaattttgaagtatgtttaaacaattattctatttaaataagatctgcatatgtgatatattgaaaccattttggcaatgtcgtgtttttttatttttgtttaccatctgcatacctttacaaatgtcattttggttattttactgaattatattatatgccacatgactcttttattatttcttttttttaagaaagtcggggccattactcagatggtaaacaaacttgggccatgtaaatggtcgaccttgcctaaactatacctggacgtattggaaagcaatgctgggaaagctatgccatgaaagatatttgtagcagtgttacatgatggcatcaagtgctgggaaaatatttattaatttatggttttgtttctatggaatataggagtcatgattttgtgcatttgatcagagactacattaactagaggatactttctttttttcaaaattacaaaaacaatactaagtgtacctattattgtctactcgtctcatgatgattactatgtagataaattctctaagctatgaacagtgaccaatgaaatatattcatttgcatacagttctcaaactaatgtattcacgtcattatatattgtgccagctttgtcaa

SEQ ID NO: 26239 - DNA, 1080 bp, Zea Mays
atggtacttcaacttctaccagtgaattccctatcttgtaagcaaattgagaggcgatcatgcatttctttggaggcatttatacgtgattactttttatgtgagtcccctgttatactcagtggatgcattgatcattggcctgcaaggaaaaagtggaaggacataaagtacctagagagtgtagctggagatcggactattcctgttcagataaaggagctccacgaagatattgctgttcctgagtactgttcagctggtggtggcaaactccagtcacttaatgcttggttcggccctcatgggacaataactcctttgcatcatgacccacatcacaacctttttgctcaggttttgggaaggaagtatgttagactctatcctgcttctacatctgtgggcctataccctaacacagaaagcatgctaagcaatactagtgagattttctcctggacgccctgatcaaccctatcattcacgttcaacttttgcttcgttacaatccaaatccattccgtagcgtgttgtgatcctgaagctgctctctgcaccgcccaataaggttaattgagttctattgcaatcaaaaatcggtctgcatgtgtgacctctgttgctgcgtgtgatctgtcttgacaggtagacctcgacaacactgacggaaaagagtacccggagactgcagctcttgagttcgtggactgcgtattggaggaaggtgacctgctttacattcccccgaaatggtggcgttacgtgagatctctctctattagcttttctgttagctttcggtggcgaacatcacagcttccttgaggggaggttcataacgatggttttgacaaatttgatcgtacgtccacgatgtcgttccaatcatcctattggtagagacttaataagaagacttcattgagctgagcccatatttcgtggtctaagtgttgtgtgcggtcgcctcactagactgggattgtaaattgttttcacgacaatgattggtttcaaacatactaagcggtactatcaggtactagtgtggccgttttatattgtgaactgattctg

SEQ ID NO: 26240 - DNA, 2888 bp, Zea Mays
atgtccgtgatggcgcggaggctgagctccagctgcagcagggccgtcgcgtcctcgtgcccttccaaatcttctctgcggcgccgtatatatacccttccttcccgcccgctgctacccaaggagtcgtcgccgccgtcgaccagcgtctcgccgacccagcagcagtcccggagtacgatagagggaggcgagatgacggtcgcctcgtccgtcaggctcgccggcggcaatctgacggtatgcgggcggacggtgctgtccggggtgccggacgcggtggtggccacgtcggcggcgacggagggagcggtcgacgggatcttcctcggcgccgacttcgccgagccggccgcccggcacgtcgtctccctcggcgacctgagggacgttcggttcatggcgtgcttccgattcaagctatggtggatggcgcagcggatgggggagaaaggcagcgacgtcccgcgcgagacccagttcctgctcgtcgagtccaggggcgtcggcgacgaggacgcggcgtacgtcgtgttcctcccgctcgtggagggcgcgttccgggccagcatccagggcggtgccggcgacgcgctggagctctgcgtcgagagcggggacgacgacacgcgcgcggcgtccttcgagcgatccctcttcgtgggcgccgcggagtccgaccccttcgcggccatctccggcgcagtcgccgccgccaagtccgcgctcaggacgttccgggtccgcgccgagaagaagctcccgggcatcgtcgactacttcggctggtgcacctgggacgccttttaccaggacgtcacccaggagggcgtcgaggccgggctccgcagcctcatcgccggcggcgcgccgcccaagttcgtcatcatcgacgacggctggcagtccgtcgccaccgacaccaacgaatcggccggagaggacaagccgcccctcctatctcggctcaccggcatcaaggagaacagcaagttccagaacgcggacgacccggccgccggcatcaagacggtggtgcgcttggcgaaggaggagtaccggctcaagtacgtctacgtgtggcacgccatcaccggctactggggcggcgtccggcccggcgaggagcactaccgctccagcatgcagttccccaaggtttcgccgggcgtcatggagaacgagcccggcatgaagaccgacgtgctcaccgtgcaggggctcggcctcgtgcacccgcgcgccgtgtaccgcttctacgacgagctccacgcgtacctcgccgccgccggagtcgacggcgtcaaggtggacgtgcagtgcatcctggagacgctcggcgccggccacggcggccgcgtgcagctcaccaggcagtaccaccaggcgctggacgcctccgtcgccaagaacttcccggagaacggcatcatcgcctgcatgagccacaacaccgacgccctttactgctccaagcagacggcggtggtgagggcgtcggatgatttctacccaagggaccccgcgtcgcacacgatccatatcgcctcggtggcgtacaacagcgtgttcctcggcgagttcatgctcccggactgggacatgttccactcgctccaccaggccggcgactaccacggctccgcccgcgccatcagcggaggccctgtctacgtcagtgacgcacccggcaagcacaacttcgagctgctgaagaagattgtcttgcccgacggttccattctccgcgcgcgtctgcctggccggccgaccaaggattgcctgttcacggacccggcacgggacggccctgctcaagatctggaacatgaacaagttcaccggcgtgctgggcgtgtacaactgccagggcgcggcgtggaactccgtggagaagaagaacaccttccaccagaccggcaccgaggccctgacctgcggcgtcaagggcggcgacgtccacctcatctccgaggccgcgacggacaccgaatgggacggcgactgcgccatgtaccggcatgccgacggcgacctcgtcgtcctcccgcacgacgcggcgttgcccgtctccctcaaggtcctggaacatgacatcctcaccgtgtcacccatcaaggagttggcgcctggtttcaggttcgccccgatcgggctggtggacatgttcaatagcggcggggcggtggaaggcctgacctatcacctcctcggcggcgacggttccaccttgggctccgaggctgtcgcattggcgtgcatggaggtgaagggctgtggaaggttcggtgcctactcttcggtcaggccaaggaagtccacgctcggttcagctcagattgagctcaagtatgattcttcctcagggctgctgattctgcagctggatgcgatgcccaaggagagggttcacaagattgttattgagttgtagggtggtacaaagatttagtttcattggtaatcagagtaccctctgatgacgagtatgtagggactggagtggcgtatggtttgattgataggcaaatctgattcatgattcaagcttgtctggactatgaacagctggccttcagtatttgattacattcattcaaacacccgtttccaaatgttcagtattgttaccgtatgcgagcgagcaaagtatatatgttatacattgacaactgctctgcctgcttgttattctgtcagtcccttaggatccaactgtcttttcccagctgactgtctatgtttttaaccgttgatgtacttgtgtttgatctaccattgcagagaggcgcagaagatgttggtatggccggtgtttcgtaaccaccggctagttattctagtgcttttacacgtcgaatggtgtgccaagtggacacaaggattac

SEQ ID NO: 26241 - DNA, 3325 bp, Zea Mays
tctccattcccaattcccactaccgcggcaggcagctaccccctccctctcgtctcctccgccacctcttctcgcgtctagggtgcgcccgcctcgctggcgtagggtcgggacggttctgccggtgcgagctccacgacccctctgcgggagacgaaacaaaggcgtgggcttggtagatacaggtctgggattgccttttcctagttcaacatggagggcgctcttgttcagtctgctattgttccagccgtttacagaagcagctcaggtcggttccgtgtgcgtgcaagggccagaacaaatgctacaatggtgcggaatacgccaacaaggactcttactcttggtggcttccaagggctgcgtcagacaaactttttggatacgaggtctgtaattaagcgtgactttggatcaatcgtggcaaggcgcctgggacacaacttcgttgggacagaacagattttgctggggcttattggtgagggcacaggaattgcagcgaaggttatgaagtctatgggaatcaatcttaaggatgcccgagtggaagtcgaaaagataattggacgtggcagtgggtttgtggctgttgaaatcccattcacacctcgagcaaaacgtgtattggaattgtcccttgaagaagctcgtcagcttgggcataattatataggatctgaacacttactccttgggctacttcgtgagggtgaaggtgttgctgctcgtgtgcttgaaagccttggtgctgatccaaacaacatccgtacccaggtcataagaatggttggggaaagcacagaagctgttggggctggagttggtggaggaagcagtggccagaagatgcccacacttgaagaatacggtactaatttgacgaaattagcggaagagggcaaattggacccagttgttggtagacaggatcagattgagcgcgttacccagattttaggcaggaggacaaagaacaacccctgcttaattggagagcctggtgttggaaagactgctattgctgaggggcttgctcaacgtatttccaatggtgatgttcccgaaacaattgaaggaaagaaggttattactcttgacatgggcctccttgttgctggaaccaaataccgtggagagtttgaagagagattaaagaaacttatggaggaaattaagcaaaatgaagatattattctctttattgatgaagtgcacacactgattggagcaggtgcagcagaaggtgcgattgatgctgctaatattttgaagccagctcttgcaagaggtgaactgcagtgcattggtgccacaacactggatgagtataggaagcatatagagaaagatcctgccttggaaagaaggtttcaaccagttaaggttcctgagcctactgttgatgaaacaatacagatcttaagagggctccgtgagagatatgaactccatcacaaactgcgatacacagatgatgctttaattgctgctgcacagctgtcttatcagtatatcagtgatcgtttcctgcctgacaaggccattgacttgattgatgaagctggatcccgtgttaggctgaggcatgcccagctccctgatgaagccaaagagctggacaaagagctgcgacagataaccaagcagaaaaacgaggctgtacgcggccaggattttgagaaggctggtgaattaagggaccgagaaatggaactgaaggctcaaattacggccattattgacaagagcaaggaaatgattaaagcagagactgaatctggtgatgtcggtcctcttgttactgaggcagatattcaacatattgtctcctcttggactggaattcctgtggagaaagtgtcgtctgatgagtctgaccgtctcctaaagatggaagagacactgcatacacgtatcattggccaggacgaggctgtcaaagctattagccgtgctatccgccgtgctcgtgttggcctgaagaatccaaataggccaattgccagcttcatattctctggaccaactggagttggcaaatcagagctagcaaaggctctggcagcctactactttggctcagaggaggctatgattaggcttgacatgagtgagttcatggagagacatactgtctccaagcttattggatcacctccaggttatgttgggtacactgagggaggccaactaactgaagcagtccgtcgccgcccatacacagttgttctctttgatgagattgagaaggcacatcctgatgttttcaacatgatgcttcagatattagaagatgggcgattaactgatagcaaggggcgcacagttgacttcaaaaacacactattgatcatgacatctaatgtgggaagcagtgtcattgagaaaggaggccgcaagatcgggtttgaccttgactatgatgagaaagacaccagctataacaggatcaagagcctggtgaccgaggagttgaagcagtatttccggccagagttcttgaacagattggatgagatgattgtattccggcagctgactaaattggaggtgaaggagattgctgacattatgctgaaagaagtgtttgacaggctgaaggccaaggagattaatctccaggtcacggagaagttccgagatagagttgttgacgaaggttataacccgagctatggtgccagacctttgcggcgtgctatcatgaggcttctggaggatagtctggcagagaagatgctggctggtgaggtgaaagaaggtgactctgccatcgttgatgtggattcagatggcaaggtgatagtcctgaatggtggtagcggtgttgctgagccactggaacctgctctcagtacctaaccgaggtcaaaatcatcattggtccgaaatatggccttctttacaagtcagctgggtttctcgtgatggtaaaaactagactgacattacttggccgcccattagttgctttatctttcgtttattttcttttttgttggaagtgaggcagtagggttgctatggaaatgaatagatggagaagcatttagcagacatataatatatgctagacttttgagttgccttgttttgggaagaaacttggaattttcagtttgatgcacttgtattattattaggccttggtagcaacaagatacggatgtcgtctctacgtttgctgttgtacttcagtgtaacttgcctcccgaatgtatgagtattatttatcaagtcccaaataacagtgacggattgctacattctgttttttttgtttgtggatctgaaaattggaattcttagcttatctcca

SEQ ID NO: 26242 - DNA, 2683 bp, Zea Mays
caaaagctgggcgcactgccgcagcaggcagcggccctgtgggggttaaagaagggtttttggcatctagccgtccctttctgctgcgaacttgcgttgcgaccgtgcattccgttcctctcctctctcggctctcggcgagcgagatgcagagcctaaccgtagcaagagcgcttcctcccgccgtggccacagctcggcggcggccgcgcgcgtcctcttctagcagggaagcggttttacaatgttggaagtacgaattaagtcaagaccaatatctgggaggatccctaaggataggttcgtctcaaggaagtttggacatacatcgctcaacaaatttgctcagaccagctgctgcatctgtttcagttgaacaagatgaagtcaatacttatcttccaaaagaaggctcagtcaagggatgattcatatacaatagcattggaagaagtttttgagaagcatatggttgctgcaaaggatcttattgatggagaagatcttgcaagattcttgtctcagttgcactcagacgtcagcaacttgcgagccatgctccgtgctatttatatagctgggcatgcgacagagtctttctctgactttgttgttggacatggagagttgtggtctgcgcaaatgctatcttatgcaataaagaagtcatactttggggcaaatgttttgcatccgcgcaccattatacctgtgatgaaagacaacattcccattgttattaggaacatgttcaatctctctgcctctggaacaatgatttgcaagcagccggccaatgaaaatggtgatttagatgcatgtgtcaaatcatttgctactatcgataatttagcacttgttaatgttgaaggaactggaatggctggcgttccaggtacagcaagtgctatatttagtactgttaaagatgttggagctaatgttatcatgatatctcaggctagcagtgaacattcagtatgctttgctgttccagaaaaggaagttgctgcagtttctgctaggttacatgataggtttcatgaggcattagcagcagggaggttgtctaaggttgaagttattaatggttgcagcattcttgctgctgttggtctgaggatggccagcactcctggagttagtgcaatactttttgatgcattagcaaaggcaaacattaatgttcgagcaatagctcaaggttgcagtgaatacaatatcactgttgtattgaagcaagaagattgtgtaagggctctgagagctgctcactcaaggttcttcctctccaaaacgacacttgcagttggcatcattggacctggtttaattggtagaacactccttaaccagctcaaggatcaggttgctgctctcaaggaaaatatgaacattgatctgcgtgtcattggaataactggctcaagtacaatgcttttgagcgacacgggaatagacttaacccagtggaaacaacttctaaaaaaggaagcagaaccagctgatattgatagttttgttcatcatttatccgataatcacgtatttccaaacaaagttttggtggactgcacagcagatacaagtgttgcatcccactattataattggttaaagaagggtattcatgtcatcacaccaaataagaaagcaaattctgggccacttgatcagtacctgaaattgcggactctgcaacgtgcctcgtacactcattacttttatgaagcaactgttggtgctggcctcccaatcattagtaccttgcgaggtcttctggagacgggtgacaagatactgcgtattgagggcattttcagtggaactttgagttatatatttaataatttcgaaggaacaagggcattcagtgatgtcgttgctgaagcaaaagaggcgggatacactgaacctgacccaagagatgatctatctggaactgatgttgcccgaaaggtcattatccttgcaagggaatcaggtttgaggcttgaactttctgatattcctgtgaagagccttgtgccagaaacacttgcagcatgctcgtcagcagatgaattcatgcagaagctaccatcctttgacgaggactgggccaggcaacgcagtgatgctgatgctgcagacgaagtcctgcgttacgttggagtggtggatacggtgaacaagaggggacaggtggagctacgtaggtacaagagggaccacccgttcgcgcagctctccggctccgacaacatcatcgcattcaccacctcgaggtacaaggagcagccgctaatcgtgcggggcccaggcgcgggcgcggaggtgactgcgggtggcgtcttctgcgacatcctgcggctggcgtcttaccttggcgctccttcttagagcttccacttacagttgtcaatttgaagaggcagatggacagtgccctgcatgatgcctccgtgtttaggcttattatggacttgctcaaagttgttctgaataagtgccaggaaataaggcctctatctatttaggcctctatcttcggggtagctgactaagtgttgttattgctacggaatccagaattctgtgaattgaaatgaattgtaccgatgaagactgtttgcttgtgtctactggctactgttatgtgtcggtgttttaaccagagggtcccaaccaacaagtgaatttg

SEQ ID NO: 26243 - DNA, 1756 bp, Zea Mays
tcgctgctctgcgcctacgtacgccggtacgcattgccgcctcctccccctctttccagtcccgacccgcagcgggcctaatcctcgtcttcctcccgtaaaccacctcgtccctatccgcagcaaccgttcgccgcgccgcgaggcccgctgatcccaccgacctccaccgctatggctcctctgtcccgcgcggctcgcctccttcgatgcgccgtcgggcggctgaggttgccgccgccggcccgggccttctccagcgccgcggcggcgaccgagacgggggcggggaacggacgcgaggccgtgatcgccgctgctgccgtggcgatggccgggtccgggcttgggctgtggctgaaaccgccgtcgcttgccgactccggcgaggcgcccggcggtcagatctcggtcacctgcgctgcttccacggaggcgcaggaggagaaggggaggttcctgttcgcagactcattccgcagaagagtattctttaactatgagaagaggatacggcttctcagccctcctgagaagatatttgagtactttgcttctgtgaggaacccagaaggggaagtttacatgttgcctggggacttgatgagagcagtagtccctgtttttcctccatcagagtccaccatagttcgtgaaggaagattaagaggggagcggagccctggagagttgcattgtgctccatcggagttctttatgctgttagacactaatagtgacggtctcatctcctttgccgagtacatcttttttgtgacattgctcagcattcctgagtcacatttcactgcggccttcaaaatgtttgacgttgaccacagtggggtgatagacagagaagagtttaagaaagtaatgtcactgatgcggtcctttaacagacaagggtccactcataaggatggtttacgtattggacttaaagttggccagcctgtggagaatggtggggtggttgagtacttctttgggagtgatgggaacgagcctctacactgtgtcaggttctcaaattttttgaaggagttgcatgacgagattattcgattggagtttagtcattatgatgtcaagtcgtctaaaactataccagcaaaggattttgcattgtccatggttgcttctgctgacatgaaccatatcaacaagctgcttgatagagctgatggtttggtcaaggagccagatctgaaggacatacgcatcacctttgaggagtttaaggcatttgctgacttgcgacaaagattggagccactgtcgatggctatctttgctcatgggaaagtgaatggattattgacaaaggaggatctaaaacgtgcaacacaacatgtttgtggtgtcaacttaactgatagagtggtagacatcattttccatgtgttcgacacaaatcaggatgggaacctgagctcggaagagttcttaagagcattagaaagaagagaaactgctattcgtcaaccaacaataccaggtccatggggttttttgtcttgctggttcagtggtaggaagtgttcacttaaacaggtggtgctctgatttggcccctacttgatcctcactgaatctgtcatccaccttcaattgtcatctcccgttgcaggaggtaatcacgaagcagtgcctagctgatcggtaaaacgactttgttgtacatgtcgtctccgagtccgaagcttgcctagcagtagcagctgtaattattgacatgcttccaccgtaagcc

SEQ ID NO: 26244 - DNA, 773 bp, Zea Mays
ggcaaaaaaccaatgtacgtggcttggacaacttgatgacctcttgccaacaagaggtcaaaatttggtagttggtgattcgatatcaaaacacttcattagctccaatattatgcatttcactgtttggtattacggtgcagcgttttccagagataagtcatatttcttacagtattttgtcagacagcagatgtatcattaactcatgtctgttatacccagtgccaatgtgacttctggagtaaaagaagatcgcatgatgatgacaggaatgcatactgtttctgatatcttctgtgttggctgtggatccatcgttggatggaaatatgaggctgctcatgagaagagccagagatacaaggaaggaaagtttattctggagaggtacaaggtgtcgggccctgacggaagccaatactggattccacaagatcctcacttgggtggaagcgacgccgatgatatatgaagcgcaagtcaacaagttcaagcctgctgttcgtcgcctcccctgtagataacctgggtgtttttgctctttagtcagccgggattgctcccattgaaataatccccggcataaattattgttgttcttgatgacatgatcatatccttcctattgcccttggaagttgttggatgtttctattgtatatgcgtaaccggtgttgcttataagttcatcgagttgtatgccaagcgctaatgaccaaataattaaagtttgttaattgtctgatcgacccgggtgtcatgctgggact

SEQ ID NO: 26245 - DNA, 2834 bp, Zea Mays
ggtctatcagtcatcctggtccttttattttctttcttctctcacccggttcttcctcctcccgagtcccgaactctcgatccactcatccgctgagggcgtcggccttctggcccttctccccccggccgacctcgcccctccggcgctccgtccgcttcctgaactcgtctccctcacggacgttctcctccctccgctcgccgcgccgcaacccggagaggagaccgccgctcggtcgagcaccacctggggcccagcgtcctcgcgaccagctctagcgcggcgtccgccctctgcagccctggtgtccccgcgactggcttcggccggcacacaactccacagttaggtctccgtctgcacagcgcggcgatcttctctctccttcccgccctctgcagtccctctcagtccctctccgtctgcttgattctgctccaacctcagactaccctcgctctgaaaatgtcattacgcacccaatgcgcttgtagctgtatgctgcaaccctactctgcctcgtcttcttccatcaccctaagcatgcgcgcaacccccactcaccaacgacgggcccggccgccgccgccgtcctgcctcgccacccgccaccttcgccggcgacgagcaccagcaggaattaatagagttccaaacctcggttctgcagtttctactaaaaaagcagggatgagtaaggatacatttattaatttggacgtctctcatcacagagcggtggtgaggttgctaagaatcgagaaggggaaagcatttgtagaccttttgaacgagaaagcaaatgattctggagataaagagataggatatgtgcagaggacactaggtttcagcacacgctatttggaggacagggatataagactggttaccgtcatagttgctggaacagtgcgctggaaacgctaccttgattatctaatcatgtcactatgcagtgaggagaaggttttcagggagatggagccactgcttctacagatattgagaattggctttttcgaaattctcaagcttgatgtacctgcttatgctgccgttgatgagaatgtaaggcttgctaaagtagctttaaggcctggtgctgggaatatggtgaatgcaattctgcgtaaacttgtattgctaaaggagacagactctcttcctcttccaaagatagaaggtgatgatcgtgcccaagctcgtgctctttctataatttattctcatcctgtttggatggtgagacgatggatacggtttcatggaaaagatgaagctctaagattgatgaattggaacaacagtgatcctcatttcagtctaagggtgaacacatcaaaaggctatactagggctgaccttgtaaaacgattggaaagtttacaggttcattatgaagaatcaattatggatgaatttgttcgcattcgggaagggatgcagcaagtcttaaaagctggattactgaaagatggcatttgtgctgtgcaagatgagagtgcagggaagactgcgaactatagacccaaatgggtctgacccttccccagaccccgcacaagcgggagcacatgcaactggcgccccctttttttagatcactgcattataaaacaatactcttagcaaataatagctcatggctgtaaaaaggcacttctcatatcactttggtttagttgggagtgacacattttcagttgaggaagttattgataatctgcgctgagttatgaaagacctatttgtaggtcttgtagtgtctgtggttgatccacaacccggggaaacgattgttgattgctgtgctgcacctggtggaaagactcttttcatggcatcacggttgtcaggagaagggaagatatgggctctggacataaacaaaggtcgtttgagaatactcatggacgcagcaaagttacacggtctagatgatatgatcactgacatccatgctgatcttcgactatatgctaaggaaaccacagttaaatatgacaaagtattgttggacgctccatgctctggtctgggagtgctttccaagagggcggacttacgctggaatagacaatttgaaaatttggaagagttgatgtgtttacaagacgagcttcttgattcggcatcaatgttggtaaagccaggtggtatactaatttacagtacgtgttcgattgaccctgaagaaaatgaagagaggattactgcttttgttcagaggcatccggaatttgctcttcagagtgtatgtggatatgttcctagagaatttatcacagatgaaggtttctattcctcaaatccaactaagcactctatggatggggcatttgctgcacgtcttgtccggtcaacgcactaagattataggagttgccacaaggccacaactaggtgtgaagttgaacaaggaatcacatgtattgccctaagtgcacccagtcattgcttcaatatctttatcttatatattcttgaactttgctgcgttttcctcttacgcttcacaaaaaaaaagcatatccaaacccataccatattgcttcttgtacggcacgcagattttttgaagcgttttcgctttgtattaaagtcatctgtttagactgctcagttgtaatatatatagaaaaaacactgtaaaaacagtagaagctatgtcggattaaagccaaatcagctgcctatttcaacgagagaaaccgtgatgagagagaaatcgctgtttcctgaagccttcaaccgttagcagccggtggccggggcgtaaaagacgaactactcgtcttcacggaaaacgacggtgaagaagatggcgt

SEQ ID NO: 26246 - DNA, 1440 bp, Zea Mays
ccgagctcccgttacaatgcccagggaccgccggttctaagagcgtcagcaagaacgcggccgacaccagcaccttcggcaccaagacgtccggctcgtcgtcgtcggtgccgccaacccctcgtacggaggcggagatcctggagtcgtcgaatgtccgcaagttcagcttcggcgagctcaaaggctccacgaggaacttcaggccggacagcctgctcggggaggggggcttcgggtccgtgttcaaggggtggatggatgagcgcacgctcgcgcccgtcaggccgggcgccgggatcatcgtcgccgtcaagaagctcaagctcgacagcttccaagggcaccgggaatggctggcggaggtcaattacctggggcagttatcccaccctaatctcgtgaaactcatcggctactgcttggaggacgagcagcggcttcttgtgtacgagtatatgccgagagggagcctggagcatcatctcttcaggaggggctcgaacttccagccgctcccatggaacttacgcatgaaggttgctctcgaggctgccagaggtcttgctttcctgcacggcgaccaggccaaagttatctaccgcgatttcaagacctccaatatccttctcgactcggagtacaacgcaaaactgtctgatttcggtttggcaaaggacggtccaagcggtgataagagccatgtttctactagggtcatggggacacaaggatacgctgcccctgaatatcttgcgacaggccatttgacagcgaagagcgatgtgtacagctacggtgtggttcttctggagctgctgtccgggcagcgcgctctggacaagaaccgcccgcccggtcagcacaatctggtggagtgggctagaccttacatcaccaacaagaggagggtcattcatgtcctggactcacggctgggttcccagtattcccttcccgcggctcagaaggtggcaacactggcgctgcaatgcttatcgatggacgcacgatgcaggcctggcatggatcaggttgtgactgcattagaacaacttcaaaggccaagggctcactgaaaaagatgtccatctacatctgtggagtctggagcatcctcctgtaatactttaggggagtaaaaaaacagagaacggacgagggtttgaagggctaagtggcttgtgaagagaatataatattgccttgctttgtgtacagctagttgcttcgtcgttgtaacttgggtctctacttatatattttattagtcttcgatgtaccagcggttcaaagggtaagttcttttgttccacttcaccgcaagattccagtttgaatgttcttgagagtgtaagaaatgcttcttaaaagaccgccgctgcaaattgcttgccaattaaattatgcacatgccaattaccaaagcatactatgatg

SEQ ID NO: 26247 - DNA, 2209 bp, Zea Mays
tactacgccatctcttcgtctcccgtcttctagtgtgcaagaaccatggaggaggataatgcagactggtgcgatgaaaatgttaagatagcttgtgaaatatttgctgaggaagtaagagcaaagaacagatcaggttctcacttaaacaagcttgggtacaacaatgtaatggtcaagttcaaagagaggacagggaaaacttacagcgagctacagttcaaaaataaatgggacaagctgaaaaaagattatagtaattggaaacaattgggaaaagagacaggatgtggttgggaccctaacaagaagttgtatgttgctccagattggtggtgggagaaggcaaacatacaattcaaaggcattagcaagtttaaagacaagtcacttcaaaatgcagaagaattgagtgtcatgtttgaagatcttcggaacaccggtgatgatcactgggtcccaaccagtggtgagctaccccaagacactgaagcacaaatacacgatgccatcaacattgaagatgaaaatgctagtgattgtggggaagacacaccatctagttccacatccaagagacgtcgtgtggttgtgacagataaaggtaaaaaaccgaagactacgggaggacaatggatgcaagaccagatgtctaaactttttgaattgaataagcagacaacaacatcttgtgagtctatggtcctggcaagaacacaagagacacctggatcttctataaaagatgttatgcaattagataaaggtaaaaaaccgaagactacgggaggacaatggatgcaagaccaaatgtctaaacttgttgaattgaataagcagacaacatcttgtgagtctatgttcctggcaagaacacaagagacacctggatcttccataaaagatgttatgcaattggtgaaggcatgtggtgctatagctggcagcaaagagcacttcattgcaactcaagtctttacaaaaaaaaatgaaagagaaatgttcttgactttggatacacccgaggagcgctttcagtggttatcaatgaagtatgaatggatgacaatgaacaagaagggctagttagagctactttgttatgcatttatcgtgtcattttttgtttttaccttaccaaacttatctattagaataaattcaaacattctggggaaacaattagtagaaaatttatggaaattttctgttgtgtggtgggcatgtccaaccaatatacaaggcctaaagatccaaactttcgtaatgtgcacgataggataagaaatgatccaaggatatggccacactttaaagattgcattggagccattgatgggactcatatttgtgcaaatccacctccacaagattttcttaggtacctaggaagatctggtaaagcaacacaaaatgtgatggcagttgttgattttgacatgcgtttcacctttgcctctattggtcaacctggttccatgcatgatacaagtgttctctataatgctctacaaatagatgaagatatcttcccacatccacctctggggaaatattatgttgttgatgctggatattcgaatagacctggatacttatcaccatataaaggtcaaaggtaccacgttccagagtggagaagaggcccggctcctagtggcgagcaagagatgttcaaccatttgcactcaagtcttcgcaatgttgttgagcgtgtatttggtgtatggaagatgaaatggagaattcttctcaacatgccaaaatatccaatggtaaagcaaaagatgattgttgcagctaccatgtgtctccacaactttattcgtcaacatcatgcacttgacaaggattttgagagatgtgaccgagaccaagattatgtgcccactataccagcaaggtataggaaccaagccctttctcaaagtttattggataccacatcacatgctaatgacaggacaatggacagattccgtgatgatcttgctcttgctattagttcatctagggcataagcttaaggatatttggattttattttagcctccttttgggcatgtggttgtattttgttggaccttaatgaacaataatggatgcatcctgccccgttgttccctttcgatcttcaatagaatctagaaattttcttctgcttgcttttgtctggcgcaatgggaaaatatagaaaatataaaaaaaa

SEQ ID NO: 26248 - DNA, 1333 bp, Zea Mays
tcctggtatccagttcctttctttgcccctcctccgctttcttcggttcttcctctcccccactccccacgctgcctgagaggctgagactaggaaggggaaggaaaataatagtttggcgcgcaaatatccgcctccattcgtacgccgctattctcgtctgcgatccgcagcgcgatgatgatcccgtggggcggcgtggggtgctgtctcagcgccgctgcgctgtatctcctcgggaggagcagcggaagtgatgcggaggtgctgaggtcggtggcgagggcgggcagcatgaaggatttagctgctatcttggacactgcaagtaaggtcctaccacttgtagttgccatctctgggagagttggttcagacacaccacttatatgccaacaaagcggcatgagaggtgtaattgttgaagaaacggcagagcaacacttcctgaagcacaatgatgccggatcctggattcaagattcggcagtgatgctttctgttagcaaagaggttccatggtatctggatgatggaactggacgtgtttatgtggtcggtgctcgttctgcagctggtttaattttaactgttgccagtgaggtttttgaggaatcagggaggacacttgtacgtggaactctagattatttacaagggttgaagatgctgggagtaaagcgaactgaaagggttcttccaactggaacctcattgacagttgttggtgagcgaccgcacaaaggacccttttatgcatcatcaaagagcattgatcaacttattgtgaatcttgggaaatgggccaagttataccgaattgcttccatgggttttgcaacatttggtgtcttccttcttgcaaagcgtgcactacagcattttctagaaagaagacggcggcatgaactgcaaaaaagggttcttaatgcagcagcacaaaggcaagctagagaagctgaagggagcaaaggtacatcagacgcagagcctaacagtaaaaaagatcaattagtgttggacatatgtgtcatatgccttgagcaagagtacaatgctgtttttgtgccgtaagtattgtatcttttccagaacttgaatgctctttgttgagaatgaagcaacttgattttctctatttttctatttcctttttcccataattccaaatatactaggcaacattatggttttcatatttcctgttcactagtagtttcttgatttttctcttaatggcttgcctcataacttgatagaacttgaatactgctaaggccttctttggatgttcagtactaaggaactataattctagaacccattgatctgc

SEQ ID NO: 26249 - DNA, 1373 bp, Zea Mays
ggaaaaaattgctgcgtgcgccccgccgcctacacacgcctagcccgctccccaagaaagagcccccgcacacaggctgggaggggagcgaaagcgaaacgtattaaactcgcgtacatcatcaaccgcatgcgctgatgcgcactgccactgccccggagaaattcaaatcccaagccccacaagcaaattaccccagcatcaaatcagcggccggccggccggcagctctcggtcgatccactgcggtttccagtcccgaataatcccaattcccaatcgattcgaagcttccttccttcgaggagagggggaggtggaaggcgcgggggaagctctgcttagggttcggaggtggccggcgccgccgcggggcggggacggcagggggatggatccggagcagacgttcctgcgggtgcacgcgcgcttatcggggacgctttcccagctgctcacgccgcggatccgcctcgtcctcgagtacctctacctcgccggcgccgtcgcgctcttctgcctgctcgtcgtcatgcacacgaacttcgtgcagcagcctggttgctcaagtgaattttctggaattgaatttggagaagcacaacttgtccaaatcaagattatcagtgggggattatggtccagcagaggtgcttcttacatcatggatctccagaacctgggacgttcagctgagaaaattttagaggttaatggtgataagttcaacattttggcatctaaattttggtcaacctgggttggccctggagctaggaggagcttaccagatttgaaggcagccggagagggttctgtacaccaccctttatctgctaaggagtcatttaaagcagcagtgacatttttgttcagaaaatggtaccttcgtgctgtttcattctggaagaacataaagcaactttcagaaaataccctccagttaatggtcagatcaaattggaacgatttcctacatattattaaggatcttcaactaccaagcatggatcatcttatttcgacaatagtgcaatggtttgagaggagaagtaaagcatttgagcctacttatttatatggcgtggaaaagggttatttcttgctttctgaaggtgctaaaactcgtcatggtgtccgaacaatcaatatcacaatttctgctcgaaatccttgctttggaaacaggtggcagcaacttttgataaacagcattgttggatatgatactatacttacaaacagcttggtgaattctcctggtcatggctatttatacaactttcagacgaaggagctctatgatcttagttatgggcatgaaccaccagaaggtcctacaagatttggaggttgcggcctggactgctttg

SEQ ID NO: 26250 - DNA, 3035 bp, Zea Mays
atgggtctaggagcagatcaaactagtatttctagaaggtcaaaacatgcaaacctcgaggggaagcaaagcaaacaagctaaaaccatcaattccccattcgcaagccgtcgccaccgccgtcgccggcgtctcctcctctgccacccagcccaccctcctccgccacagacacaccgctatcgcttcccacatcatctctccagcgtccgccgagggatggagaacggtggaatcgaggaggccgacgacgcactgccggagcccgcgccgcccaatgggcggcggtaccggccagtcgggtcgagcgaccgtgccgtgatccagatgacttccatggagccgggatcctcgtctgccaccatcgatgccgtcgtgactccccagccgccaaggaacctgaagcctgatgctaatctaactattgatccaagtatgcgggaaggttctcctgatgatcatgttacatccagtggatctcaaggggattcaaagctagaactctttggttttgattctcttgtaaatatattgggtcttaagagcatgacaggagagcaggttcaggccccttcaagtcctagggatggcgaggatgttgcaattaccattggccggcccaagcaaagtggacctaagttcggcaccatgatgggtgtctttgttccatgcttgcagaatatcttgggaatcatttattatatccgttttacctgtgctctggtaggtctctttttcccagcggtcactggaattatggctggctcaaaccgatctgcctcactgaaagatacacagcgttcaataccaatcggcacattatatgcaactcttacaacaactgccatgtatctattctctgtgcttctatttggagccttggctacacgggaggagcttctaactgataggctccttactgctacggtggcttggcctgctcctgcagtgatttacattggtattattctgtccaccttaggtgcagcactgcagagtttgactggggctccaaggttgcttgcagcaattgctaatgatgacattcttcctgttcttaattacttcaaagtttctgagggatctgagccgcatgcggccactttattcacggccttcatctgtatttgctgtgttgttattggaaacttggatttgattacacccacgatcacaatgtttttccttctgtgctatgctggcgtgaacctgtcatgctttctgcttgatctccttgatgctcctagttggcgccccagatggaaatttcaccattggagcctttcacttgttggggcattgttctgtgttgtgattatgtttctgatctcctggtctttcactgttgtctcccttgcccttgcaagcctcatctattactatgtgagcataaaagggaaggctggagactggggagatgggttcaaaagtgcatactttcaattggcactccgaagtctcagatcactcggagcaaaccaagtccatcctaagaattggtaccccattcctctgatattctgccgtccatggggcaaactgccggaaaatgttccttgtcatccaaaacttgcagactttgctaattgtatgaagaagaaaggccgtggtatgtccatttttgtctctataattgatggtgattatcatgaactagctgaggatgcaaagactgcctgccgccaattggatgcttacattgactacaagcgctgtgagggtgttgcggagatcattgtagctcctactatgtctgacggcttccgcagcatcgtgcagacaatgggcctaggaaacttgaagccaaacattgttgtgatgcggtaccctgagatctggaggcgtgagaatttgacacagataccgtcaacatttgtcagcataataaatgattgcattattgctaacaaggcagtagtcattgtgaagggactcgatgagtggcctaatgagtaccagcgtcagtatgggactattgacctctactggattgtaagggatggaggattgatgcttcttctgtcccaactcctgctgacaaaggagagctttgagagctgtaagatccaagtcttctgcatatctgaagaggataccgacgcagaggagctgaaagctgatgtcaaaaagttcttgtatgatcttaggatgcaagctgaggtcattgttgtcactatgaaatcatgggagtcacacatggagagcagcagtagcggtgttcagcaggataactcccatgaggcttacacaagtgcacagcaaaggatcgaaacataccttgacgagatgaaggaaactgctcaaagagaaaggcagccactaaaggagaatgggaggcaagttgttgtgaatgaacagaaggttgataaattcctttacacaatgttgaaattgaactccacgatactcaggtactccagaatggcagctgtagttcttgtgagccttccaccaccaccactaaatcatcctgcatatttctacatggagtacatggatttgcttgtagagaatgtcccacgcatgttaatagttaggggatatacgagagatgttgtcacatttttcacatgattatacatataatataaacttcccacctggagactctagtgtcgtctggctgttgtactatcttagcagagactggttacacaagattcaagcgtggattctgccatcgaaatgacaagccctcaccttgaaggcaaccatgatgagatgtcaaatgtcaagggctcttgttcgggcttattgggttcgtgaactactgaactgcagtgtcttcattcttttctggattttaaagatccacatagcgagctttgattcttacagattttgtagtcatcatatgtaaacacttaccatctagtaagcatacttacatgctgccccaatgacagaatgcgatccttaccttctcacaaacatttatatatgtattttctttgcatcacttaagtccatctaaaacttatggacctgtggagatgagcagagagccagagatgcgaattttgaatggctacccc

SEQ ID NO: 26251 - DNA, 213 bp, Zea Mays
agcgctctatactctaatccgaagagtactaatcgtagcgcagataaagccgaatttagggagggagccataccgagcatcgatcagaatctatcatggagacgatgtcccacggctccgcgcggacgcgacgaaatcaacgagaatcagccgttcgcccctgtccctccgagctcagagtcgaccttgattgattacaatccccgcgcagct

SEQ ID NO: 26252 - DNA, 1088 bp, Zea Mays
tgcaattgaatcaatacttatctgtctcaaacagttgaacctgacatttagaaacaaagtgccaaaatggccatgtagcgtgcttttcctgctggtctaggctcaccaacaaatgccacatttgttctagtgatgctaactttgtaagaaacattgcactggagaaagttgttgagtcagttaagtcatcctgctcatatgccaaatggggctgtaacaagttggtcagctatgcatgcagaaacgctcatgaagaatcctgcctttttgctccatcgatgtgtcctattcctggttgtgggtacagaggatttactggatggtggtcaggacatttccttacaaaccataatagtgatgggctgcgcttctcatatggtcagtgttttgatgtgagtttggaaatgtcagttccttttctggttcttctagcagaggatgatcacctattcattttcatcaacaagaacgtgattccctttggccatgcgctttcagtgtgttgccttaggactggcaatctgaattggaatttcttatacgaaatgagagcaactagtaaaggaaacactaaaaacagtctgcaattgaaggcttctgtcacaaatacaagggagtggcgaggtctcaatcctacagaagttttccttttggttccatatgccttcagcaaatctagcaaacttacactgaatgtctctattgagagggttgctgatgtgaagtgaatatctgcagtttgtaatgtgttgtaaaatgtaaaaaaggtggcagtgtaagtttgtctttagaaactggttttccactgaggcatctctgacccatttggtttgctaaacccttgactctattcttgtgattcagatgatgccatcaaggtttgtaactgtatgtgtatactcccatgtactaaaatctgtaactgagatgcttgacgtaggaactatatgaaatattcaatttgcattcttgtgtaaaccatgaattcttgatatacatgcaacaattggttccttctgttcttaggtctgggaatttggttgtgtttattgatgtatttagatgcaaggaatgaatggcaccattta

SEQ ID NO: 26253 - DNA, 254 bp, Zea Mays
caggttcctttgcttatgacccgaaatttcattcacatgatgtctctgtattgcctctattttcaatgaaatgtatctcatcatcttcgtttgctctaaaatagtgcgtttattaagacaacgtttggttccagagtaacgtgggacggagtcactctgcttctaatctgttcttgtttgaattggttccatataggatctaaaaatgaaatactatgctcaaatattgaaccatttgactccctgaatttttc

SEQ ID NO: 26254 - DNA, 2584 bp, Zea Mays
gtccacgtgcgccgcacacgcgggaaaggggactctacaacacgcatcgccccgagccgagccctctcgcttcccttttataccccttgccacgcgcattcccctctccactgccagctccggtccgcagagggagggaggaggacgccagttgccactgccgcgccgctcccgcctccctctctccatccgacgagctcgagaagccaccatgatctccgcgcgcaccgccgcagcttcccccgcctccctgtggaagcggggaggacaaagtgagggcggcggcagttgcgacggatgtcggacctacaggaacactttgcggagggccgcagcagcgaaggtgcgtgccttgccgtcgagggcggtggaggcggtcaaaatgggctccgccgcggaggtggagcaggaggaggcggaggtagccgcggccgcggacggcgtcgtcgtcgaggaccactacggcgaggacagcgccaccgaggagctgcccatcatgccctgggccttctccgtcgcaagcggttacaccctcttgagggatccacatcacaacaagggtcttgctttcacggagaaggagagggatgcacaccacttgcgtgggctgcttcctcctgcagttgttcctcaagaactccaaattaagaagatcatgcacaacctgcggcagtaccaggtccctttgcagcgctatatggccatgatggaccttcaggagaggaacgagaggcttttctacaagcttttaattgataacgtggaggagctgcttcctgtggtttatacaccaactgtaggtgaggcctgccagaagtatgggtccatctttcgacaaccacagggtctgtatgtcagcttgagggacaaggggaaggtcctagaagttctaaggaactggccacataggaacattcaagttatctgtgttactgatggtgagcgaatcttgggacttggagatttgggttctcagggaatgggaattcctgtaggcaaacttgctctatacactgctcttggaggagttcgtccatcagcttgtttgcctatcacaatcgatgttggcacaaataatgagaaactgcttaatgatgagttttacattggactccggcaaaaacgtgcaactggcgaggagtatcatgagcttatggaagagttcatggctgctgttaagcaaatctacggcgagaaagtcctcattcaggtgagttagactcaacattgtacttctgctatgtcagatcaatttactctttatcccaaaatgtaacactgtaaaatttggacagtttgaggacttcgcgaatcataatgcttttaatttgcttgcaaaatatagcaagagccatcttgttttcaatgatgacatccagggcacagcatcagtggtccttgcaggtttgttagcagcactcaaggtggttggtaggaccttggcagagcacacttatttattccttggtgctggggaggctggaactggtattgcagaactcattgctcttgagatttcaaaacagacgtcggctccaattgaagagtgccgcaagaagatttggttggtggactcaaagggtttgattgttgactctcgtaaaaactccgttcagtcattcaaaaaaccttgggcacatgagcatgagcccttgacaaccttgtacgatgctgttcagtccatcaaacctacagttctgattgggacgtctggagttggaagaacattcacaaaagaagttgttgaggccatggcttccttcaatgagaggcctatcatcttttcactgtcaaatccaacctctcattctgaatgtactgctgaagaagcatataactggactcagggtcgtgtaatatttgccagtggcagtccatttgaccctgtggagtacgatgggaaggtttttgtacctggacagtcgaacaacgcctacattttccctggatttggcctcggtcttgttatctctggagccatccgtgtccacgaggacatgcttcttgccgcctcggaagcactagctgctcaggccacacaggagaacttcgacaagggatcaatcttcccgcccttcaccaacattagaaagatctctgcgcgcattgccgcagccgtggctgcaaaagcttatgaactcggtttggcgacccgtctgcctcccccaagggacctggtgaaatatgcacagagctgcatgtacactcctgtctaccgtaactaccggtagtgctgctgggatcaattctgcagtaataaaatatgtcgacgcagatgatcctgcaatgttgtagtttattttttcatttgttggccctgctgctgaccacctttgtggctgctagacactgtacctgtctatgcatatatgatactggaacatttggcgcgctgtgggcgtccctgtcatgagatcaattgcagaaataaaatgcaatttagatttgagcaccaaaataaaaatagtaataatacacaagtgaggcaagcatatgttgaatctgatttgcttcaccttcgattagagatgacaatgagtaaatattcaccttcgattagagatgacaatgagtaaatacccgt

SEQ ID NO: 26255 - DNA, 629 bp, Zea Mays
tttttttttttgtgaagacgacgaaggcctccatagcttctccagtttcttcgagctttacccgcttccactcctgggccgcttgtttgtcagcctgcccagccacactgccgaggcgacgacggcactgcccggcgaagtcgtagacgactcaaaaatgatgttttactgctacgacgacgacttcgtccttgaccagctgagctacatcaagctggtgaatttcagagggacgaggttcgagctgcagctgctcgccttcctcctgaagaggacccctgccctggagcagctggtgcttgtcactgtaggagaagagggaggagctccgggagacgagcgcgtcatccaaggctgggtgtcggcgatacaaaaggcgtccccagaggctcagctcaccgtgtgccagtcgagcgaagatcgcagccagaatcctgtgcacacaaggttctaccacgaacttttggaagaataaacgggcaccattgatccctcaacatatacccttcgttgaaagcattaggtgtcgacaatgacatgccgtacttgtaagtactataaagtgcactactgtaactgttgtgaagcaagcagcgataacactatgggggtgtttggttctgtggact

SEQ ID NO: 26256 - DNA, 2868 bp, Zea Mays
agagatgaagatgctttattgaaaaccaaatgtccgaagcatgtggagctgagatggcagactgaagttagttccagcatttatgcaactcctttgatcgctgatatcaacagtgatggaaaattggaagtagtggtgccatcatttgttcattacttagaagttcttgaaggcactgatggagacaaactgccaggatggcctgcatttcatcagtcaaatgttcattcaagtcctcttctgtatgacattgacaaggatggtgtacgggaaatagctttggctacttacaacggtgttgtaaatttctttagggtgtcaggttatatgatgatggacaagcttgaggtacctcgtagaaaagtacgtaaagattggtatgttgggctaaatccagatccagttgaccgctcccatccagatgttaatgacagttcaattgccaaagtggctacttctaatgaaactcccctaatagatcagaataaatcagttagcagaactctctgattccatcgacttgctttaaggaaaaaagaattgcatgcatgtttcagcagtaccaactatactaagaagtatgaagggaggtgaggccctgaaaaattcatccgagcaacactcagctgaaacaaaacttaattctacgcaagtgcaagagaatgtacagttgccaaacaatgtaaacgacactcattctgagagcatctctagtgtcactactaaagcagagaatacatcgcaaacacatactcagagacgcttgcttgaaacagccgacaagagtgatgatcaaacaggaagctcagaaactcatgaaagtgattcgggggcaaaagcagcagccactgttgaaaatagtgaacccctagacgaagatgcagatgcatcatttgacttgtttcgggacccagaagatcttcctgatgagtacaattatgattatgatgactatgttgatgatcgcttgtggggagatgaggattggaaagagcaagaacatgagaaagaggaagattatgtgagcatagatgcccacatcttgtccaccccagtaattgcagatattgacaaagatggtgtacaagaaatggtgattgctgtatcatacttctttgatcatgaatattatcgtgattcagatcatgcgaaagaactagaaggaattgacatgggaaaatatgtcgcgagcagtatagttgtttttaaccttgacacccggcaagttaaatgggctgcagatcttgatttgagcacggatgctgtaaatttccgtgctcatgtgttttcctctccaactgtggttgatttggatggtgatggatatttggacatccttattgggactgcttatggcttgttttatgttattgatcatcgtggtaaggttaggaacaaattcccccttgagatggctgagattcacgcaccagtcattgctgcggacatcaatgatgatggcaaaatcgagatggttaccactgattcccatggaaatgtagcagcatggactgcagagggagaagaaatctgggaagtgcatctaaagagtctgattccacagagacctactgttggtgatgtcaatggagatggccacactgatgttgtggtcccaactgtgtcaggaaacatctatgttcttagtggaaaggatgggtcaaaaatccaacctttcccatatagaacacatggaagaatcatgagtcctgttctacttctcgacatgagcaaacatggagacaatgcaaaagggctaactcttgcaacaacgtcctttgatggttatttatatttgattgagggatcgagtggctgtgcagatgttgttgacattggagagacctcgtacactatggttttggctgataacgtggatggtggagatgaccttgatcttattgttaccactatgaatggcaacgtcttctgcttctccactcaatcaccacaccatccgcttaaggaatggaggtcatcaaaccaaggaaggaataatgctgcatatcagtacaaccgtgaaggtatctatgttaagcatggttccaggaccttccgtgacgaagagggcaagaatttctggatagagtttgaaatcgttgacaagtacagggtgccctatgggaagcaagctccttataacgtgacggtaactttacttgttccggggaattatcaaggagataggcgcattgttgtcagtggtgtgtatcatcaaccagggaagcaacggatgatgcttcccactgttcctgttagaactactggaactgtggtcgtggagatgatcgataaaaatgggctgtacttctccgacgagttctcactcaccttccacatgcattactataagctgctgaaatggcttctgctactgccaatgcttggaatgtttggtgttctcgtcatcttgaggccccaagaaggtgcgccgctgccatcgttttcacggaatatcgactagtggtgaaatgccggtgacccattgaagctgacgaagtgactccccaacatctccatgacctaaatgtcttgttcagtgtagtatcccaacagttaaccatttcatggattatagttatattttttacaatgtacccatttagttctgcagaacaattttgtacacagccattttcaatattggctcacccaaagaacaagcatattgtcaccattgagagtttacagtaggccttggaaacggtaattgtcagattctaagagaagcgacactcggagaggagaagcaaaactctcggatactgtgtcaaaacgctcttcataactattagtagaaaacaaacctatattaagcctgttttcatgctagcctgtcattcctgggtctgtgcggatgttgttgac

SEQ ID NO: 26257 - DNA, 1216 bp, Zea Mays
gcatgaatacttgttcttttcattacatgtgttcttgctatttgagtaatataggttggattatattctttgacaaacatagagttcaaggctcctgagagccacatgcttaaatacatccagcaagtgttaggagtaatattagcacttcttgaagaccccaacgagtctgttcaattaactgctgtccaatgcttgttaaatgtccttaatttgtcagaacaagatgctgttggtccaatcttaataaatctcttagtaaggctgcgaaatcttcaggtctcaatgaatacgaaaatgaggtccaatgcgtttgcagcttatggtgctttaagtgcatatggtgttggtttgcagcgcactgcttttattgagcagatacatgctacccttccccgtctgatcctccatcttcacgatgatgacctaagtgttcgtcttgcctgtcggaacacattccagctccttgcgacattgatggaagtagagggcttgtctgtgctcctcagcaagcagtattttgcttctgatcgccgttctgactatgaggacttcattagagacttaacaagacaactttgtcggttgtctcccgccagagtcgacagctacctagaatcggctatccaggcattcgatgcaccttggccagtcataagagcaaacgcagtttgtttggtgagttgcatgctatcctttttggatgatcagcgattcattgctccttatttctcccaggtatttgctacgttggttggtagaatgagccaatcgccagacgcaattgttcgagcatcagcatcgtctgcgctgggcattctgatcaagagatctaacatgctgaggtcactggtttcacgatatgatcgagcagattcatcacgcaattcccagagcggtgattctaacaccaagacaccatcagagtttcaagaacaggcagaaggaaatccgaatgatggcgcaagtggagcggcaataaaggggactgaagccgatcactgatgtaaatttactcgtatatacgtatagtgttctagctatgcatgcttgtgtatatgctgtacttccctcgcaaataggaacaggagagcaaatttatgctgccatgtcaatagatcttcagtacacctgtaaagcaaccactcacagttagatgattatttattgaatcaaatattatttatatattgaattgaattttcttcgatgcagt

SEQ ID NO: 26258 - DNA, 1176 bp, Zea Mays
atttcccttgctagctattctcagaaaagcaaagagctggattggtggaagagactcgagattgtgagcggagttgcacggggcctgcaatatctccacgaggagtctcagctgaagatagtccatcgagaccttaaaccaagcaacgtgctccttgactctgcttacaccccgaagatatcagattttggcctagcaaaactcttccacatggatcagagccaaggtgccactagccatattgctggaacatatggatacatggcaccagaatacgccatgcacgggcaatactcggtcaagtcggatgtcttcagttttggtgttttgatcctggagatggtcacagggaggaaaaacagtaactcggaccaatcagttgacctcttaagcctagtatgggagcactggagctcaggaacaatccaagagctgctggacccattcctgatgagccaccgagctcctccagaccagatggcgaagcttgtcaacatcgggctactatgcgttcaggacagccctgcagacaggccgctgatgtcgtctgtaaacgttatgctcagcagcgacaccatctcactacaggccccgtcaaggccaacattttgcattcaggagacggaagaccattcgcgcccctactccgatgcgtataagagggcgctgaagctgcagtcgtccactgatagggcagcaatgtcgccgaacgaggttacgctcacggagcttgaaccaagataagcatgcatgaacgccgacaagaatatacatatggccgaaagatatatatatatatatatatatatatactgttttcaagaatctcaagtcgtattagataatgttttttttttctgaatgaactggaggggtaccccgtacggataataattttatttgaatgaaaaggacttgtcatagaatcacataaacgaaaagaaagaaaaagggagtctgtaaaaaaaatgtgaaaggcatctatgcagacttggggatgtctttgaagatgaggttgctccttaggcaccaaatgctccaacacatgaactgcattcacgagcaaacttacattgtaagaaaagatgggatagacagatgacacaattgtaccagggaaaatgcattctctttcatcttaaaagctctctaatgcttagcaagagtaacaaaaag

SEQ ID NO: 26259 - DNA, 1141 bp, Zea Mays
ctggaatctgctccataaattggtcaagaagcttatcaaggagaagaaggatgatgctggaatttctgaatatattgatatggagaaggagcttcaagaggtctatcaccgccaagctattcagctggagtgcagtctgagggactggatgacctttcacattcccataagtttgccgttggtactagagttcaagctgtgtggagtgaagatggagaatggtataatgcaaccgttgaagctttgacaccaaatggatactatgtagcctacgatggctggggaaacagtgaagaggtggacccagataatgtgaggctgcttgaggaagaagcagctgatgccttgggacaagctgaaaaggaagctgaagctacaaaaatggcaataaagaggaaaattgaacaagcagcaacatctgattttcaggcgcgtagcttgccggccaaacttcgtatcgaaccaagtgaccctgaggatgttaaagctgcaaagcgtaagaaaatacatgctttcaaatcaaaatcccgctttgagcagcttgaatttgcccaaaacaaaaggcagaatgcatggcagcagtttcaaaccaaggggaaagccaaaaaggtggggttcttctccggtcgcaagaaggagagcatcttcaagtcaccggacgaccacagaggtaaggtgggtgtcactgggagtggcaagggcctgaccgacttccagaggagggagaagcatctgcaccttaaaggtgggtccggggatgcagcggatgatgacgaggagtaaactgaagaaccgagcctctgtttgtatcccgccgaacagacatttccatacctgttctttagcgccgacatggcctcgaggggactcttgacttaaaccagaaaatttcaatgtttgtcccattctcattgttgaatgtcgctgccgttttggagctgcattctggtggcgaggtcacgctgctagaggagggcgtcctgagcgtacagatcgacttgtcttgctagtctgtagtgaagtattaatccttaaacgtttactaaaattgtcaccggcctaagtacagatcctttgccccaaccaagtccattgaagaagatcaataaactcgctactgctgagtgtactctacaaaccg

SEQ ID NO: 26260 - DNA, 2310 bp, Zea Mays
ctctgttcgccgcgtccgtcggtggatgcccgctctggtgtttggatctccttccaggtcggccggtgtgtgccgtttgcgctggattggctggttggttcgcacgacggcgagacgggtcgagttgttgggctgtgtgccagccatgtggttgcttagctggctactgggaatccggttgaagctttgaaattgatttcttaatttttgggtccccttttgcgacgcggtttctggttggtgagagggatctgcagcagtagaaaaaaatgtgacgagctaagttgatttcggagaaaatatttatttccttggccgtggtagatttggtcacggcagaaattgaccaccatgagagcaatgttcactttgattggtggagaaaaaggttgcaatcattgacggcgaggcatgtcgagttgtcaacttggtgtctatgctgatgcaaaaaggtttgcttgcataaagtccaatggagccaagggtgcttgtttcttgtttgtgcccttcagttgcaacctgcaaaggaggctcgctcaactagtaaaaaacaaaaacgtttgtttgtcacttttgttttacatttgcaatggcttttttgaaacaagctgagtgaatctttgtttttgttaacagtctatgcatcatgactgattcttcgtctggcgaatatactgatattattcatttgtatttcataaatttgcccttttgctttcctcaagtttagtgctaagcataattagatgttttatgtacataaaccaggatatggcgggttttcttatttagtggagcctctttggtggataggcatgatttctatgattgtaggtgaaattgctaattttgctgcttatgcattcgctcctgctattcttgtcactcctcttggtgcactcagtataatcatcagcgctgcacttgcacatgccattctacaggagaaactgcacacatttggtatacttggttgtgttctctgtgttgttggatctatcacaattgtgctccatgccccacaagagcgtgacattgattctgtaaaggaagtttgggatcttgcaactgaaccagctttcctttgctatgcggctatagtagttgcagcagccttagtgcttatatattttgttgtccctcatcatggacaaacaaacataatggtgtacattggagtatgttctcttctgggatcactcacggttatgagtgtaagagctcttggaattgccttgaagctaacattgtcaggaacaaaccaattattctatcctcagacttgggcctttgcactgattgtagctacctgtgtgagcacccagattaactatctaaataaggcattggatacatttaatacagcagtagtctcaccaatatattatgtgatgtttacttcactaacaattatagccagtgtgataatgttcaaggattgggaccatcaaaatccaacacaaattgttacagagatgtgtggcttcatgactatcctatctgggacgtttcttcttcacaagacaaaagatatgactgatagtcctggacaatctttgttgacacgacggccaaagcatgctagtcagaatgcgtttgcaattgaagtgatgccactaaaatgtcaagattatatagatgacgagaccttgacgttatcacttcccaaggttgaaaatggttacctaaaggaagagtatcttcttagatacaaggactcgagtattgtctgatagataattcttcgccaacatttgacgggaagctcttgagaatcattctgcttccagacatgattgattgatgtagaactggagttggcagttttacctcaacctggccttggatagattgatattacagattgtaagttgtcaactgtggtttgtctacatctggatgatgttttgagggaaggagcatgccagaaggatgccacattgaggccaattaagtgctagtcatctaggaattgtggttccggaaaagaatttgaagtgtacttagatacaatggtgtcaccaactatactcttttcccccctcttttctctctcattttagaacgccatgtgatagctgcaatgtgatcttatctgattcataggacgacgccatatagaaatgtcaagcatcgttttttcctgtaattacatcaaattggccagttgtcattgtgtatacttagtctatgtaaagtatatcaattcatactttatgacaagggacccttaggataaactcttgatcattctaattcatatttctcacattgctaatattttctgagcatgtgcttcattgataacca

SEQ ID NO: 26261 - DNA, 4059 bp, Zea Mays
tgacaaagtgagcaacacaagaactaccccatcatttcttcaacagagaccatatcacattagccactagaaaaccgcaaaacctttgcctactcaacgctcatggccatttctttactccaccctagtagcagcccaccggagaccagacagcgaggctctcctcgcgccttccgcgtttccgttccgctccaaaacctggtggccttgggctggccgcgcccgcgacatatgcctcctactggcgaaccccatccacacgacacgacactgctcagccgccggcctgggttgacttgactcaggcggggacacgcacacgttcgttcttacgtgcttccgccggcgcgggttggcgtggcagtcgggctcggccctcagatcctccaaagattggattttggaggagtgcgctgttgtgttggtggcggagcttcctggcgttgactccgaccttgctgttcctagcagctcccacccaagaggcatcgcggcgaccggatcggtcgatgtgtcgccggtagattggccggcgtcagcggagggtggagatggggaactgcatggacaaagcggtgccggtggacaacacctcctatcaatcgaaagcagggagcaaatcaatttcatcgtccaacccttcgacggtcaagactggttcgactcggtcgacatggactgtagcctcatacaaagatagtcgagagcttcctactcctaggacagaaggggaaatcttgtcatcaccaaatttgaaggcattctcgtttggtgatctcagaactgcgtcgaggaacttcagatcagacagtcttcttggggaaggaggatttggctatgtgttcaaaggctggattgatgagcaaactcttgccccttcaaagccaggaagcggtatggttgttgccatcaagaagctaaaaccagaaggttttcagggccacaaggagtggctgacagaggttgactaccttggccaacttcaccaccagaatcttgtcaaactcattggttattgcacagatggtgatcaccgacttctggtgtatgagtacatgcctaaaggaagtttggaaaatcatctattcagacgaggtgcggatcctttatcctggggaacaagactcaaagttgcaattggggctgctaagggtttatcatttctgcatgatgctgagaaccaagtcatatatcgtgatttcaaggcatcaaacattctccttgactcggagttcaatgcaaagctttcagactttggcttggcaaaagcaggtccaactggggacaggacccatgtttctacacaggtcatgggcacaagaggttatgcagctccagaatatgttgcaacaggttaaaaactatctagattttgagtggacgtcatgaaaaattgtgaaatgataaaaacatgccgaactttaggatgtgtttgctctctttaggtagtgtttggttccggagccagttgggatggagcggctctgagccaaggagcgtctccatccggaagattttagggagccagatggttaaacatttgagcataatattctttttagagccactctatcttacatgaaaccaattgaaacaacaacaaattggaagcggagcgactccgttccactagactctggaaccaaacactatcttatgctttccatttcttcaacattatttcgtttatatcaccttaagttcaatataagctcctaattttgtattagctaaggttatatttaccgagttagtcttatcacattcgcttattatggaagcttatttacttatgatctaggttaacatgctattgtgttatgataatgcaatcaaaattttgtttgtgtcatcttttaattttggttttaaggttctagaattggcggaattgtgctaatgctagtacaattgaactggttgacaaacataccactccaacttaggcttgttcggttgcatgtagactggatgagattgaggaggattaaattccctttctattcaattttgactagcaagagatttaatcctctccaatcctaaccgagtagacacttaaagcttgttcggttaggagtggattgagggggattggagaggattaaatcctctcccatacaaatttatataggaggggatataattccttccaattccctcaatccacctcaaaccaaacaagctcttactggatttttagggttgtgactgtcctaaaaagtgatgccaagaaactgctgagctacaaaatatgcttctaggatgtattacagtgcataagaatattattgattgtccttttagtgtagtccagtccagtccagtggcaagacattaatattctactttggtaagattgttccttgtgttgataaaaaggtcttattacacgtgtgccgtgtggtttacctcttatgagagatgttcatgttttcttcccctttcctgctattttcgctttgcgtgtaatttagcctacataaataagatgtataatatgcttaaggagttgtttggcacaattgctgcttgttggaaaaactgcatatctgagaagctggtgaaaaacagcttctgcttattgactgtttttagttcgttttgagaagcagctgaactgataagctactgcaagggataccacaggtattaacttctgtttaaatctgcgaagaagctgaaaataagttgtgctaaatagggtctaaattttcatgcaattgaacagttcaaaagggtagattcaacaattatattccattcgtgatctccgtggggagctcagataccttttattcaatccttttgaaggaagtggaacacagcagggaataccccctctaattcgtgcaggcacgtaggagtacgcattagagagtagagagatctccacatgtaccagatcaaatcttaagcttgggcataaagccagtatattgataatctgctcggccacactattcattttggcaagattgtttttcctcatgcatcgtcttgttaaaaactgctccaggtcggctctcagtgaaggcagatgtctacagcttcggcgtggtgctactggagctgctgacgggacggcgggcgctagacaagtcgaaaccattaaccgagcagaacctggtggagtgggcgagaccctacttgagcgacaagcgccgtctgtaccgcatcatggactccaagttgggcgggcagtaccctaagaagggcgcccacgccgtcgccggaatcgccctgcagtgcatccgcaacgaagggaagatgcggcctgccatgtccgaggtcgtggagaagctagagcagctgcaggatcccaggtacaacgtggcggcgccgccacaggtgaacacggcgtcgtcgtcgtcgtcctctggctcagtagtccccaggtcgcccaggaaggcacagccttctcccagacgcctgtcgggttcggcctccccgttgccagcaccagcaacaggctccccgctgccggggtcatcgaggagtagtagtaggactgcgcaggtgcactaggcgtgcgacagaaaggatgaaagggagcggctatacgtgtgtgtgtgactgtgttgttgtcgtaggcatgtagctgttggtttcattccatgtgtactagctgtatatttttgctgtattcactaccggaatccaaggctttgccgagtgttgcaatctttgccgagtgccttttgtcgggcactcggcaaagacggctttgccgagtgccgcactcggtaaagctaggctctcggcaacgaggctctttaccgagtgccggacactcggcataggtagacactcggcacagcctggtttgccgagtgttaaacactcggcaaagtgggctctcggcaaagggccgtcaacggccgtcccaaagctgacggccgtcagtctttgccgagagccagcggctggcactcggcaaagaataaagaacaaagctttgccgagtgctgcacaaatagcactcggcacagaagcctttgccgagtgcccgtgatccggcactcggcaaagtttattttaaaattttaaaaaaatctt

SEQ ID NO: 26262 - DNA, 1430 bp, Zea Mays
gcgccagcgaggcataagcagaatgaggcatcaccgcatgaccgcatcagctcatcgcatcggccgctttgctttgcttgctgctctcttctctccgctttccgccgcggtgcaaggccagcgaattccatttccttccgcgtctgtccccaaaagcgggaggcccgccgccggaacgagccagcaaagccaagcaagcatattgacggaggaggcggaacggcggaagcgtgaatccggaggctctgcagctgttctccagaagcagccgactgggtgtccgtccgcggaccggtcggtgtataaatggttggcgaggagagcggctgcggcgtcgagggagggacaggaggaggagaagtgccggcggcctctgctcccaacggggaccgctcagggaatagccgcctcgccgtgccgtcatcctccgcagatgatagaggcttccatagatcaagcaccatgccaggggtgattaagaatgatgaaattaccaatgaatctactggaccatcaaatttggaaaggtccagaactgagcgtcgtcggcaaaataatccaactattgatcctgctaaacagttacttgatgaaaggattccaataaaaaagaagctcaaaatgctaaatcggattgctacagtaaaagatgatggaactgtggttgttgatgtgccaagtggtctggaaccaactatagttggtggaactgaggatatttatactgaagctgttgaagaagcattagatggaacggagatactatacaggcctcctatgcaaatagttatacttattgtgggtacacgaggagatgtgcagccatttgttgctatcgggaaatgtttacaggactatgggcatcgtgtgagattggccactcatgccaactttaaggagtttgtactaacagctggcctggagttttttccgcttggtggagatcccaaaattcttgctgaatatatggtgaagaataaaggattcctaccttcgggaccatcagaaattcctattcaaaggaaacagatgaaagaaattattttttctttgctgcctgcatgcaaggaacctgatcctgacactggcattccttttaatgttgatgcaattattgcgaacccacccgcgtatggaaaccacataagcattgtaagaggaaaaacttcttacctatttcacatccatcaatcaagattaattttgctgagacctgaaggaggcagtgcttttgccaggatggcaaaagcacaattcaggacatacacatgtggcagaagcactaaaagtaccaattcatatattctttaccatgccatggacgcctactaatgaatttcctcaccctctttctcgcgtgaagcagcctgctggatatcgagtaacctagctacctaagtacaacaattttgagaagaaaaatatgcaaa

SEQ ID NO: 26263 - DNA, 1363 bp, Zea Mays
gagaaactcactttcccaaggaagtcaccgaatccgcattcgataaacctgccgtgtcccgttcaccccgcgttcgcttcatccgggcgtgggctaccgccgcagccgccgccctacgtccggtgaccaggctttcattgagctttgccgacgacgaccacgcaccagatggctgggtatatgtcaagagggccccaaaatggttctgtgtatgtctgcaatctacctcctggaactgacgagaatatgttggctgaatattttggcaccatagggttgctaaaggtatgggtcttaccagaaggacaaaaggaatgggcgcccaaaaatttggatctatagggacaaagtttccaatgaaccaaagggtgatgctacagtcacttatgaggatccacatgctgcttcagctgctgtggaatggttcaataacaaggatttccacgggagcactattcaggttcacatagctgagtcaaaaagcaaagatgctttcgataaccccacaaatttgaacaccattgctggtgtcagtgaacaagatgaagtggataacggagcaggcagaggtagagggcgtggtgatggtcccggcaaggcttggcagcaagatggggactggatgtgtccaaatacaagttgtggcaatgtaaattttgccttccgtggtgtttgtaatcgctgtggagctgcacgccctgccggtgctggtggaactggtggtggaggtggcggtaggggtagaggccgtggtaactctgatgcaagaggaagcagtcgtgcgggtgctggtgctgctactggtggtggtccacctggattatttggcccaaatgattggccatgtccaatgggtggccgtggtggtgggtacaaagagctcgatgaagaagaactagaggaagttaaaaaacgccggaaagaggctgaggaggatgatggagagatctatgatgaatttggcaacctgaaaaagaaatttcgctctaaagctctgcatactggaagtgcgcagacacttcctgggtctggacgtgctggatgggaagttgagcatcgtggttctagtgaaagggaaggcagggagaggagcagggatcgtggtagggacgactatgatgaaaaggaaaccaggagcatagatagaggtgatcatggaagggaccagcgccggagccaagaccgcgaaagggaaaaggggagggagagaagagaccatgagtatgagagaagtagggagcgtgaccggcgccacaggtggtatgaaaattttgcttggaccaggcttgcactccagccgtccgatttcctatgctgccatatccaggccagggcagcaaccaaacaggccttaaggaaataa

SEQ ID NO: 26264 - DNA, 3740 bp, Zea Mays
cagaggcagtagtaggcagagcacataaccaaacaacacccatccaaaaaccccaaaaggaagagagaaaggagtgagaaaaccacgcagtcgtttgtccagacaaaacaagaacaagaacccagcagcagtacgcacttcctcctcctcctcctcctctctctctcgctctctctcctcttgctctcgctccctctcgctcccccagtccgcctccctggcccatcagatccaattccttccccgacccccatcccggatccgccgcaattcctccgtgcgtcgagctcgattgctccccgcccgtggaatttgctcctttctcccgcaagaatcccacctcggccggcgacttggggggacctgccaaggtttgggcgcgcgctcctgcttggcgtagcgggccatgggcgtgctgttgccagctaggctgttcgtgcgccggatgctcagggttgtcaggctcaacccgttgcagcgcagcgccaagagtggatgaggtaatttctcgcgagcgcattcagcacagcaggttactattggctgctcgtccacttaagcaggttgaggtatccatttggttcgacacagtgaagaactgaagatacgcattgtgcttgcttgtcttgcggggctcacaaacatcctgctggtgtgctgtgctgggaaggtcacataatccacttggctatatgccggggtgggaatgtgaatcggggcttcattagtgcaggcagcaggcttgttaacttgttttgcaacaagcatgggggcaaaagttgaaggggaaagctatatgcctggatattatgccacaggggatctcaacgtggaagcaagtggtaggtggtctccatactatgaggagatgacatcaaatggccagttatgcaatggcttcgcaacaaaaccaacaagtggttattcagaatttgacaaagaaatactcaagcatcaaattcttgaacatgaagctgtgttcagacaacaggtgtatgaactgcaccgagtttacaaaatacagaaggatatgatgaaacaacatcaaagaaaagaggtatattcatacccaactttggcaggtgcatcacatactaattcaccatcacaagtgccaccaaacggtgcaaagatgatgtggcagatgccagttcctcctgtgtctacaacatacaggaaagctattggagagcataatgatacaaaccagtcctgcatgaagttccttagagaaggcagtgtgcagtcttctccaaatggatttctatcaagtgatgctgctccaagaaccagacaaggcacttttgaccttcaacttccagccgatcattatatagatgacgatgacacatcagataacaagcccatagatttccttggtttggcatcagatgcaaaaccccagaatgatgctgagcttacattagttagtgcagaacgcttgggcaagttcagtgataatagttcatcctcaggtttgcggactacaaataatcttggaagccgacaagttaccaacctgaatgaatcaaatactggcttctttatgggtagagcaaatggatctgtttccagaggccttccgcataccctcgagaactcgtggcaccaaccgatattgagatcaagcacaactactttcaatttcagtaaagaatactccaaagaaaagcacacaaatgaaggtaaacaagtcagcagtataacttttttagcacccagatataatgatgctgatcccccaaaatacttcaaagctgctgatgggaggcctgccagttataaccaatttctttaccaaggtagcaatttcaagtaacctggagcaaaagaactcccagaagtttgaagattcagatcaacagtcccatggcaagggtatgaagaacttcaatttgaatgagacactgtcagattgtcaggaagatggtcttgtagaacaagatgggagatgtgctgccagttttcagcatggtaaagacggagggtcagtattcgggatctcttggctcaaaaataaagctgtgtctgctgatccaacagctttggagaaggcagggaagatttttggccattcgtttggaactacaatggagctgaaaaatgctaaagaccagaacgaaccagctgtgactattcgaaatttgtcagactctgcttcgacatctcttggctgtggaattaagaaggatgggccttcagaagacattgccactggaactttgctggtttgtaataaagcccaagaggacgctacatgtttacccctttcatgccagaaacatgtgcctaaagatggacaagatgctgatggagtcatcaagataagtggtgcctccatcaggaatttcatcgatctcaatgatgctgtgccaaacgatgacaattctgaagaatcagtagtgtcacatgaatgccaggcggaaccttcacggaacaaccatcctaaacgagcatttgtgattgatctagaggtgccggcttgtgaagaggatgctgcttgggattttgatcaagaatgtgcacagcctaaacctgatgcacaccaggaagttgacggcagatctgatacatctgctctagctgcagctgagaacatcgtagcgttgtcaaggattattccaacagctctagaggcatctgatgatatgttgcagtggtttgcagatctcgctgtattgaacatcaaggaccttgctgagcaagctgaactccaagcttgtaccaatgattccagtaacgacgagtcagattcattcgaatccttgacactgaagctggaagagaccaagattgatgagtactggagcaggccactggaacctgaaatcacaaccgatgaacaattaatttcaactgctcaccttctcaccaagcccagaaggggccagcaaaggaggcgacggcagaagcgggatttccagaaagatatcttgcctggcctttcgtcactttcccggcctgaaatcatagaggatgtccagttgcttgaggggttagtccaggcttctggtggatcctgggagtcgagtttaactaggcgaggacgttatggtgggcggactcgaggtaggaaacctcggaaaactgtagtaactgtaattgtagaagaggaggtcgaggttagcccaccgccgaaacctgttggcactggcgacctcgaagccgatggtaggggtatggttggatggggcagaacaacaaggcggtgtcgcagagcgagatgtccgtcaggtaacaacttggctgctgcgtcttgagaaagggtattgccagcaagcattggacctgattaggtacttggtggttcacaattgttatagactccgatggatggactggtataaggtgatcacagtcatgagtgtacatactctgtcggcgtattggcctcaccccaactttcatgcttttgggttgaaacatggtttacgttcttataataagttccgtaaattagctggtaagacatttctgcgacagcattgtattaagctgttccaggttatgaggtccggtataaattcattgtgagaaaaaaaactgcaatgcctgtaaaccaccttgatctctgaagattagctcatcgcatgcgcaacaaagggtgtgaaagacttcgggtctgtattcttttttagcttatatatgctctgcctaattggctagtacatattcagtatccgaaatgcccatttatttttgtttagatactgattggaagcacccaaattttaagaacc

SEQ ID NO: 26265 - DNA, 1633 bp, Zea Mays
accatttggacaccgatccatccatccatccagccccgtacgtgtctcgctggccgtccgtatatatagagagaggcatcggagattggccgccacgttgccatcgcgcgcggcgcccgccggccaaggccaaccatgctggcgagggctcctccgccgcggccgtgctccagcggcggcagaggccgcttctaacgggtcagcggcggcggccgtcgcagggatcagcagcagcagcagcgcgctggtgacctcgaccgtcgggaaatcgacgaacatcctgtggcatgagtgcgccatcgggcagaaggagcgacagggtctgctgaaccagaagggctgcgtcgtgtggatcactggcctaagcggttcagggaaaagcacgctcgcgtgcgcgctgagccgcgagctgcacggcagaggccacctcacgtacgtcctcgacggcgacaacctcaggcacgggctgaacagggacctcagcttcggagcagaggaccgcgccgagaacatccgcagagtaggggaagtagcgaagctgttcgccgacgctggcctcgtctgcatcgccagcctcatatcgccctacagaagcgaccgaagcgcgtgtcgcgatctgctgcccaagcactcgtttatcgaggtgttcctggacgtgccgcttcaagtgtgcgaagccagggaccccaaaggcctctacaagctcgcacgcgccggcaaaatcaaagggttcaccggcatcgacgatccttacgaaccgccgtcggactgtgagatagtgatccagtgtaaagtcggcgactgcccttcgcctgaatcgatggctggtcacgttgtgtcgtaccttgagacgaatggtttcctccaggactagacatggaatgcgatcgatgcgtctgatgtgtatatatgtagcagcagccggagcggcattgccaaggctgtgtaatctcatggctgtctttctctttaagaccaaaacaaacaagagatggcagtgtaaaaaggaaaaaaaaaactgcgtctgacagagtcgctgaatcaaccatgcttctgataaaagctattgtttgtaggtacggcgttgattcttacgacatttatgacaatgctttcgaaaggtcggttccaaaaaaaaaacaaattccatttattgcaatgatggagatggcccatacatgtagtaaagaacagccgtcctgaagattgaaaacaagggcaattttgatgcaaaatggccaggtctatttaatgtcatcactcagggtctagaccaaggcaatagaaatgtttggttgctactggtaccatcacggaaggttgcgtgcgtcaaggtgaatcaaatctgtgaagggaacgtggccgtcagatctacgggttgggagttagatcaattatatcttttgctaaatggtttagctctaaaacatctagcggaaaatgttgacaatgtttaatggacaacataaataagaggagggttggctccaactacctatctttctagcatctatctggtggtttaattttcacgccttctctcttgtaggtctcaccctcacttgtgtaacttgagattaagaaagtgcagcacttaccacagtggtttatggtgaagtgaaatccattttcg

SEQ ID NO: 26266 - DNA, 1232 bp, Zea Mays
atgaccatttcgagcgagcgtgcaagagcaagactcttcggagttactgttggctgccgagattgcgaagaagcaggtgctttggtcgtgaacggtggcgccgccgagcagcggaaagcaccggcaccgaaacgccatctgcgcgctgtagctgtacagcagcgatcaccggccctgccgccgggcaatgcacgcgaccaacccgacggcctcgccgcgcaggctgctggctgccaagctgccatccgccgaccgccgcccatccctccaggctccagcgatggcataggctgtcaggcatcaccgcgtcagctactcaggtcaggctagggcgttgggctgccatcctgctggtttaactccacgccgcctgcacctgccaggcaggggcgctaggttgtcatccctccaggaaccgatcagccgagtagttgctgcctcgctggtcaggttagtgatctgaaaatctgaagttcatcctccaagcttcagtccgcctgtcaggtactcaggggaggactgcaagtgatggaactgattcagaaagtaattcgtttgacaagagggatgatatgtctgaagatgaactggtagtgcttggtggaaaaattgatgattcagtggacaatgtcaatattgatgaatctgaggacaacagaagtaaacaaggggtcaagagaaggcgcaaaagggtgaagatgaaggctacaactgaaactgaaaggagcaaaaaggcaaaatctaaagtttgggatgcctttactaaggtgactgtgccggatacgacagagaaggggaagatgatatcaaaggcaaaatgtaactattgtaagaagctatattcttacatacaaggatcaacaacatctcatttgtcaaggcacatgagaatttgtgccgtgtatttgaagcatgtggcaaagcagcaggatcaatctcttctaaattttgctccatcaacagcagatgttcgtagtgagttagaaaaactttatggggattttgaggtgcagcatagagagagaaaagagtctcaaagcaaatctaatgcttcctcatctttgagtgttgaaagatcatgtagtttgccatccgcttcatgtcaatttccgtctttcttgtcatcaactcagtctaacccatcaaagagcgagttgcttatctatttggaggagactaatgaagaagatgatgaggacaatgttgtgaacataatgttcccaaaagcttga

SEQ ID NO: 26267 - DNA, 314 bp, Zea Mays
atttaaggtagttttagtttgtgcttatttaaaattttatatttttgaataaatattttgaataagataatggtcaaagttttttgaaaagaatcaataatgccatatttttgtgaacggaggtggtacctgtgctttcatcagtgatatgcttggcggtgtgttttcattttgtatgtggttacattaggccaatgtttccatagcatgtatatgcgcggtcgcaaacgatagtttcctgaatgagtaatgcgagaacatgctgtaattccaagaccctttcctcttttttgagctagtggctagagtacatg

SEQ ID NO: 26268 - DNA, 2441 bp, Zea Mays
  misc_feature (2440)..(2441): n is a, c, g, or t
atcttggccagctaggatggcgagggacggaagctttctctgaaagggaaagcagcgaggagagagagagagggcagaggagagaggaggtggggtgcagtgcagtcaaagctggcatcgcatttatctctctctatccctgactccgaattgtattccccccatttctttcccactcgattcaagcccagaaaaagcttatgaaaatagagtaccccgggagagaggcgatagatttgggagctagtaatggccccatatatataacctcctccctcttcacgccatctcttgccttcgattgcccttccggcgttcctacctcctccccctccccatctcctcccaatccgtgtcctcccctcgtttggggatcgacacaggctacgcgtgggttgcgtcgattgatgcgagggaggcaatggcggtttcttctgctccggagaagaagaggaagtggctactcagctacaggaagttgacgtccaaatgccaggagggcgtgaaaccgtttggatctctgaagctcgctgtgatcgacaagtacctgcgggaggcgaggaggattcttgcggcggcgccagagggtggcggaggcggcgatgcggcggcggcactcggcctggtcgacgcggcgctggagctgtcgccgcggatggaggccgccctggagctgcgggcgcgcgcgctcctcgcgctgcgacgctacagggaggtggcggagatgctccgggattacatccccagctgcggcaagtcgtgctctggggaggacacctcgtcgtcctcttcggcgtccctcctgtccaccggctccggtgacctcggcacgatttcccgtgccaagctcctctcgcccgaccgccaccgctctgacgacgcggaacctgacgctcgccctgtccgcttcttccgctgcttcgacgtctccgagctcaagcgccgcgtccttgccggcctctccaagaacccgaacacggacacccagtggaggtacttggtcctcggccaagcttgcttccacctcgggctcatcgaggacgctatggtgctgctccagaccgggcgccgcctcgcttcggcggctttccgccgcgagagcgtgtgctggtcggacgacagcttctcgtcgtcgtccgccaccgctgccgcggctccctccgtcccgtccggcaaaacatccaagtcgagttcggcgtttttcataatcccggcgacggagtcggaggccgtgtcccagctcctggcgcacgtgaagctcctgctccggcgccgcgcggctgccatggcggcgctggacgccggcctgcctgccgaggccgtgcgccatttcaccaagatcctggaggcgcgccgcggcgtgctgccgcacccgttcgccgccgcctgcctcgtgggccgcgccgccgcgttccaggccggtggccgtccggccgacgccatcgcggactgcaaccgctcgctggctctggaccctgcctacatcccggcgctccgtgcccgcgccgacctcctccagtccgtgggcgcggtcgccgactgcctccgtgacctcgaccacctgaagctcctgtacgacgccgcgctgcgggacggcaagctcccggggccccggtggcggccgcagggcggcgtgcggtactgcgagatcgccggcgcgcaccgcaagctgacggcccgcatccaggggctgcgcggccgcgtcgccgccggggaggcgtgcaacatcgactactacctgctgctgggcgtgcggcacgggtgcccgcgctcggagctggagcgcgcgcacctgctgctctccctgaagctcaagcccgaccgtgccgtggtgttcggggagcgcctggagctcgtggacgagcaccgcgacctcgaggcggtgcgcgaccaggcgcgcatgtccgcgctgctgctgtacaggatgctgcagaagggttactcgttcgtcatgtcagccgttctggacgaggaggccgccgagaggcagagggcaaaggacgctgccgccgcggcggccgcgctggcggccaagcaggaagccgcgacgcaggagccaccacagccggtgcccgggaaatccaagaacaccgagagcggcagcggccgtccaagaagcccgccaggccgcgcgcagacggcgaaaccgaaacccaagtccaaggccaaggccaagtccgcgaccgcggcgacaatgccgaaggcaccggcagccgtgaattccacagcccccgtctaccagggggtgttctgccgcgacatggcagtggtgggaaccctgctgtcccgcggcggcgcgttcgaccgcgctctccctgtgaagtgcgaggctatgagctgctgacggggaatcctgttcccccccgtcctacacaacaccacatgacatgtgcgacgtggtgtgcaccgagacggagacaggcgcgacgtgagagtgatnn

SEQ ID NO: 26269 - DNA, 419 bp, Zea Mays
ttaccatcaccagcacctgtacttggtgtgattctcgcacaaggaacacaatcaattctgccatcctgtgccctcctaatgtcaaatacaataagggctacaaaggctgtcacttgcagaaggaaatccatgaagaccgccagtgctgcacaagataaagtaggttgaaaaatcccaagtgacaagtagggatacaaccaggtcgatatagagaaaccaaccagcaaacatggaaaacactctggttgcaggcattggattgattgcactcacagcaaaagctagtacttcagcaaaactggctaatgtaatagatggcccaacttccaccagtgcatcacttatccgctcttccaaatttgactgatctggttggcgtttgacagcatgcacaaggatacacatgttatcgacaccga

SEQ ID NO: 26270 - DNA, 507 bp, Zea Mays
atgaaacgtaccttttactatgtatctagaaaagccaagccataacgtcgtaaaatttggaacgggcggaacatatcttcaattagcaggacacttaattgtattctttgtactgttcttcttcgctcctgcattctgacattaagaaaaaagtacagttccattcttctctagtgcaaaagcttgctttggaaaaggagatggagggtcacgtaggttgcgtgaatgccattgcgtggaactcaagtggttcgcttcttgtatcaggatcagatgacactagaattaacatctggaattataataaccgagagctggtgcatgatattgacactggccattctgcaaatatcttttgcacaaagtttgttccagaaacatgtgatgaagtagtagtctctggagcaggagatgcagagtggcagaaggcctagagaaatttctatggaaccaacagcagtttaccagtgtcactcaagaagggtcaagaaactagctgtaagttag

SEQ ID NO: 26271 - DNA, 2223 bp, Zea Mays
aattctctgcgacgagtagctagtggatagcaattgatgccgggcgctttcatagtcagccatggtaatggtatcgcatcgtagccactaaagtaagggagggccccaggaaagaagcgctggttcgatgaagctgcataaataaagccagcacgcaaaccagcagcgttcagaggaaacccatttacgtatatgcccttgtcccggttcctttccccatccccaactccattatttgcttgatccttgagaagagagaggaagacgagagctagaagcgaaggagaaaagcagttcttcagctaggagggcacaggaaggaggagatggcgtcaaagaggattcagaaggagctcaaggatctgcagaaggaccctcccacctcgtgcagtgcaggtcctgttggtgaagacatgttccactggcaggcaacaataatgggtccatctgatagcccatattctggtggagttttcctagttacaatccattttcctcctgattatcctttcaaaccaccaaaggtacagcaaacgagcatttagggaatgaccattcctttttttttgtgcattttgtcctttgtttgccattgaatttgtaaaataaacatatgcttaagctcatttacttcctaggaggattactctgacatatgcactagatatctgtgatgtttagtaccttgacaatgcatatgagctaatgtgtagtagccaatagcttatcggttagatgccatgcccactaagcgcacttgctgaaaacacttgagttatttttggatgaaacctttaaggccttgttcggttgtgcctggatcgaatgagattggggggattaaatcttcttctattcaattttgactaggaagagatttaatctcctccaatccccttcgatccagacgtaaccgaacaagccctaagggagtggattggagggatcaaatctctttctagtcaaaattgaataggagatttaatccctctgaatccccttcgatccccatacgaccgaacaagctctaagaagattcaagatcgtaacagtttgcgaaaggacctctagccgagttggttaggtggtctgagtagcactcatcaggtcctatggagcgaattttcgagctgtggttaaagaaattttctcgtctgttccatgccaaagcataggtttaaggcctggccctagtcgcggtcgtctcacatgggctacggtgccgttgtgtatgggtgagataggggtttggggggttttctcactgtccggtgcctgtcttacctgttaccctcgtaggtcgagtttttttagattgtcacagtttcatgtgcaatcttgaaacccttgatatctgaaatttacctgccttaccaaatccatatatccttaaaaatgtttgtcacattccgaaccatgtaacctagtatatgtatgcgatacgcaggtggcatttcgcactaaggtgttccatccaaacatcaacagcaacgggagcatttgcctcgacatcttgaaggaccagtggagtccggcactaaccatctccaaggtgctgctgtccatctgttccctgctgactgatccgaaccccgacgaccctttggtccccgagatagctcacatgtacaagacggaccggcacaagtacgagaacaccgcgaggacctggacccagaggtatgccatgtagtattttctctacctggcctttggggtcgctgctgcgttgtgttgccgggacctggacgtgcctccatgtattcgttctatccttcctgtataatgatgaaccgaattgggtttgcagtacagtgccgcgtgtggtgctgaatgctgctgtattgtgtcacttggaagctgtaattctcagtgtcaaaaaaaactggtacttggaaccattttgcgtcggatggcgctgcaggccagtccatgcttgcgtccttcttcccttcaccagtcatcgtgttggaagaaacataacgttctgtctcttgagtaactggtacgaaacaataatgatcgttggggatttggttgcagcagatgaggccaatcttaacgggagttttacaagagatttatgacattaaatagcatatggtacatatgatttttttataacatatcactacatttatttattattaggtgaaactatgtctatctgtttccaaggtattggagtgaaaccgccgcagagaccaatttattttgtcccca

SEQ ID NO: 26272 - DNA, 2448 bp, Zea Mays
aaacagtccagcccagctggtgccgttcgcttggtgcttcctccctcagcgccgttgtcctttgacccggcgcggcggtgcccaacctcgctgctcgtccgacgcccctccacgacatcagtgtccgcggagaggaggatgagcagaaagagatgctgcagcaaatgactgacggagtcagagcaatgctgggctcaataggtgacggtgcgatcaacatttctgcctacgacaccgcatgggttgcccttgttaagagcctggaaggtggcaatggccctcagtttccctccagccttagatggatcgttgagaaccaactaccagatggctcgtggggcgacgaggagttcttcctggtctatgaccgcatgatcaacactctggcctgtgtgattgcacttgagtcgtgggaaatccatgctgacatgtgcgagaaaggtttgtcattcattcgagagaatttgtggaggctagagcacagtggttcagatgactggatggtcgttagtttcgagataaccttcccccagctgctggagatggcaagagacttgggtctcgacgtgccctgcgacgagccatccctgcgagctatctatgcaaggagagacgcaaagctcgcaagaatccctaaagaattactgcacgcttcaccgacaactctgcttctgagcatagagggaatgccgggcttagactgggagagactactgaaactccagtgctccgatggttcgttcatgtcatcgcctgcacccacagcctacgctctcatgcagaccggcgacacgaaatgcctcgagttcctcaatggaatcgtcagcaagtttagcgggggagtgccctttacctaccctgtggatctgttcgagcacttatgggtagtggacaggatagagcggctgggcatagggaggcacttcacaggtgaaatcaaggagtgcctagaatacgtacacaggtactggggcgacgaaggcttgcccgccacgagggacggtccggtctcagatgtcgatgacacggccatggggttccgtcttctccgactgcatggctacgatgtctctccttctgtgtttaagcacttcgagcaggacggggcgttctactgctacccagggcagtcgaacaaatccgtgactgctatgtacaacctctaccgcgcttctcaggtggcctttccaggcgaggatgagctccgacgcgctgaggcatacagccgtgagttcctctgccgcagacgagcctccggggagctcaaagacaagtgggtcatccccaaggacttgcctggcgaggtcgcttacgcactggacgtgccgtggaaagctagcctgccgcgcatcgagacgaggatgtatctggagcagtacggtggtgccgatgacgtgtggattgggaaggtcctgtacaggatgtctctcgtcaacaacgagctcctcctccggacagctcaagccgacttcagaagtttccagagacaatgcaagctcgagtggcatggcctcagaaaatgggccagcaggagaaacctccaagcatacggcgtgacgtcgaacagcacgctgcgatcctacttcttagccgcagccagcatctttgagccagacagagcgacagagcgtctgggatgggctcgcacggcggtgctcgccgaggccgtctcctcctgcctccgagacggtcgttgtagccgtgccgacggcatgctgagggaactgaccagcggcatccacctacgcaacgacgataatccggcagccagcttggtgcatgctctccatgagctcattggcctccttgcattcgacaatgcttcctacaacagccttcttgatgcctggaagcaatggctcgccatgtggaccgcccagggacacgaagggagcgtagcgctgctgctggttcgcacagtggagatatgctccggccggaggcgtagcgcctctgccaccgacgatggccaagcacacagcctctccgagtactcccagctcgagcagctcacgtcctcggtatgcagcaagcttgctgcagcaggcaccggagatggagacgacctttccccggcaagtgtggaggacgcagcagatcgccaccgtgtggatctggagatgcagacgttggctcggtgcgttctccggagccgcagcagtatcgacgcagtgaccaggcagacgtttctccatgtcgcgaggagcttctattacgtcgctcattgctcagctcgaacggttgatgcccacatctccaaggtcttgttcgaggatgtcgtgtagccaccgtttgggcctcgttttgtatctttaaagcagtgtttggttccagccagatttagtctcggccaaatcaaatgtttgaatggtaattacatgtattaaatatagtctaattataaaactaattacatatataaagactaaaagacgagataaatctact

SEQ ID NO: 26273 - DNA, 2673 bp, Zea Mays
tggaaatttctgtcactataaagaaacattgagggctcacatggttttattaagacacatagatggaacaggacaatccgtgctttcatcaatattgaagcttctgggagtgggggtacagatttagtttgtcaatctggacctggatcatggccttctcgtgtttatgctcagactgcaaagtatcccatggcaaacagtgttgctcaggatatgtttggaataattccaggtgatacagattatagaatatttgctgaagacattacaaacattccaggacttgatataatttttgttctcggtggttatttctatcatacttcatatgatacattggagaatctacttcctggaagtattcaagcacgtggtgaaaatttattcaaccttgtgaaggcattcacaaatcctatgttgttaaaagagaacgagatatctaataaagctgctaaggatggaattgaagatgtgggggcggtcttttttgattatttgacttggttcatggtattttattctcgtgatatatctctgattcttcacagtctaccgatagccatttttcttcttgtaccgctgttcctgaagttcccaaacattaccttgatgtcatggtttgtaactctcctaggtttcatgagaggaatggtactccatacgtttggtgtaatccttgcaatatttattcctgctctggctgcagcattaagattattattcacaaagaatgcaatgaattggtttgctcacccttatttggcgttcctaatgtttgtccctacttcattgattggtctattgctgccaaggcttacatgggtctacacactagctgggctgagtggaggttttctaacatttttcatttccatgtccatgcttcttggacgatttgtctctagaatcattaggaagcagtggagccaacaatcacctaggtgagaaattcttctgtcatcaatggaggtgtttcccgtagtgcttttgctttaaaaaatggtaacttctgttgcacattgcattgcattgcatttttgacctcttatttgttctatatcaaactgtggatatctcatgttcttgtacttatttaatgttcgttttggcccctgttatgatcagagttgacgattttacatgaaaatatgtcacctatcatcctatactgtagattttttaaacagaatgcctatgctaagcccacatccaaccatgacaatatgtttactttgacatctggtttgaatatctttacttgagaccaataatgtacaggtcgttggttgcgtatgtgctgcctatgaccccatgtctcctttacggtctttactatggtggattccttatccagttcctgattgaaaagatgggcatgatgggatctcttccaaaaccatatggatattttgtgcctgatgttattgttggagctgtagttggattagtggttggttggtgttttggtcctctatcacctgttgctagtcgttggttgtcgaagacttcaattatccatggcttcctgcaaattacagtggttgctttggctatctcatcccaactgtttccttacagcactggagcaccaaaaagagttgttcttcaacatacttttgttacagatgctaataatatcgtggattcaagctatggtttctctgtggttgattctaactcattggagttccttttcaacaatgcacctgaggccgccaaatggctgaaggataactctgagttgtcctttgaagaaaaatatcggtctgatagaagctcatggttggctttgtatcctgtcccattcttgttctctggaagtttaaaattccaggcacaaactgaagagattaaaaagtactaccagcatttccctcagttagctgttcaggagatctgggataacaatggacagcgaagggtgcatctcaaacttgcacttggttccttatcagaaatttggacctctgtgctcaatattactgggccactatcaaattggtccttcgctgataacatgctcccagctcctcaaactgtaagtggtgggccaccatcatatatttgtcgactcagtggaaagagcgatgtggattggtctttctggttggaggcaaactcttctgaaagtctgagagtcgatgtcgcagtacttgatcagtaccttgttgatagtacaaagaaactcaagagcctcttcccaagttgggcagacttgacagccttcacaacatttttctcaacgtatcatttatgaggaggtcaagtatttgatgttcaacaagtgtaaatcattttctctttgtagccctacgtttcggggctatatgtggttttgtcaccatgatcagctggacctgagccccgaggctggtgtttgtaaaatctttgtaagcgtgccttgatgtattcatgaatcacacaagattgtaagaatctcaagtcagtcataaattttttaccacttagtcattcacgattgacggtatggcatcactgatcattcgtgttctaagtttaaaaattctaaaaagaaatgttgcatcgacatagaagtactgcgtttcattttgtaatcgataccacctgaggtgaaaggttagattttttatctacagttcgcaatcccacttgaaaaaggaacacattatgcaggttcaaggttttggagtg

SEQ ID NO: 26274 - DNA, 3453 bp, Zea Mays
agtatttgatttctttcccctgtttcaagttgcagcctcgcccctctcgctctcgcggctctcggcggatcggcgttcagtgaaagctaaaagcctaaaaccctagttcgaacctctactagccggcgacagcggcggtggagcgcgggatacccggagatgccagcgccgtctgcggttgcgtcggccgtagagaggctacaggcagcggcgcaggacgccgccaagtcctcgtcgcgctcggccggcgccttctccgagcaggcgcagcaggccctcgtgtccaggaccgccggacgggttgtttctctgtcaacatgtgcaaaggtcagtgccattagctttgcgattggtgttgtggcagggttcacactcaagaaaaggctgcgcagatgggctgctagactgctgaagagaattaaggacgacgactattgactaatgcgatcttttcctcattgtctttggagtttgttcagaaatcagaactatggctactacgtacctcagcatcttgtgtagccaactgtttttgtgcctccacatatttgctatgaatgctggtatatgataatatgaaccatcagaagttcatcacattacagcatcgtgaaatgtgcaaatggtgatacaatgtcgccaacgacagtatgatcgtgccatgctctctggtgtccttcgtcatcaaactttgtcgagagtatgatctttcccagtgttgacatgcttcttgactgagtttcactgccaggatgatgaaccagtgcagggcctgagaagccggaaagaagcccatctattatctataggagccgagcacctgaaatatctccctctcctcgccgcctgctttcttcagctgctgtccgagctcgcctgctttctttcagctgctgtccgagctccgaccaaacccaacccagcccacccgaaatatctccctctcccgcgccgcttcacggtgacgcccctcctcgccttccgccgcctccgccccatgtccacctctgcctccccgcacacctccatcctccacctcccccaccgcccgttcgtgttcaggcgaccgaggctgtcgcgcctcaggtgcttcgcgtcgctcgcgccggcgtcatcgggcgcttcgccggcgaacgacgaccacctcatacaaatgctctgcgcccacgggcgcctcgcccaggccacggcgctcttgcaggggcttcccgcgccaacgcagcgcacctacgagtcgctcctactcgcagccgcgcgggcgagggacaccgcgctcgccgcggccgtgcaccgcaggctcgaggcggacccggtgttccgctctgatcccttcctgtcgacccgcctcatcgaagcctatgctgcgctcagcgcgctccccgccgcgcgccaggtgttcgacgaggcgcctgtgaagaacatcttcgtgtggaacgcgatgctcaaggcgctcgcgctcgccgaccatggagaggaggctctcacgtgccttgctgacatgggccggctcggtgtccccgtcgacagctacagctacgcgcacggtcttaaggcctgcattgcagcgtcagcgtcgcacctgccggcctctgcccgtgtacgggagatgcatgctcatgccatccgccgcggctatggattacacacgcatgttgccacaactcttattgactgctacgcgaagcttgggattgtcagctatgctgagcgtgtgttcacttcaatgcctgataggaatcttgtgtcatggagtgctatgattgggtgctatgccaagaacgagcgtcctggtgatgcaattcagatctttcaggagatgatggcctctgatgcagacctggtaccaaactcgatcacaattgtcagcgtcttgcatgcctgtgctggggtaaatgcacttggtcagggcaaagtactgcatgcatatatccttcggaggggttttgacttacttgtttcagtgctgaatgcgttgatggcaatgtacatgaaatgtgggtgccttgagaccgggcgctacatcttcaactggataggacgcagaaggaatgtcgtgtcgtggaattcacttatatctggatatggaatgcatggctttggtcgtgagtcactccaggtgtttgaggagatgattgaggaaggcatttcaccaaatatcatcacatttgtcagcgtccttggggcttgtagtcatgttggacttgtggagcagggaaagaagctatttgaatcaatggtggagtacaatgtcacacctcgtgctgagcactatgcttgcatggttgaccttcttggtcgtgctgggcgcctggatgaagctgtggagctgatacagagcatgcgtattcaaccaagccctcaagtttggggctcgcttcttggcgcttgcagaattcatggccatgttgagtatgctgagatggcatgctctcatctctttgatcttgagccccgaaatgctggaaactatgtcctcttggcagatatttatgcccgagctaaattgcagaaccaagttgatgtactaaaggagttacttgaggagcatgcactggagaaggtgcctggctgtagctggatagaggtgaagaagaagctgtactcatttgtttcagttgacaacaagaacccacaggtggaggagctgcaagcattgattggtgaatttgtgacacagatgaaaaatgagggctatgttcctgacacgagatcagttctgtatgatattgaagaagaggagaaggagaggattttgcttggccacagtgagaagttggctgttgctttcgggcttatcaagactggcagtggagaggctatcaggatcacaaagaatctcaggctttgtgaggactgtcattcagtcaccaagttcatctccaaattcacagatcgggagattgttgtgagggacgtgaacagatttcaccacttcaggaatggagtttgctcgtgcagggattattggtgatgatgatgcaaactccttgttttagttaccttcactgattatactggatgataactgaaagtaggagctgttgtttcttcaaaccattgtgtacagcctaacatatttcattagcctaggcatggtgatagcttttcaggaggggcatcagattgatcaactagtctggagaaaagtggaactcatacctgacaaacagttttgacacgcttgtgaggatgcctcttgtttacatgtaaagagatcgaactcaagactgataggatgattatgatgcttagggtctatgcctcgtttgtatgactgtgactcggggcacaactatggagagggtttacgcctagggtgcgttgatcttgactcgatcacttggttgggtctgaggacacatctaacatttttccctttattcttgtctttcttcttaatcctccatacttcactctttgatgaattaacacatcaagtccaacgcattacga

SEQ ID NO: 26275 - DNA, 432 bp, Zea Mays
ttaaggaccttcatgcaaaaccccaaccatttccccttctgcactccacggagcagtgaaaccgacctttctcccctcccccgcgttccacttcgcggagatctagcccttgggtttcgccagcggcgaggcctaagtcatcggcggcgagccaaactccacgagcggaggaagaggaggggaagctgagacgaggaggcagctatggggcagcagtcgctgatctatgcgttcgtggcccgtggcacggtcgtactggccgagtacacggagttcaccggcaacttcacaaccatcgcctcccagtgcctcatgaagctccccgcaagcaacaacaagttcacctacaactgcgacggccacaccttcaactacctcgtggaagacggattcaatcttccagagttggctgttacgcggttaggtcgtttt

SEQ ID NO: 26276 - DNA, 699 bp, Zea Mays
ctccgacatctttttttctaaaaaaaaattgggtgagtctcttgcttcgcctagttgctctgcttcgtctacttctcagcatcccccgaaaaactcgaccgcaagcgtgtgtacgcacggaccgcccgcccacgcacgggcatggcagcctccgcctccgcctccccctcatcctccacaaaccctagttcttagctagggagattttgggaagggagagtgctggaataatggagccgaggatcgggaacaagttccggcttgggcgcaagatcgggagcggctctttcggggagatctacctcggcaccaatatccagacgaacgaggaggttgcgattaagctggaaaatgtgaagacaaagcatcctcagttgctctacgaatcaaagatttataggattctgcaaggaggaactggaataccgaatgtcagatggtttggtgtagaaggagactacaatgtcttggttatggatttacttggaccaagccttgaggatctatttaatttctgcagcaggaaattatctctgaagaccgtgcttatgctcgcagatcagatggcacacaaatcatcatcaatcattatatataatgttttgtacttttgtggtggttcccacatcgagccctctccctcctgagcatctctgcttctctggttgaattattctgtgtgtatacattatccttttc

SEQ ID NO: 26277 - DNA, 3163 bp, Zea Mays
caaacatttttttcctcttcacaactcggcaactgctgactgccccgcactcatttgctctccacccctaccgcctgcctcagatctcgatgcggcgcaagcttcccggagacgcgccgctgtcggcggcgagggccggtcatgcttcgtccgcatccgcgccgtccgaggcggacctggctcagctctccgcggccatcgcagccggggaggacctgggccccttcgtgcgccgggccttcgcgtgcggccgccccgagccgctgctcgcctcgctccgcggcgcggcgcgggaccgagaggccgagatcgaggagctctgccgcgcacacttccacgatttcatccgcgccgtcgacgaccttcggtccctcctggccgacgccgatgcgctcaagggctccctctcggcgtcccactccgtgcttctctcctcggcggccccgctgctcgcctcgcttgagtccttcctcgctgcgcgcttgctcgcggggaacctctcctccgcgctagcctcctcccgacggtgcgtacggctgctcgcgctcgcggcgcgggcgaacgcgcacctccaggccggcaaccatgggctctacctcgccctgcgcgccgtcgacgccatcgaccgtgatctcgcctcgggatccgagctgctgccgctacccgcgctccgccgcatgcttctcagcgtcgtccctgcggtgcgcgcgcatgccgagcgcgagatctccagggagttttccgactggatggttagcatccgcgctgcttcgaggcacctcggtcaggtggccatcggccgctcggctgccgccaggcagcgccaggaggagctccgctccaagcaccgcccgctggagggctgcatcaccttggatgacgatggagttggtgacctcgatgattttgcggcagccgcggcaactgctgacgcggcagatggtgctgctgcagcctcttttgaccttacgccgctctatcgagcgatgcatatacaccagacgctggcgctgggtgagcggttcaagaagtactacctggaaaacaggaagctgcagctgacatcggacttcgatgtcattgcggcgacgccattcctagagtcccaccaggtgtttttctcgcagattgctgggttttttattgttgaggaccgggtgtttagaacagggggtgggcttacatctcggccagatgtagatgcactttgggatgctgctgtggggaagatggtctctgtgatggaagacaacttctccaggatgcagacagcaaatcacttgcttctcatcactgattatgctgctttgctttcggccacaatgcggcggtacggttatccagtaggaatgctgctcgatgtgctggctaagcacagagacaagtaccatgatttgctgcttgcagattgccgtaggcaggtggcagaggcactggctgcagataagtttgatcagatgctcatgagaaaggagtatgaatactcaatgaatgtccttgcatttggaattcagagctcagacatcaccccagctttcccatacgttgcaccgttctcctgcactgtcccagatatttgccgtattgttcgctcattcattgaagattctgtgagcttcatggcacaagggggtggtggggatacttatgcagcagtgaagaagtaccttggccgtatcctttctgaggtggtggatgcttccattcaaaaacttgttgattcaggcagtggtctaagtgtgtcccaggcaatgcaggtcgctgctaacatgtctgtgatggagcgggcatgtgagttcttcacacgccatgctgcacaactgtgtggtgtgccactgcgtgctgtggaccgtggtcggcgggacttcccacttcgcaggtcacgtgatgctgcggaggcgctcctgctgcggctcctatgtgctaaggttgatgagttcatgcggcaatctgatggtgttaactggatggctgatgacgctcctcctggcggcaatgagtatgccaacgaggtcatcatctaccttgagacgctcacatcaactgcacagcagatccttccccttcccgtgctccgccgtgtacttgtggcagtgcttgcccacatctctgaaaggatcattgagctcttcttgaacgattcagtgaagcggttcaatgccaatgcggtcactggaatagatactgatctcaaaatgtttgagacgtttgcagagggcatgtctagcctgttcgtggactcaggtcaagaatctgcaaaaaatgaaatgaaggctgcacttgtggaagcaaggcagctagtgaatcttcttatgagcaatagtccagagactttcctaaatccagtgattcgtgaaaagagctataacaagctagattatagaaaggttgcaatcatctcagaaaagtttagagatacctcagagagttatttctcaacattcggaacaaggggtgccaggcagaacccaaagaagaaatctctggataccctgatcaagaggctcagagaagccagttagatatcctccctgctaagatagggatgcttttatttcctccctccagttccatgcacttggtgacaagcgacttgatgttatatatttgaaagttataaaggggctttggagttcaatttacctcgctgtttaggtatattgaaattggatgatgactaacagggtagatgattgtttggagctgcagaacctcagtcatttttccttaccaattcagaaatagcgaatctttaaatcaacagaggattttcctaccaatatagagaaaccagatccataaagaatatgcttttgcataagcatacctccataagctttgtgagctgtgttcatgtccaaaaggactcgcaaagagaacagggactacaagttggtattgtcattcggtgaaaatatggtcattgcacaaaagcgtcccatctgcgcacataattttcaactgtgatcatggcacaaaaagaaaatgttcaagcctgtgcacatttattcatgttggaagtgtgatgatcagctcatttgttacaaataagatgaagtttaaccatttagttctgcaattcatcgcctttgtagtggcaagaattgttgatttatctttaaatcaggattgttgattttcatctatgttcatgggatgggtg

SEQ ID NO: 26278 - DNA, 1010 bp, Zea Mays
cagcgagaaactcacgaaaagagaggagccgggaagcaaagcgccgacgactacgccgcaagtcccaacccaacccaccctatccagaatccaggtatatcagatgactcgacatgtcagttctcgatgtttcaaatgctacagtatgttaaataacaggcaaaaggttgagtggaacaataggggtttctctacactccatgcattggtagctgctgccgtttctttctacctggtcatgatctctgacctcttcaatgaagatgcgcacaatagcataataattgacagaaaatcatggctatccgattgcatgtttggggtctcgatcggttactttttgacagacttgacgatgatcatgctgtattttccttctttaggtggaaatgagtatctcttgcatcacggactttctatgtatgcaattggtcttgctttattgagtggcaaagcacacatgtacatcctcatggtcctcttcaccgaaatcacgactccctttgtgaacctcagatggtatttggacgttgctggtcagaagacttgcaatctttacttatacaatggtgtggctctatttgttggatggctggtatgggtatttgaattttccaccccgagaggcgagatccatcttcagcttagggttctacagcttggtggcagtgccgtcggtggttgcggtgatgaacgtattttggttctggaagatactcaaggggatggtgaaaaccctttctaggaggaagcacagcgaaaatgggagaacagattagaaggaatgaaggaaggatgctactgaactgtacacatgttcatctcaacgcacttacggcactcgcattcatttctcacacagatgtaattatcttgtcttgccgtcaaagattcaaagtcggaatcccgcaactcttaaattgttgcaacagtgccacatgcaccgttactgaatatatattggccactgtcagtgtcagcgtgctcgcttgggagctgattacacgcgc

SEQ ID NO: 26279 - DNA, 1377 bp, Zea Mays
gctaaagagtcagactaaatgtttgtttaacacagttgtccgccgcgatacacatcatcctctggtgaaaggcgtatcagggtccacacagcagctgcacctgtggtcacagatcttagtgaaatgtaccgtcaagcagatacgggtgccattgtgtcattgttgggtagaattgcggttgaaaattcactgtctgataagctggacagtgtccggcagcagttacagttaaagcttgtcagaagtttgaaggaataccgcaatttatatgttgtacaacaccggataggcgggagactgatttttcctgaatccctaaagtttttgccattatacatcctggctatctgcaaaactcttgctcttcgtggaggttatgccgatgtttctcttgatgaacgatgtgctgctggttttagcatgatgatattgcctgtaaaaaggctgctcaattttatctatccttctttgtacagagtcgatgaagtattaacaatggaaccaaataagattgatggttggttgaaacgcttgccattaacgtttcagtgtttagatacgggaggtttgtacctccttgatgatggcttcactttcttagtgtggttaggaaggatgctcccacctgaacttgtgaacaacattcttggagtgagcttggcaaacttccctgacctatctaagattctattgagagagtgtgacaatgagttatcaagaaatttcatgaaaatactaagatacctgcgggagaaggatccttcttatcaccagctatcccttgtggtgcgacagggtgaacagccaagagaaagctatctgcttctatctaaccttgttgaggaccagatggctggaacaagtagttacgttgattggatacagcaaattcaccgtcaaacacaaagctaatgacgaaataccaacaggaagctatgcctgaaatttttgcctactgtaagctgctgcagggcgtagattcagttgctgccagttccaagtcaatctcgcaaccccttggagatcttattcacaacccagctgtccagtatgccaccatagtgggaatacagctgttgtattggaataagtaggcagcaaatgcggtgggtatattatacaactggggtcgtgtagtgtggcctgtgcgttctttcctgatgaattctagtcgggttcagttacatggcatttgggttataaaaagttcatcgtgtaaactaatttttggctattttagtctgtttgtaatgggagatctcatttaatttaatgtcattccgttattaaagttacttccgtatactgaatttttagaccgcatgatccttcatttgtggtttatataaccagtaaaacttgtagttttggtgaata

SEQ ID NO: 26280 - DNA, 1195 bp, Zea Mays
cgttctccgtttcactttcccaacacccagaatcctgcagaaatcaccctttccacccccacccagcgctgctcggatccccgggcgagcacatcctccggtcctcgcttgtcggcctctcctccccggggccggtccagcgggttgcatggtgcgcggccgctggttgtgagcccaatcgatggcctcggcggaggcgcgccgcctcgcggtcgtgccgcagctagatatcgagcagatactgaaggaagctcaacaccgatggttacgccctgctgaaatatgtgaaatactgaaaaactacaggaacttccgtattgctccagaaccaccaaacagaccaccaagtggctcactttttttatttgatcggaaagtgttgagatacttcaggaaggatggtcataattggaggaagaaaaatgatcagaagactgtcaaggaagcccatgaaaggttgaagtctggaagtattgatgtacttcactgttactatgcccatggggaagagaatataaacttccaaaggaggacttactggatgctggaagaggactatatgcacattgtacttgtgcattatcttgagactaagggtggcaagtcgtctcgtgctagaggaaacaacatgattcaagaagctgctgtggatagtcctttaagtcaattaccttcacagactatggagggagagagctcacttagtggacaggcctccgaatatgaagaggcggaatcagatatttattcaggaggagccggacacgactctttcacttgggtgcagcagcatgaaaatggaactggacccatgatagcttcttctgttttcagctcgtacacacctgctttgtccataggtaattaccatgggctgcatgccacacaaaacacaagcttctatcctgttaaccagcttaattctcctgtcattcttaatggatcaagtgccatgcttggaacaaatggctgataacccaaagtagcgttgctggtgcatgatctgacatgtttggatttggacttaggtgtggtatttcttttgccttatgtacagtagaatattatctacatttgaaggagccttgtatttactgtgtgaaatcggtgtaaagagtttgatatcagagatcttacccagacttaacggttgcatgttactgcagtgcagcagttaggagtttgaggctttttg

SEQ ID NO: 26281 - DNA, 424 bp, Zea Mays
ccgcgctgcactgcacgcaggtgcgcatccaccgtgaaatccccacagctccgcacaccgtatctgcgccgcagcttctgtcgctcacgcccgcgcggagctcccttcctcaaccgcctattcccccacgccgccctcaaaatcgggaggatccatagcacgccgtagttcctctcaaacaggcccgatgccctcctccccactcctccctctcgcccaaccggagttcgcaacgtcgttcatgctggacctgccccttcgctcgttcatgattgcgatctattcctgagcttcgaggaatcgacgatcaatatttggtgaaccgctggtgccgagatcaagttcttcgagttctacggggttgaagaccctgagcatatgtttggtaaaggcaagtgtcctctgacccattatgtcccattta

SEQ ID NO: 26282 - DNA, 144 bp, Zea Mays
tacatatatgaagcttgttgttgtttcttatattattattatcggaatcaatttgttcatctttaaattgctattatttccaatagatttcaccactatttgacatcgacaaaaactcgtgctccaaccggatgtccaccactt

SEQ ID NO: 26283 - DNA, 2707 bp, Zea Mays
attatttcttctagtggagtttgtatctaccaatgagattctagggctacaaataatctttaatcattattttacaagcctctttactatgtaactaggttattatatggacttactaatggaagttcctaacatacaatgcattcccaacacaaaactcaaaacatttacgagtagcgtacattgaattatggagggtcaaagatgttagaaagaaaaaagatgaaaaagaaaagggaaaaagataatatggacttttatttgcgaaggcacagccgccgccattacttcatcttcctcgcagcgccggcgccccatcctgcggccctcgtgatcgggctctcagcgacggcgtcagcggcttccccttccgcctctcgccagtcgcctcgcgccctcgcctccggccctccacacaccggcctgcgaccttgcgtgcctgcctctctctctctcctccttccggtggaacggcgcccggctgcgccgcgcgcgccttgagggtagcgggagccaacagccgctgctccaccaaggcggtcgcgccgctttgggagcgcttatgccccaaagcgaagcgtcacccgtccgcttagcgcgctgaagcgcgcgcttagtgccgcttcttggaaccctaacggctgtacctggcaaaaagagggcaattattgtgtgtgcaacagagcacatgcagaaagatctgattcaagtgtggaaactttgtgagacggctatcttttttttcaaagtcagcgtcttttcggtggatctgtagaggactttaattctctgaaggagtgcaatggtcaagttgcctgcactgagaatgaagaggatgtttcatggtgatgattgtgctaatgagttcaaaatcaggaccatgaaatccatgaaagtttcacactttcatgtcagcgagttagagcagtcagctatgtcgaacttatcagataaaactcctcaagatgcatctccttgttctgcagagccagacccaaccattcaacttgctgaccaggatattagggtaacagaagcttctggcttgcatgatctgattggaggaaaatccatgctcgaggatttaacatccgaagtgatagattcaccaaattcagagggtgactcctctgctaattatgatgacaacaaatctgtgttacatgcagtgaattatgttggcaaagagtttgcagatgatggtgtagattcttcattccagaatttctgttttagtgatcatgaggcgaactggggtttgaatgagtgttgcagactgatggatatttatagtccagatgacgatttctcttatttgcttgatagtccacctgatcttctgcctagttatactggattttgtgatgaatttgtatcaatagatgcattgatgaatatgagtagcagatgtggaatcttcccacttattgagagcgctacggaagccagtgttgataataagccatgctcatctgaggtggatttgtgctttaataattctgaggtattagagtggctcaaccctaatctattggagggggatttaccagatcttgttgattttgctgagttaaattcaaatgctacccctgcaaaaaaagagcaatggaccaggaatgttactctcgtgcttgatttggatgaaacccttgttcattcaactatgaagcattgtgatgacgctgatttcacattttctatgttctatgatatgaaagagcatgttgtatacgtgaaaaagagaccgcatgtccatatgttcctccaaaggatggttgaaatgtttgaggtagtgatatttactgccagtcaaagtgtttatgcagaccagttgcttgacatgctggatccagagaagaaacttttctccaagcgtttcttccgggaatcgtgtttgatcacagacagcggctacagaaaagatctgactgttgttggagtcgaccttgccaaggttgccataattgacaacactccacaggtttttgagctgcaagtgaacaatggtataccaatagagagttggtatagcaaccccttggacgaggcgttacctcagttgatcccattcttggagaccctcgctgtagcagatgatgtccggcctatcattgccaagaagtttggcaatataatagataatcgctaaggttcttaaataagtatagggttagtcttgtttactggaagaacctagatgacatctttaactggtcaaggtgggggcatttttctcttaagggctagtttgggaaccctattttcctaagttttttttttccattttcccaagtaaaattagttcattttttcttgggaaaatataaatcccttggaaaatgaagttctcaaaccaactctaagggctagtttgggagtcacttccggttttgtggctcccaaactagccctaaaaggcaggttggcccgtaggaattaagagtaggaattaagagtttcggtgatggggctattccttagaagaactgtacatatcctaaattttgttttgcaactttgtacataggatggttggaattgaaagacaaacatctatgcaaagtttctttgcattttgctcaatgtggtttaatgttcgcagctgtacgatgtttgtatccgtttggctccttgattgtttggatattgctgtgtagtttcatcatgcaatgatgcaaacaagagtctgataaacacaaggttgagg

SEQ ID NO: 26284 - DNA, 4195 bp, Zea Mays
atccttcggttttgtattcttcgcttcctttcgccttcctcttcgcctctctctcgtgttctggcgtcgccgtcgccgctggcgcgagatggtggagacgcggcgaagcgccgcggcgaagcgctcggcggcggtggtggaggaggagaagggctcgctggcatcgccagcgctggagcccgcggaggacgcgccggcgggtcttggagcgggtgacgatgtcgcgtcgtcgcagcccccgaagcgcgcgaaggttgggtgcacggagtcggataccgcgaagccgtcggtggcgccggctgccggcgctgttgcgggtccactgcccaacacggctgggctgcaggccaggaccggcgccatggacaagctggaggccttcttgaagtccaaggaggctcagtccaatccggccggtcataagcaggggactaatgataaagatttatcggcgaagatgaagagagtcatggatttgtcggaggatatatcggagaagataaagagaagcaaggataggttggctgtgttattgaataagccggctgcaggcaccagcaggcgtcaggagccctggtgcagactaatttcacaacattccatgcaccctaccctttctatttacggtgcgattttcacaattggtcatggagcgcatcatgatttcagactggatgaatcatccactgcctcatctgtttgtagactgaagcaagctaagcgaggtgcactccttgaaatctttgaatccaaagttgttcgtgtaaacgggaaatctttggacaaggctgccaaggttaccttaaatggaggagatgaaattatcttctgttcaccagtgaggcatgcttatatatttgagcaacttcatgaggagaaatcaagcacttcagtgttatcttccacttgcacttgcagtagtatccagctggggcaacactcacatttcaatgatattcaggatcatgtgtcatctaaagggcgcaaagcctcatcctttctctttggaagaggtcggtgttcattgttgtcttgtggtctatcagcagacccacttaatatatgtaaaacgacggagggccggagccagtttatctctgaagataatatatcatctggtcggtgtcagctactaaaggaggatttgattaatgcaacggttgatgtgagtgacatctctgagtcatttgatagttgcccatattatctaagtgagcataccaaacatgctctaatgtcagcagcatttgtacatttacattgcaagaactacttcaagtttacaaaagatatatcttctcttagtcaacgagtgctgctatctggcccaacaggaactgatatgtatcaagaatatctggtgaaggcccttgcaaagtattttggtgctagattgctcactatagattcttccatgctgtttggtgggcaaacttccaaggaatcagaatcatacaaaaagggtgatagagtgaggtatattggctcaggcattatccttgatggacagagccctccagattttggttcacagggtgaaatatttcttccttttgaagaaaacagatcatcaaaggttggtgtaaggtttgataaaaaaattctgggaggaaacaatcttggaggcaattgtgaagttgatcatggtttgttctgttctgttgattctttatgccccgacattccaggatgggaggttacgttcaaacatccatttgatgtgatagttgagtttatctctgaagaaattcggcatggccctttaatcctttttctgaaggacacagagaaaatttgtgggaataatgattcctatcatggtctgaagagcaagctaaaacattttccagctggcgcttttataattggatctcaaatccagcctgacaatcgcaaagagaaggcaaatgttagttctccttttctttcgaagttccggtacagccaagctatacttggcctcacattacaggacattgatgggggaaatgataataataaagaaacatcaaaggcaataatgaagcatttgatcaaacttttcccgaataaagtgacacttgaggcaccacaagctgaaatggagctttcacggtggaaccagatgttaaaccgagatattgaagtccttaaaggaaatgcaaacatttcaaaaatacgctcttttctaacaaggcttggattggaatgcactgaccctgaagcgatattggtcacggatcgcattcttacaaatgagtgtattgataaaataattggttttgctttgagccatcaacttaagaactgtacaaatccagacccccctttgggtagtgtgcagtttgctctatccagcggaagtcttaagcatggcgttgacatgttgaaaagtatccagtctggctcgaagagcagcaccaaaaggaaatcacttaaggatattgctactgaaaacgaatttgaaaagagccttcttgctgatgtcacccctccacatgaaattggtgttacctttgaggacattggagctttagaaagtgtcaaagatactctgaaggagttggtgatgcttcctttgcaaagacccgaacttttcaaccgaggacaacttatgaagccatgtaaaggaattttactttttggcccacctggtacggggaagacaaatgctggctaaggctgtggcaactgaggctggtgctaatttcataaacatatcgatgtcaagcatctcttcaaagtggcttggtgaaggagaaaaatttgtgaaagctgtgttttcactggcaagtaaaattgctccaagtgtaatttttgtggacgaggagagagcttcagcagaagcagaaaatagatcattgcctccgtcacacactagcaatgatgtccgtgcattaagaacaagtgatttcatacatgcgcatgaacaggtgtgtgcaagtgttccctcggattccagtaacatgagcgagcttgtgcaatggaatgatctctatggagaaggcggatcaaggaaaaagacaacgctaagctacttcatgtagcttaggttataaatatattgggagaagtgccctggcacaaagcagcaatagttggaggcggtgcagttggaaaaaaaaagctatgctcatctgccagacatccatatcaaagagaattgatggttcaggtggagcggaatagaatggaatggaatagtatacatacacatggttgctgcctctgctctgggccatgcatcatgcatctggacaggacggctatcctggcttgcagttgccctatgcagttttgagtgcaatggtcaccatctgtgaagcacggataccacagagatcctggccccaaccactcttttcacaaatggagctgaggacctttggagttctaccaaaagtgatcttaaatctttgttctttgactttccgttttgtgaacggaaggccccactctgctagtatggattgttgatcctccgtttctctggtactgactgaactgctcatacaaaactcgttcaacaggcagaaatgctgcctggtggccttctagagtgcttctttgacgccgcagagagcacatcaaaaaaaatgtgtttgtttcgaacgatttgtgctgcattccattcacggcgatatcaggtgccgttgtttgtgtttggttccgcaatcaagggagtgaaagccattagcacatccaatcaaacaaatagcgatatctctttcactgtaccagttagcgctggtctcggatgctattaacattgctgttgtctgtctcggaaccaaacaccgcctaactcgtcggctgttaaatatttctgaactgaattactgcacttggttggggtttcatgcttatcaagttggcttatatagccaacaatactttgtgcagttctgcatcctctgcctgcttatgcgcgatctcattggctgagcggtacgaagataaaacggggaaaaaaaggagaatttaacctgatgacactggtggactatgctatgctcagttccttggaacatctctagtagttttgtaaaaaaatctctctaaagacagatgtaaggagttgctacataataatagggagtaaaaatatctgtactctcatgtagtctttatttttagttaccaaatattataaattatgcctgctgaaactcctctccctcacgttatagaaagttttatgtttttccaatcaaac

SEQ ID NO: 26285 - DNA, 803 bp, Zea Mays
gttaaccaagacgcgcagctcccgcctccgtttcaaacccgaaattttccgccgtcccccaaattctttccctcgccttgcatccgctcaaccaacaaaatcgccttccgttttggttgtctcgccaatcccccaaccaaaacaaaccttcctcttccctgaaatcccatgactccgcgcccgcaccaaccggccggccacctactccgtgggcgcgaaaccctaactggcgcccgcatccctctctattccatggcggagcaggatggcgacgcggggcagatgccacccgactccgttccggtggttggtgtaggggatcaaaatactaatcagcatcaaccatttttttcgatgtgccaaccacttcgcactgttagctactcgaattcgtgggatgggacttgtgttgctgctgccaatgaaaatgaccacactggcatatctggtacattggacagggaagacgattcatgttcacgacattcaatcaataaggaagtcagtttggtgcaaggtgttatgaaaatggaacaatcaatggtacaaagcattcagtttgtcagtttttatctgcaaaatcatctcaggaacttcatgtatatatacctgttccgttctcttttacaacaacaacaacaacaacaacaacaacaacaacaaagccttttgtcccaagcacgttggggtaggctagagatgaaaccccgtatgaaaacctcagagctcaacccccaaagaaaaaaaggggaaacaaaggcaaaggagaaccgaaaacgacgaaacgggggaacacataaaag

SEQ ID NO: 26286 - DNA, 287 bp, Zea Mays
agctatagcagcaagggggccagaggcagtaataaaatcaatcgtaccccggtctcgagtcggcaagcctgagcagcatcaggacacaaccataacgagcgttcctatgaggccgtagggggagggagcagtgaaagctcgcacgggcgcaccgggtgggtggccagccgccagctccaggatcggaagcgattgagagaagcaagcgcgagtcatacgcgcggcgccgtgatggtgaggacgaggcaggcaacagagaagaggaggaggtgaggcatggagaagcg

SEQ ID NO: 26287 - DNA, 200 bp, Zea Mays
ctctagaggactaggctttcttgataacgatttttatgtgcttctagtaggcatggccacactaatatctctcttttgtttgctgtaaacctgacttacgcagggtcccgagaaaattgaagggagcaaaaaccgactaggccacccttcgagagcgccccgtcctacggaactaagcgaacgagaagacctcactttcc

SEQ ID NO: 26288 - DNA, 1645 bp, Zea Mays
tctgactctacaaatatatctatatggtggatattttaaagaagtttcttctgacaaagaaaaaggaacagttcatgcagatatgtggtctcttgatcctcgtacttgggagtggaataaggttaagaaggctgggatgccgcctggtcccagagctggtttttcaatgtgtgtgcacaagaaaagggctgttctttttggtggtgtggtagatatggaagttgaaggtgatgtcattatgagcatgttcatgaacgagctgtatggtttccaattggataaccaccgatggtacccgctagagctcaggaaagacaagcctgctaaaatcaaggcaaggaatatcaaaagaaaagaatcaacgaatgatgtagaagctaatattattgatgatgagggtgatgaggtcatggtggacgtagaagaagctattgaaggacaacctgaagtcaatggagtttccaatcagttgatcaaaactctgaatatcactaaagatggctcaagcagaagcattgatgttctctctgattcaacagcacaagaatcatttttggaggcggtgaagcccagtggtcgtatcaatgcatgcttggccgtagggaaagatatgctctacttgtatggaggaatgatggaagtgaaagatagagaaattactcttgatgatctatattcacttaaccttagcaaacttgatgagtggaagtgtatcatatccgcctcagaatctgaatggttagaaatttctgaggaagaggatgatgatgatgatgatgagactgatgatgatgaaaatgaagagggggatgctagccagacagatgaagatgaagaagagtctgatgaagatgctgcaaagaacgtgtccagtgctgtgtctctgctgaagggtgaaagtaagaccatgcgtagaaaagagaagcgtgctcggatagaacagatcagggtcatccttggcctttctgattctcaaaggactccagtgcctggagaatcactgagagatttctacaagaggacaaatatgtactggcaaatggctgcctatgagcacactcaacacactggaaaggagctccgcaaagacggttttgatcttgccgaaactcgattcaaggaactgaaaccgatacttgacgagctggctgtgctggaggccgagcagaaagctgaggaagaggccagtgcgtcgactagttccaagagggacaccaagaaacccaagcagaagagcgcacgaaggtagctttggttctgaacgagtgtgtaagcggaagccagctttagatgaagttgctccaggaagaggccagtgcgtcagctagtcccaactcccaaggtgtgaagaggggacaccaagaaaatccaagcagaagagtgcagggagatagttttggttctgaacgagtgtttaagcgtaagacggttttaaacgattgctcaaatgctcaagttcctttgaggggatttccattttctttttgaacccaagtagacaaaattgatatttgttgttttataatagtgtatgtatatactcgtacgttgaaatttgattcatgtgcaatcttgaccgtatattctcccactattcgactaaacgaacgatcttcctccacacagcatagaccatagagctcca

SEQ ID NO: 26289 - DNA, 3500 bp, Zea Mays
ctcccttcccccgcaacgtccacatcatcccagtcccaaccgctctcttctcttcgagcgccatcgccgttcgaaaccagcgccgcccgatcccgagaatacccaccacccctctccctccctcccgctgccgcccccacctccagcagacgcgacgcgagcgcagtccaccctctacgactacacacactctctttctctctctgttctcctttcatctccactcgtccgctttgtcggaaccgttgctggtggctccggggttctgcgactgcgcatagggaatggcgatggcggcggcggttttggaggaggcgctgcgatggggtggaggaagcgttggggacgacaacgtggccgcgcgcagggcagaggaggccgcgataagaaggcatgaagcagccagttggttgcgaaaaacggttgggatagtgtgtgcaaaggacctgccggaagagccctctgaggaggaattccagcttggtctgagaaatggcattgtcctctgcaacgcactgaataaggtccagccaggcgccatacccaagattgtcggagtccagtcagatactgcggtccctgcagatggctcagctttgtgtgcttatcagtacttcgaaaatctgcgaaacttcgttgtcgttatacaagattttggcctcccaacatttgaggtgtctgatttggaaaagggtggcaaaagtgttcgaattgtggactgtgttcttgctctgaagtcattcagtgaaaaagaggctaccctgaatggttttcgaggagagcaaaacttatctcttgattgttctccagaatcctatgagattacttcagacaaccttagcacgattattcgcacaattctcttagataaaaaaccagaagaaatcccactgattgttgaatcactactaaacaaagttattcaggaatacgagcttcgctttgcaaatcagaacttgatggatgaagagaagcaaaataacttgactacgaaggaggaagccagttttgcagtaaatggtagtaatgcagctcaaaagttccatctgaaggctgaaataaattttgatctacagcacaaacagatcaaggggttgagaggtactgtttcttctatcaagtctggaatggaacaactgaaattgcactactctgaggagttcactaaacttgggaagcatttgtacactatatccaatgctgcttctggataccataaagttcttgaggaaaatcgcaagctgtacaaccagatacaggatcttaaaggaaatattagagtttattgtcgagtgaggcctttcctacctgggcaaataagttccttaagcagtgttgctggaatggaagaaagaaccattacaataatgactcctacaaaatatggaaaagatggaaacaaatctttcactttcaacaaagtctttggtccagcagccactcaagatgaggtcttttcagatatgcaaccattgatacgatcagttcttgatggttttaatgtctgtatatttgcatatggccaaacaggatctgggaagacttatacaatgagcggacctaaagttttaacagaggaaagcctaggtgtcaactataaagcattaaatgacttatttaatcttcaagcacagagaaaggggacaatagattatgatatttctgtacagatgattgagatatacaatgaacaagtgagagatctccttcaggatagtggaaacagaagattagaaattaaaaatacatcacagaaaggacttgcggttccagatgcaagcatagttcctgtcacatctacgtctgatgttgttgaactgatgaatcaaggccaaaagaatcgtgcagtgggttcaacagccataaatgaccgcagtagccgctcccacagttgcttgactgttcatgtgcaaggaagagatttgacatctgggacagttttaagaggttgcatgcatctggtcgatctagcaggcagtgaaagggttgataagtccgaggttgttggagatagactaaaggaggctcagtacataaacaagtcactttcagcactgggagatgtgattgcatccctttcccaaaagaacacacatgtaccttaccgaaacagcaagctcacccagctcttgcaagattcacttgggggacaagcaaaaacacttatgtttgttcacataagcccagaacttgacgctgctggtgagaccataagcaccttgaaattcgctgaacgtgttgcctccgttgaacttggtgcagccaagcaaaataaagaaggcagcgagattagagagctcaaagaacagattgcttccctcaaggctgcattggctaagaaggaaggagaaccagagaacattctaagcacacggtcaagcccaagcatatacagaattagaaaaggcaatgcaacacctgcaactcctaaagacaggcagccaatggaagaagttgggagcctagaggtccagaatgtcttcactccagctcaaaagaggtcaaaaatgcatttgcttggcatcctcactgagaacaactcgtctaactcggttcagaattgcaatgttcctcagaaggaaataggattaggtggttgggttgacaagatggctcttggagacaaccactttgagaactctaattccatcctagagttggagcctgacacagcacagcttccaacttctttttatcatcaaagatatagtcctgtgcaacaaagctgtaggaccgaatcagtaccatcattgggcctacatggctttgattctgctactagttgttctaaccaagagattgtagtgtcaaccatgggactaaaagcttctggtgttgccaatagaggcgcctcaactgtaaaaaagtatgaagctacatcaacgaggagtacaaatctagcaagcaagtctccattgttgcagaaaaaactgcaaacaccaaccaggaacaggaaccagctaacttcgagcaccataggtggaagaagaacaccaaatggaaaaattggcattgcaaagtaatcaattaatgtgaaggcagatttgctgtgaccatgcttagaatggaaaaattggcattgcaaagtaatcaattaatgtcaaggtgggatagcacggagcctaaaaggactgcggtttttgaacctgcagaaggatcaagatcaatcatgtaaactgatgcacattccgataggtagcacattttatttattacattgaagttggaaacagacaccaaagaggacagaaagatgataaatatgaaggaaattcgaattgaggcttctgtacattttccacacttataaagtaatgttgtatcatgtgcctattagccatgacacatcatcacctgaaagttgcttgtattagacatgtgctaagtttacagtttctctgtctcatgtatgttaccctttctcataatggatcgccactcacagactaagagggtgattggtttcacccaactaaaatttagtcccttttacattgaat

SEQ ID NO: 26290 - DNA, 1110 bp, Zea Mays
atctttccaaattttactcgcctcctgtacctctctcccgtgtgaccatcacaacaaaaataaaatcaataatagagagagaagaggtagcaacaccggctgcttaatctcttcttttccctcctctttatctccagcgcatcgtaaagggaggagcggagcggcgaattcttgtggtttcccaagatgtcttctccaagcaagcgccgggagatggacctcatgaagctgatgatgagcgactacaaggtggatatggtgaacgatgggatgcaggagttctttgttgaatttcgtgggcctaacgaaagcatttatcaaggaggtatatggagggttagagtagaactgccagatgcgtatccttacaaatccccatcgattggtttcatcaataagatatatcacccaaatgtcgatgaaatgtctggttcagtctgtttggatgtcatcaaccagacatggagcccaatgtttgatcttgttaatgtgttcgaggtcttccttccacaacttctgttatatcctaatccttctgatccattaaatggagatgcagctgcgttgatgatgcgtgatcgccctgcttatgaacaaaagagtactgtgaaaaatacgccaaaccagaggatgctggtgtcagcccagaagacgagtccagtgacgaagagctgagtgaagaggaaaatgactcgggtgatgaggagataatgggcaaaccagacacatagtcgagttggaacctagatctgtaatctgcacacgatgtttattgcagcaagtgcaattaaatagtccatggatgttcccgtgcagtctgaatgccatgtaaataaactgcaatttcatgttcgctaatcttatttccatctccagttgatcaattgaatttccagcataactgtcttgatatcatgaatgtaggtttgtgcatttagagctaatttaggaatctcatttttcgaagggatttttattttgacacgagaaattagtttattttactttgataaaatagaaatctcttggaaaaatagagtttccaaactaaccctgaaattggttggttgtttaatatctgtgcaatctttaggagaagcaaattcgtca

SEQ ID NO: 26291 - DNA, 725 bp, Zea Mays
agacacctttcctcctcccccctgaccccggcccattcaggtgaatgtgccaagcagttgttcctacaacgtggtgactgttaaatgtgggcattgtacaatggtgctgtccatggatctcagtcccttccatcagcaggcacgcactgtcccagacaaccaggttgtccagaacagagggtttcagtataacaattttgggagctacgagcaagcctcgtcaagaaatctacgaacgcctcccatgtatccagtgtcaaacaatcagccacaagtgccaccaatacgaccctcagagaagagacagcgtgttccatcagcatacaacagattcatcaaggaagaaatacaaaggataaagacgagcaacccagagattagccacagggaagcattcagtgctgcagcaaagaattgggctcatctccctcggctccatttcggcctcagcgtcgctgacggcggcggcggcagcaactagggaagacgatgattacggatcgagctcttcgccttacacatatatatatgcagtgtgctatgtcgtgcttggattttgtaagccttattaagttttttgacaacctgtgttttcagacctgttgcgtacttgcatgcatgaatcctgcattgcgtgcagtaattaacatgtttgatgctatatatgatatatgcatgcatggtgtacaacattactaaataaatggaaaatatttgttcaagaa

SEQ ID NO: 26292 - DNA, 1204 bp, Zea Mays
tagaattcctgcccatggcgccgcttccgaagagggggaacagaccctagctttagcgctttcttttcagcttacggacaaggcgtcgatgctggacgagatcgtcgactacgtcaagttccttcagctccaagtcaaggtgctgagcatgagccggctaggtggtgccgctgccgtcgcgccgctggtggccgacatgtcctcggagggtcgaggcggcgtggcggtcgcggccgggagcgatgatgggctggcggtgacggagcagcaggtggcgaagctgatggaggaggacatgggcaccgccatgcagtacctgcaagggaagggcctgtgcctcatgccggtctccctcgcctccgccatatcctccgcgacgtgccacatgcgacctccggtgggaggaccgggcctcggggtcgccgccgccgccgcgcaccacatggccgctatgcggttgccgccccacgccatgaacggcggcgccggagccggagccgacgccgtgccggcctcacccagcatgtccgtgctcacggcgcagtcggccatggcgcccaacggcgccgggggtgggactgatggcgagggctcgcactcgcagcagcagcagcggcatcatcccaaggacgccgcgtccgtgtcgaagccgtgatccgctcgtgaacgtgaaggcaacggccgccgtgacactaacggcgcaaccatgacatgacactcggagctgacaaagtgggctctttggcgggcccacccacgggctctcggcactgcagctggccctccgaccttcccccttttcgcattttattcccagtgtaaccattgtttttttttccttgtttaatattaatcccatgtattatcgattcgcaaatgcaaggctggttctcctctgcttgctttgcgccagctttaccctctcttttcccgccatccgcatcaacctttttctgttgctgccctcgctttggccacggcccgctgccagatttgtcctttgcggttggacggggaatttggtctcccagcttcggctgctgacccaattttattatgttttttatattctcccccgtgtatcttgctatatcttgtgtactctcggccccaccggtgaagaacaaaatgtgctggctgctgctggtattctagctcgctagggacttaagggatgcatcgatatatgatgcttggaatttta

SEQ ID NO: 26293 - DNA, 1363 bp, Zea Mays
cttaaatagcccccacctctttctcgcctctttccccattcccaatctcgtcttgtgttgttcggagcgggcagcagcacacagccccatcccaatcctagtcgatcttcttcccctcctcaagccggttccttcgtccacacgaccgcgcgctcggaaaactccgcggagggcgaaggaggcgaaccaagggcgacgtatccgccgccggagaaggtgcccaggtcttcgccggtccctttgccgcctccttgccgccgacgagcaccagccaggaagaaaagaagctgaaccatggggaagagaaagtcagctgctaagccacctcctaagaagcggatggacaagcttgacactgtcttttcctgcccattctgcaaccacgggagtagtgttgagtgccgaattgacatgaagaatctgattggcgaagcatcttgtagaatctgtcaggaaaacttcagcacaactgttaatgcactcactgagcctattgatatatatagtgaatggattgatgagtgtgagcgtgtcaacactgttgaaggcgacgatgatgcgtgagcttgccccatgcgatgaaactgttacctacaatcgtaatgtaatgtgctggtattctcgaatgccatagcccatagtcagccatggcttggaataacgtagtggctgactgatatgccagtaggcacctgtctagtacttacagaactacaaaaagtttgtactatacatatatggacaaccttataagtggctatgtgtgtacctatcctaacgcttatcccagatggtgtatcagcgtttttctgtgagattgttttcaagcaaggggttgttcattcattgggtcttctcgggaaaaagagaattatgctgcagtcaaccagatggccgctgttgtgccgacaatacagggtaaaccaaatgcaaccagaatataatctgcagcggaagatattcatagatacaattgttttcagttcattcaacgctgaaagcggtttcggtctggaggctgagctttggatcattggatggcactatgcagctttggcacctggagtaccgctcattagtttttcataaagtcccgttcatttcttgtgcacattgctggagattgagagatcgagatcaagactgtacgcatcataaaccgatcagtctattctttgctgtgtacacctgggttgtctttgtgcctgtggtctctgccaggagggtgttcttcgaagtttgaagtacatgtggtttgtgtcttaatgcagttcggtttcatggacgggttgtcaagtgttttaccaggaacagttgtcggtgcagcagtatgcttaatcatgaataaatgatttttgtattt

SEQ ID NO: 26294 - DNA, 2378 bp, Zea Mays
ctcgtctctgtcgtctatggcggcggcagaggtgtactcgccgaccgcggcggcgcagcagcagagggagaaggcgacgtcgcaggtgtggcgggcggtggtggggtggatcggcttccttgttcaggttctgcttcagatcctccggggcacgccgtcctgcgcccaactctttccttcggcggcgtccggtacccgctcctcttcgggcctgcggcctcgaactcgtcgccggaggtggcctccgtccgtccagctctgaggcgggcccatggaaatcgttgccatatcagatcagcttcgccacggaccccatctgcgacccccggtgacgcgctccgcccacagctctgaggcgggcccatggaaatcgttgccatatcagatcagcttcgccacggaccccatctgcgacccccggtgacgcgctccgcccaccgcccaccgccgcccgggaatggctcgagcgctgctcctgctgcgagtagctgtagctcgctaccctcctctcccggcctcacccgcgctcctccagccgcagccgctgctgcgctgccacgcgccctcccagtacaaatcccagctccgcttcctctcctccctctcctcgtccgtgcccaacagctcagatgctcccagcgacggcgggggcgaccgcgacggggaagaagatggcgcgaagagtggcagccacgtcgattacttggggatgagcgacgaggagctcatggagcagtgcgatatgggcacgttcaaggcgtccggccccggcggccagcactgcaacaagcgcgagtccgccgtccggctgaaacaccttcccatcggcatcatcgcccaggctgtggaggatcgatcacaacataagaaccgagcgtctgctttatctcggcttcgaaccctgattgctcttaaagttaggaggccgataaacctggaagactacactccacctgttgagcttcttcagatattacccctgaagtccagcgttagaggaaatgatgttggcccccaaatcggtccaaataactcaaaattttctccaggaatgcaagcattattagacctgctgtttgctgttgaagattctgtatcagatgcagcaaagattttaggcctaagcaccggtgctttgtcaagattgattctgtcagatgattctctccgaacggccgcgaatgaactgcgagcttcgaagtgtttctttgattgcagggcaccggtgctgtactacgtgctcctgacgttgcaggacagcgtgcacaaggtcttctacgccgtcgtcgaggccgctgcagttcgcgcagacaacagccatcttggagggttggcgaggtatccggtctctgcaactcttccacagattggatccagattattccttacatggggtgtcttctggagttttcctgaggtgattgactgactcgagaatttgccgacgcttgaagaaggacctaatgtgagcttttacatacttgatgaacagcttgagctcttgagcaaggtgctgaatgcaggggatgacatgattggtgttgagtgcttagaagaagattgtgatggcaaggttctatttgtttgaggttgcttcaccattccccaaagcacattgcatcttgttttagtgtttttttgattgccgtcgtcgaggccgctgcagttcgcgcagacaacagccatcttggaggcgttgcaagcacatatcattaactgggatattcatatgtttgatgaggagatcggcaataccactcagggtggcaagtttgaccatgcagatcgtttgttccaaagcattgagaacgcttacataaatagcttatcaaatacaagtgacgtcaaagagcttattccagaattcttttacatgcccgagtttcttgaaaattcaaattcatatcatcttggtgtcaagcaggatggggaacctataggcgatgttgctctccctccatgggcaaaggatgataactcaagtgacgagtttgacaaagattctattgagagtgatgatagatctcttgaagagctaagctgggagacactagaacttcttgtggtacctcatatattcagcatcagacgaagcacatggagatcaaccttcacttcgtccgtgagcgtgtcgccgacggtgatgttcgcattctcagcatcccgaccacttcgtagtttgccgacattttcaccaaggggctgccgtcgagtgtattcactgagtttcgatctagtctcaacatctgtacaggatagaattgagactgtaggaggtgttagactcctgctaagggttaggcctgggccttcttgtatttacctgattacccctatgtaatgggcttggcccacctaactgccatatataaattaat

SEQ ID NO: 26295 - DNA, 1320 bp, Zea Mays
aaaaaatgtgcagttactacttactagtacagcaaaatttttccggtttcatatagcacatcacatccgacagtggatgcagattcgagaacactttatgttagcaatgttcactttgctgccaccaaggactcattatctcgccatttcaacaagtttggtgcagtactgaaagtagtcattgtcactaatgctgcaacgggtcagccaacagggtctgcctatgtagagttcttacacaaagaatcagctgaacgagcgttgtcgttgaatggcacatcatttatgactcgtattctcaaggttgttcgacgaagttctcatgaagcagctcatttttatggttggcctggtattggacgatcatcattatatggtaggcatggtaggatggcatacccaagagctgttcaccccggtggttcctttagagggcgtgctccgatgaaagctggcgctagaagtttacagtggaaacgggagccttcaggcactgattcaagtgcaggtgcgaaaaatgacatgagtgtgccattttcctgtgaacaggtcctcccgccggcaacataggggagcatactatagctgatataatgagaactgaatggtatgttactcgtcgcccctaatggctgaatatggaaagcaagctgagaagattgttccttcctgatgcagcgtaaaacaaaagtccgaaaaaacatgaaaatacaaaaaaaacaacaactaaaacttaaggaaaaaaagagggggagtttggcattaggatatggcttatcattctggtaaccggattgggtcgtctttgccatatgcgagtaggatgacagcctgagcaattttctgtggactccagctatctgaaaaaaggattcacattcgaaataatcacaacatttgggttgtgttggatggaagatgcttatcagtagaacaagatgggcagattttggacgagctactcatcatgtgggttgacactgctcgtcgttggaggacttgtatatatctttttttgcggggaggacttgtatatatctggccattagtttactgactaatggtgcatgctttgggaaaagtaatttgttggaagcttatattaactctaaaaaggcaaaaaatggcctttttcttctgtcttgtttccttggaatcacaatgctttatgtggtaaacatctttggttctcggatgggtgcgggtatggttgcgtaggagcaaccgttatgcatttatgtactctcaagtattctagtcactttaggtttataaatgtatatatggatatggacacaggatgtacttgatatgtgcgcg

SEQ ID NO: 26296 - DNA, 1536 bp, Zea Mays
cagtatctatgtgacatccatataaaatagaagagcagaacacattaaacctgggaatagaaatcaatggcagtagtaaaatccttttgtcgaaatgcattgtcacccttttttttgtagaaatcaatgggtgaggatcgcgcatcctagaatggcgcccgtcggagctgggagagcggcatgtgcgggttcagagagttgctgctagctgtgtttggctggcagggaagttggaggagagtcccaggaaatcaaggcatattatatttgtcttccacagaatggaatgtaggagagaaaacttgccaattgaatttttagatgttttttcaaagaaatattcggaactgaggcatgacctgatacggacagaacggcatctgttgaaggagatggggtttatttgccatgtcgagcacccccataagttcatatcaaactaccttgcaacacttgaagcccctcctgagcttactcaagaggcatggaaccttgccaatgatagcttaaggacaactctgtgtgtgcgatttaagagtgaagtagtagcatgcggagttgtgtatgctgcagctaggagacaccgggttccccttcctgaagatcctccgtggtggactgtctttgatgctgatgaagcaggaattcaggaagtttgcagggttcttgctcacctctacagcttgcccaaggcccaatacattccagtatataaagacaacgattcctttactgttaagagaatctctgatctacaggcttcaaaggaaagtccagcaagggctgttgctagcgataagggtacccctgtaccctcaagttctagccaggagaaggatccagtggctaagactatactgaacaaggtgaaggaaaaaagtgatgacgaaggtaaaccattgcccgctgaatttgatggaaaagaaaacccggtggcaaactcaaaaaatgacaagtctgattctggtgtcgaccggagtcgagaaagagagagatcaagagggcgggaacgtgatgccaggggtagggattctgatcgtgatagcaggggtcgcgagtctgatcgtgagagggaccggagacgctgctctagggaaagaagttcaggacactcagacaaggagaaatcaaggcgccattcatcacgcgaccgggctgactactacaattcgcattcatctcgtgagaaagatcggcataggcaccattgatcaaggtgacgaggatccccggtctgcagggcttcgctgcatggagaccaccacttggcagtgccgaccggatcatgaaaacttgtggattatcatcccactggtggttgtattggcttgattgtgttttgcaccttggattgtaacttgcaagatacgctagccatgagctgtgtgcaacttgaatttataaacacaacatataagatacaattgacgcacgtgcactaactgccattccagcagagcttgtggaatgttataaagaaacagtttgtggaatgttggcactgttagacctagtttggtgactagggaaacgaag

SEQ ID NO: 26297 - DNA, 2301 bp, Zea Mays
cgccacgtagctctcgaccgcgctctcgccccgcctccctctcgcccgcctctcgcccgggcgggcgctccagcgcgggcgagagcgagtcccacaccataccaggtcaccatacccgcctccgccgcctggccgcgctctcccgccatgaagcagctccacaagtcttcccccacccaagcgccatcgccggcgcacgcaccggctcccaaggcagccaagccggcgcgccctggcccgcgctcctggatcgggtatatcctccgcgagcagcgcctcctcttcgtcctcctcggcgcgctcatcgccaccaccttcttcctcatccgtccctacttctcgctctccccgtcctcccacctccccgacgtccgcccgctcttctccttcgccgcccgctccgctgtcccgcccggcttccgcccgcccccgcgccgcgtcgtcgtcacaggcggggcagggttcgtcggcagccacctcgtcgaccggctcctagagcagggggacagcgtgatcgtggtcgacaacttcttcaccggcaggaaggagaacgtcgcgcaccacctccggaacccccggttcgagctgctccgccacgatgtagtcgaaccaatcctcctcgaggtcgaccggatctaccacctcgcatgccccgcgtcgcccgttcattacaagtataacccaatcaagacgatcaagacaaatgtcatgggaactttgaatatgttgggtctggcaaagcgagttggtgcaaggtttttgttgactagcacaagtgaagtttatggtgatccacttgagcatccacagaaggagtcatactggggacacgttaatcctattggtgttaggagctgttatgatgaggggaagagaacagctgagacttcaactatggactatcatcgtggtgctggtgttgaggtgcgtattgcccgcattttcaatacatatggtcctcgtatgtgtctcgatgatggccgtgtggtcagcaattttgttgcacaggcactacgaagacaaccaatgacggtttatggtgatggaaaacaaactcgaagtttccaatatgtttctgatctggttgctggattgatggctctaatggagagtgatcacattggtcctttcaacttgggaaacccaggagagtttaccatgttggagctagcacaggttgtgaaggaaacaattgacccaatggcaaccattgaattcaaacccaacacagctgatgatccccatatgagaaagccggatatcaccaaggctaagcaactgctacattgggagccaaacgtctctctcagagaaggccttccgctaatggtcaaagacttccgtcaaaggatctcggatgagtaatcgaggcaatcctacgatactggtgaccggtttgattctgaactatgctgcaaatacagtcagaagctctttatcgattggagccatgcagtacagtgtactgtgtacacagagactgtagaatcacccaggccccatttggaatgtggggatccatacaatttccactggatagtactgtttctgtgaaataactgaaaagttcatgggaagttcgtgttaatcttttttttttatatcttggtggggcagaacagaagcagtcaaatattttttttgaaaaataacagtctcgtatacagtatctgagcagttttctggatacatttgtcatcagaagttgacttccaaaaacatcgaagctttgcaacacactctgacaacggcaaagccggaggcgccactgtaccgccccgtccctccgacgaccgcgacgtgagactcctcctggtcgtcgcggcggacgccgaagaagctgatgctgtcgcccgcgccgtcgccggcgaacgaggccttcacggccaccatatggctgccgttgtcagccacgccggtgacgaggacgccctgcagcctcccatccagaggcagcccgaactccttgctgccgcggagccgctcgtcgaccacggtgaccgcggcaggccggagcgcgtccggcctcgtcaaggcgcgcagccagcggctgccgattggcccctcgtccgtgaagaccgggcgccgcgtggaaggagctgtgggtttgggcgacgcgacgccggtgccggtggtgtacagcgtgatcgtttgggcggagctgcgggacggcggcgacggcgaggaaccgcggcgtgccggacgggcgctggctgccgtgctcgtcaccgcgagcaggagcgcgagagcggcggcgcaggcttgcttgaggatgcgagtgcgagattgcgcgtgcatctt

SEQ ID NO: 26298 - DNA, 206 bp, Zea Mays
tcgcacgtcactttcagatttttaccttctgtcgagctgaaggtacaaatgtaacttaaatatcattggtgttttgtttacgattatataataacaatgtgaataagctgatgattaaagatgattattgatgttccttctgtgttttatatgtcccagtttatatctttgcatattggaatgatgaaggcacgcccttcatgacc

SEQ ID NO: 26299 - DNA, 1432 bp, Zea Mays
ttttaatgaagaggttcgtgcacgcactgtgttcaacgcaattccaattttctatccgagtgatgagtgactgtgcacatacatcgtactacaggtgggacccgcttactagatcagattctaacatcctgttcgtggagtcgtctcggcggcggcggaacaagccgggaacctaccgcaaagggcgccaccgatgctaaagccacagacgtcgtggacagcttccctccctctccttctcatccgccgctgctcgagaaccgcggccagtccatctcctgccggtgaccggccgctctcctttgtcccggtctgcaagcggcggatgagcacgctggcgcatcccaggtttgcccctctccctacggagcaaactgaatcccaaacagatggcggggctgcacggtaccagttccggctggtctcttacaacatcttggcccaggtgtgtctgtttttttttcttagctttctagcgagaaatttgctattttgccactctctccccgttttggctctatgttattatgccatctctgtcggtgggaccatccgtgtggatcattggcggccaacggtgcctaatagtttgctctgtgctgcaggtttatgttaagagtacgctttttcctcattccccatctgcgtgcctcaagtggaaatctcgatcgggagctattcttacagaactaaagagctttgatgctgacttcatgtgcatacaggttgtcttatataaagttctgcagtgtttattattactttggttacattacagaatatgttgtcttttcagttcaaattttattcttattatctagggtgttgtagcaccacaaaattttgccaatgaatatgaagaaatccaacagattgtgctgttgtggcagtgttggtcaagtttatgagtcacatcctacttcgtgccatcttgtccaaaaaaggagaaatccacttctcttcctgtcctctgagccctctctatattgctacctttcctgtctttgtcctctgtccacagctgcttcttctgttccttggcacccaggagcttatggtatgatacttgtgcttatgctgataatgaggcaaggggttgcaatatggagtagtaatggtgtttatttctttttttatcttatggaacaattccatcctaacaatctcactagatggcatgcatgacatggcaatgtaatgttgggctagtatgtcttaattttactttcctgtcagaaactggatttggattttgcccaactagatttcagctatcacatgtagttcaaaattatcgttgtcctatttgttcacaaacaagtttattgggatgctggtatacctactatcaatggtcagtctcttttgtgtggaatgattttcttctggttaataattgtaagcaatatataattcatgtgacctgcgcagg

SEQ ID NO: 26300 - DNA, 2147 bp, Zea Mays
tttttccagccaaagttaaattaaaaacgggaaaaaaccacacgcctgcatctttctctctctcgtctctagacgtgcggtgcagcagctgtattcgccgcaacctcctcccatcccttgcgccagcggattccttggctgcgcggaattctcctagcctcccgagcctccccagctcgagaagggagctcacggtgacgcggcgcgaagggccgggtcagatcttggccgttggccccgaggcggcggtttcgcgtggggtccagcagagcccggcccgcgcgggagccgctctgattcgccgggggacgccgcggggaatgctctacctcaagctgccggcgggggatctagggttccgtccgggggcgccgaggcggggatccggcggcggcggggcctgagggtggcgcgggcgtcggaggcggccgccatggagcaggacccggagcgcgcctgccttcggagcttcgagctccacgagagcgagtcgagcctttacgttctaggaactaattctgacagaacactttggagactactcaagatcgatagatcagagccgtcagagcttgtgatagacgagtgttctactgtatatactgaaagtgaacatcctgacttgttgaagggtcttgatgacgagcacaggtcaactggcggagtaaaatttgttacaaagttttatggcataattggttttatcaaattccttgggccatattacatgttgattattactgagcagaaaaaaatcggggaaatctttggtcatccagtgtatcaggtgaccaggacttcaatggttgaattagcaaattctaagacaagatctacttttcaaaacttcaaggacgagaacagatacaggaagatcttgaatgcacttgatcttaggaaggatttctttttcagttactcataccacattatgagaagtcttcagaagaacttggctgatccacaggatggatggaccttatacgagactatctttgtgtggaatgagtatctgacacggcggatccgtaattgtctcagaaatactttgtggactgttgcattggtccatggtttctttaagcaggataaattctcaatatctggcaaggatattatgttcacactcatcgctagacggtcgaggcattatgctggaaccagatatttaaagaggggggtgaatgagaagggaagagtagcaaatgatgttgagactgagcaaattgtctatgaagctgtgcctggacctactgaagtaagttctgttgtgcagaataggggctcaattccactattctggtcacaggagacatcaaaattgaatcttaaacctgatataatattgcatgagatgcagaataattatgaagctacagagcttcattttgaaaatcttagagcaagatatggaaaccctatcattatcttaaacttgattaagacacgtgagaggcgagagtctatactccgccgagaatttgataaggcgatcaagataataaacaagagcctgtcagaagagaatcatctgaggttcttacattgggatcttcatcaaaactctcaaggaaaacctacaaatgtactcgacgtccttctaaaagtggcatttcgggctctgaatttaactgagttcttctattgtcaagtcgcaccaaattctgagacttctgcacaatgccccaccctattgaatggtcttgatcaatatttatgtgatgacaacaatagtgacgacacagaatgcactgagattgttggtgatgtatcccaagaggatatctcaggcagctctgattcctctggtaatgcaaccacagaagataaatttgagaatagtggactgccaccaccaaaaccaccaaaattccaaaaaggtgttttgaggacaaactgtatagattgcttggatcgtacaaatgttgctcagtatgcacatggtttagctgctcttggacatcaattgcatgcgcttggttttatagaatctccagaactaggtttagaagctcccttggcccatcatttgatgcacttttatgagatgatgggtgacacacttgctgtacagtatagcggttctgctgctcataacaaggctaataacctacaccagttcaaagatcaagctaaaacaaatgggc

SEQ ID NO: 26301 - DNA, 3175 bp, Zea Mays
gtacttggccgctgcgctcctccactcccctattccccacatcactccgcttttgcggccgcttgtggcggtgccttccacggggctgcggctgcgctccgccggagcgagcaaatatccttgcccccacgagaccctcgcacagtcgcacctctccgacgtgaccggcgccgtagaaccaccgggtcttcccttgtgctaccgtgttggcccagggattattcaagaacatggagagaaagagaaaccccattgtctttctggatgtatctgtaggtgatgagccagatgaaagaatgatctttgagttgttcgctgatgttgcaccccttgtgactgagaacttcagagctttatgcacaggtgagctgggaattggacacaagactaagaagccattatgttacaagggatcatcgttccaccgtgtcatcgaagggttcatggcacaaggaggtgacattgcgaaaggaaatgggtctggtggagaaaacatatatagtggaaaatctgcagatgaaacttgtgttctacctcatgatgatcgtggtctcttgacaacagcagatactggatccaaagctagtggctcccagttctgcattactttcaagcctaattctcatcttgacaggaagcacacagtttttggcaagcttgttgttggaagtgatgttctgaagagaatcgagcaagtagatgtgcaatcccctgattcaactcctgttgttccggttactatagtaaattgtggggagctcactgaccgtaaagatattggatctatgagaataggaattgataaaaagagggccgccaaatcaaagttgtcaaagggtatatcttctgatgaggaaagtaatgaaggacagcacaagggccgccgtaacaaatcttcaaaaaggagaaggaagaagagatatttttattcggagtcagatagctcttctgagtcggagactgaatcatctgattctgagagcgattctgatacttactcaagtgactcatctgatgtcagcagttcaagtgatgacaggcgaaggcgcagaaagagacattcgaagaaaaataaacgcaagcgttcaagaagaaagcatgaccaaaggcgtgaaagaaggcgtaggaagcgtgataggaaatcaaaacagaagtcaaaaagcaggataaagggtgacagtgaagctgaaagttcgagtgatagcagctctgaagatgctagaagcaagagacaccgccacgggcggaagtccaaggcatcatctcaagtttttgaggaaaatattgctgcagtgtctgctttgaaggatgccacgtcacctcaacaaaagagtggcataccaaacagtccagcacaagatgtctccccgctgcaaaatggggaaaactatacaaatggtgttaacgaatcaaaaattgaaaggaatgcagctgtcatgcctgttctaactggcaaccaaagcaaatctaggtttcctatacttcttcatacatcattctttgtgcttactgcttctggaagcggtgtttcatctgacattgataagcaggagccagagcatgagtgttaatcactcaatgagcaagagtatgagcatcagcccaagaagaagcccaatgaaaaggtcaattaccaccacaaagaggtcagttagcaggagccctgttcaccataatcgcagtggaagtcctgtcggtgctccccaaaaaagcgtgagcaggagttcagccagaaggcagagcatcagcaggagccctgctaggagcctcagcaagagcccacccagagatgcaagcagaagcccccacataagcaggactcctgttaaagctcacagaagaagcattagcaggagctcagctaggtccatggaacagagaagtctaagcaggagcctggagagaattcatgtacgaaaaagtgtcagcccaagaccaccattggcgaagccaaaaagcattacccgaacccctgtgacatctccattgcgaagcgttagccggagcccagctaggatttcaaggagcccacttaggccttctaggagaagccctatgagaagtccacgacggaacattcacagaagtctcagcaggagccctgcaagaatacttagaagtgtgagcagaagtccagtaagaggtggtcgacctcgccggaacattagcagaagtcccagtccacttcgcagggcattaacaccaccaaacaatggaaggagccgatctaggagtgattctcctgatgggtcacccaaacgcataagacgtggacgtggttttactcaacgctattcatttgcaagacaatatcgctcaccttccgctgatcgcttgcatcgttatggcggaagaaatgaccgtgacagatacatgggttaccggggttttcgccaccgatcacctcctcgacgttataggagcccctctagaggcagagtgtcatcgccaaggtacaggaggaggagccgaagcgcatcacgcagtcctgtccacagaggaaggagaggtgggtacaacaagagtcctgtacggagccgttcaccccccgccaggaaaaggtcacctagcgatcgtgcacggtcagtttctaggagccacctttctaggtcagtatcaaagtctccaccagtgcatcatccctccccacttgattctccatctctggagcgtgcaagtgatgggaaatctcggtccccatcaccgtctggtggaggcaagaaaggtttggtttcctacggtgatggcactcctgattcagctgggaagtaggtttccaccggatgtattgtactacctttggccattgtctcttgatcggtccagtgttacgtcactactgtagagaagagaacggttttggtccttgaggcgccccgtgtactggtgttgtcgctgtagaattgttacttaagttgtttgggatgatcgtcgttgtccttagattatcttaagacctagtactctgagcttagtttacgctcatgctgaacatgtagcagggcttcagcttaattaccattggtggaatttggatgttataatgtttgacgcatagagaatcattacattattttgatctcggagcacaataacatgtataattaataattaattccttctggaactatccaacactagcgtttctgcatgtatgcaataattcgcttggccg

SEQ ID NO: 26302 - DNA, 928 bp, Zea Mays
aaaaccacagccgcgacgccgacgcgcaccgaacaacagctccgagaacgtatcgcccacaatcctccacgtctaccgcaatctgtcactatagcctgcgcattcgcatccgggcatccggcatcccaccccacccacctccttcctcttcccgcccgctaaaacccacgccaccgccgcgcgccgccggcagcgcaagggacgcacgatggccatgcaggtggtgcgcaacctcgacctggagcggtacgcggggcggtggtacgagatcgcgtgcttcccgtcccggttccagcccaagacgggcaccaacacgcgcgccacctacacgctgaacccggacggcactgtgaaggtggtgaacgagacgtgggccgacgggcgccgcggccacatcgagggcacggcctggcgcgccgaccctgccagcgacgaggccaagctcaagatcctttgcaggcagcctcacatggacgagtccgtgtacaaggaactggtggagcgtgccaaggaggaagggtacgacgtgtcgaagctccgcaagacggcgcaccctgacccgccgccggagagcgagcagagccccagggacggcgggatgtggtgggtcaagtccatctttggcaagtagccttgtggtggtgggtggcagcgcgggtgctgccgtgccgagcaggcgagcgcacgcaagagatgcctgtgaccgtcggttccgcgtgtacattcagcactagctggggattaagttggttcgttgttgctgtcgcgatctgcaaatggcgaaaagtgtgcttgtttcttgcccgtctgtattgtatcgaactttgagcgaatgtttcagtttgctgcatcatttgtttgtcatgtgctgaattccctgcttgaccgagttcgtaggcaatcctccatgtcgttctgttcagttgtg

SEQ ID NO: 26303 - DNA, 488 bp, Zea Mays
acaggttggataattgaacatgagacactatagccatctttggtcgacgaccaagaggagtgcaatggcgttgtaaattggcgtctccatatctgacgttgggcgaatttccactagggtgactggcgaatacatgtatcctacgtttacggccgccaatagcttctggggagggtgttggaaccaggtgatttcgttttagcagaaaagaggtgccttgagcagtgcaagttctcacatggtgatgtgattttgttcaagtgccctagcaatcataaggagatgcttgtgaagaggttgattgggcttcctggtgagaagatacagctccctgggtcccttaaccctactaagatcccagaagggcattgctgggttgaaggtgataactctactcgtagctgggattctagggcattcggtccgatactggttttcttcagtaatcatcagttcaaatgtgtccatgctgtacaactagtgaacag

SEQ ID NO: 26304 - DNA, 259 bp, Zea Mays
attgcctcgagtcacaactacaagattgacaacttagtgattggatttttggtggtgattttggtgccgcactgcaaattaagagagaaatttcggttcccaagcagcccacagattctattgattgcgggtgtctttcagcatctgagggtttctaccagtccaggttacgcacaagcttcaaattatcgcaaaattcctcttacatatctgcatctcataccgaaccaggtctcataccggaccagtttgcttggac

SEQ ID NO: 26305 - DNA, 154 bp, Zea Mays
atagcggaagacttacaaaataaaatataaatataacaggatctaaaatccatccttggcgcagaaagtcaactgggagacgacaacctagacctctcacgaacacagcgcaacctccaccatgcgccatccagtggtacctgttcttgacctg

SEQ ID NO: 26306 - DNA, 428 bp, Zea Mays
ccacgcaccaggacatcgccaccggcaccgcactacggcgtacaggaaaccggacggacagctatgcccgaccgcctcctttctggttctcctcctccctcctccctcccgcgcagatctccacaagcttccagagagcagcagcagcagcagctcgcctccacgcgacacgaggacggacatggcgaccttcaccaagctcgaggattcccccatgttccgcaaacaggggatcacttgatgaggcatatgcaggggatctatcatttgcagattctctgcaagcatttggtgctggtctggatgatcctattagtgttgccattggagggcccgtgatgtccaagtttactactgctttcagggagcttgggacatacaaggaactccttcgttctcaggtagttcgtgtaacacaaaaggaatga

SEQ ID NO: 26307 - DNA, 2181 bp, Zea Mays
gccgggtcgggttttgctagggtttactgcttgtcttcctttctcggcagtcggcacattcgcggcttcgcctgatcgcgtacgccgcttcgtcctgattctcaatctctggtgctcccatgaagaaagacagggaatgaaggaccgccacctcgcgctgaaccagacccagagggtccgcctcgaggccgcgcttcaagagctccagtccgttgcgcccgccgctgccgtcaccgtcgcggacaccattcccgtcaatcaagaggacaacatcctcaaggggcatgggacgtcggaccaggacggggaggtggttgcgacgctctgcggggtggtggagcgggtcaacaagctggtctacgtccgcactcttcgcgcgagctgcagattctcgatggagatgaatggggttctgcaagccgcggatgccaagtactgggtttacaagggtgagggcgccgcgaatctcatcctcagctacaccggctcatcccctactatgcttggcaaggtattgcgggtcaagaagcttctaaatgacaagtcacagctgccaccaagttgtatggtcttctcaagtcatgagcaactcctgtggggccatattccagaactggttgagtctgtcaaacaagattgcttggctcaagcctatgctgtacatgttatgagccaacatctgggtgccaatcatgtcgatggtggggttcatgtacgtgtttctagggattttctagagcttgttgaaaagaatgttcttagcagccgtcctccttggagagtaaatgcaagttcaattgatatcactgctgatgccgctcttctaatagcagaccactctttattctctggtactccaaagggtagcagctgcatagctgtagagataaaggccaaatgtgggtttgtgccatcatcagaatatatatcaaaagataattctatcaagaaacaagtaacgagatataaaatgcatcagcacctcaaatttcatcagggtgaggttgatttccaatacattcttgaacacatttcagatatcgaagactagtgaatacaatcctcttgatctattttctgagtcgaaagaaagaataagcatggccatcaagtcatttttctcaactcctcagaacaacttcaggatttttgtcaatggatctttagcttttggtggcatgggaggtggtgcagatagtgttcatcctgctgacactgataagtgcattaaagatctcagcaaggtcagtggcctggaactccctgacttcactgagctcctgtcagagacaattttcaaatctggggtattgggcaaactgttgaccactcaaaagctggatgatcatgacattgaaggggcaattcatctgtactacaacataatttctcagccttgtttagtctgcaaaaacctaactgatgtagagctattgcggaagtacacactcttgcattctcttccgttggacaagagcttgaagattgtcagaaacttcctcatttctgctactgcaaaggactgtagcctgatgatcagctttcggccaagagagaatggaagtacagattctgagtatgattcagtgtttcttgaatcagcgaagcgaacctatgagtacaagacatatttcgttgatctggatgtgaaacctctggacaagatggtacattattttaaactggatcagaggatagtcaattcctacacaagatatggggaggtcttgccacctccaaagggcaagtaataccaaagacacttcggcgattcagctccaacaatgaggagcctctcttcttactatatacgtctggactatggagaagggtgcatcagagagctccagcccactacgcccttaggttctgtgcatatattgttgtatctcttaactgtttgatgatatggaatattcttttcccaatatggtaccgagcctttcttgagcctcctcctcgctgccgctcttcttcggaatgccgcggcatttgccctcccctcatgtttggcgagccggctgcacgtacagcacgacagtgagtgccagggacatgcacatcatggcgacggtttaagcttgtggacactcagcagatagggtgatgaccgccattccctgtatgacagacacgatgtgcatgcaacatgatcagccattcgatgcatttgatttgatg

SEQ ID NO: 26308 - DNA, 1024 bp, Zea Mays
gccgacgtctgctgcagttcacccgcaccggctctgcacccacttccggcgtctctaggtcaccggcgttggctccagaccagcaccagtgacaacttacgacggacaagatgagctcccctcctcccccctttctatcttattatcaatgaagttagtgatgccaacactcaagttgcgataagagaagtattgagacccaaaatgttcaaattatggaagagtgcggtggactcgtctctggcattgctgctggatgacgccgaagcaaataatctcacacccgattcgctcctgactctggttgaggagttcagcgtgacatctcaggcggtggagcactcatttcctgctctgcttgtgaccaatggtgatgcgagcaccgactctctaagtgcagagtacatgaatgacgagcctgaaacaagcgttgctggaaacgaagagggccagctggagcagtcacctgatctccgtgacgatgaacattttgatgtcgacatgtttgagcgtctggagtcatctgtgccattgggatcgctgcctattgacagcatgatagagcggctgaacagtgagtgaagtacagcgagcagttcgttctgtccactgggataactactgatggtcagattgcaatctcggatcgtgtgatgcattatctacgttcctccggaccctcagtctggtgataatctcaagatccgagaatttcctgcgatttggtagcaaacgtgatgtaaagaaactaactgtagtatgcaagtgcgccatgcatttggcaaacgcaccaacggataacacgtctcgtttgccatcgtcaatgagtgcgcttgcatgtatatgaatatctgcatttatactgtgtttaccaaaaaaaaaagtattgtgccatgctccaaaaagatgcggagctagcagtgtcagaagtctataaactctatagtaatttatacttctgcattttctgaatatttttgaaaataaagaatcggtctatggttcagaaaaaagatggggaaaa

SEQ ID NO: 26309 - DNA, 745 bp, Zea Mays
gttcaagaaatccactggaggacaatatttaatccagtttcgagagtcaacatgcctaaaacgatatatgatcatgaaaggaatgtagggctaggtgatctcaactataggatcaacttaccatatgagaagacacacgaactcatatccaagcaggactggaacgaattgtttgggaaagaccaggtgattaggaaccatccaagtgtgtttgagatttatcaaagaaagttgttagagcctggaaagatctcaaagaaatatattgataagttaaacaagaaggtcagcactgtacttaatgagtatttcgagaatagcaaggactatgttccgaacaagagggactagattttagcttattggcagggttcaagtcaccaaagcagattttatgtatctgaaacattggagtcaagccagagattctaaaacgtgttggagaagccatgactactctgccaaaatttcaatcctcacagggctgtgaattttttttatcaaaggcatcaaatgattgagactagagaagacattgattggacagttggtgaaacacttgtttttgctactcttatcattgaagggaaccacgtcaggttaagtggttaggatgttgagaggggtacatttagccaccgtcattctgtcatccatgaccaaactagagaatagtactacccactgtaccatcttgttatgaaccaagatgaggagatttttactatgagcaacatgtatgaac

SEQ ID NO: 26310 - DNA, 2912 bp, Zea Mays
ctgaggcaaatcaaaatgcgatgtcactgttgtgcacatctgagtttgaaggccaattcacaacaaaaccctagctactgcttcgtctgccgaattccccctccgctcgcttcgcacgccgcccgtcgccgcggcggcgtctgcgattgtccctcccgctgcaaggagcacatgcttctcgccgcgccgttagcccgccgccgccaccaccggttcaccttcagctatgtcttctcaggtcgacaggcgcagccagtccgccgggaagcgcgcccgcaccgacggcagccggcgtgaggacgactgggtttgccccagctgcaagaacgtcaacttcgccttccgcaccacttgcaacatgcgcagctgcaaccagtccaggccagcagatcacacggccatgcaaaccccgcctcactatcccacgtcagggggttacatgggccctgggacgccaccatcgatgtaccttggtgggggcgctcccccatatggatcctcaatgtttaatgggcctgcggtgacacgctatggtattccgcaatttcctgggggttctgcgtattcatatggatatggtggtcccataccaatggggagcccctacgggccaatgcaaattgctgggccaactccatactctggtggaactatgatgacagcaggtggaatgtatggaattcccatggacaggtatgggccaatacctgctggtcctggtccaatggtatgtgctcttgtgattattcttctgtatacctattacctcatgctaatttaactactgttgccttacatgaagaactttcaacatgtttgttgttctgttactctattacattttttgtttggtatttatgatttctgtgattgtgtctacatggattaactgttatgattccttaaatctatatttcctgaacctgaaagggcacaagggctggctcatattctgatgaaggttctcagaagaagcctgcaggagctggccgtgataatgattgggagtgtccaaattgccataacatcaactttggctttcgcacagtctgtaatatgagaaagtgcaacacacctagacctgcaaaccagggatctaagtctgatggtttaaggggctcaagtaagtttccacatgataagggtttagtgctccttcctcatccaatcttctttgcgtataacaaatgtccctgaattacaaatttttttgtaatatttgttatcactagacatttctttgaaggaattagtgtgttttctttggattttcgcacataaattatgggctactttatctaatggtctatgtagtttattgttccatcaattctgttcgaactcacaccccaacctctaattgatagaagcaaagatgccagagggcagttggaagtgtgagcagtgcaataacataaattatcctttccgaacaaaatgcaatcgtccccaatgtggagcagaaaagccatcacaaacaaacaatgtgaatggttcagcgacagatcaggacaatcagtgagtcctaggacagtaatgagggtcaagaaggtccagcgtcgtcgtcaaggttcagtctgaatgtggggtacatctctgtcagtagtcgctccagttgttacaagtttcttccccttgggaccttagtcgagttggcaatggagtcttgtcttccctaatcactacagataatggtcaagaacatcgttcttgcctttcctggctgagcttggttacttgtctttgttactacttactagtactctgggtaaagtgccatctgttatatgaatgccttttagttatctgtgtcatagaatatcactcatctgttatgaagtatcacaaccgtcatcattttgtcttggttttgttaaggctgcgttctggtcgttgtttttcgatttatggttggtttgttattttacaggtgttatttctgaaacctttctttccttccatagtagtttccttagggatgttgcaacttaatgaggagctctactgaaataattaggagaattctttccctgttaagggctagtttgttagccagggaattggaggatagcaaggggtttcctcccccataggttacctctatttcccttgtcaccaaaccagcccttaggaatagttaggtctgaagttgacagtgaacgtctcggatgcataactgcatatgctactgttattgtcttccatgttctccgggtccggggcttcagctaatagctgttcaagtatgaccgtacagtattttggttagaagagatgctccttggtgaaagtgatgtgcatctcactgtgcagtggtagtagactaatcaccctgcatgcttgtcttgattatgactgattcactgacttggtaccattggacttagtttttgccatgtaacattacgaagcttttatcaaagctacgacttctgcatgaatttcaagacagcagtgagcagacggatcttccttgtcctactgctggatcaccgacattgcggatgtcagcgctcagtgaattgcagaacagtctttcaaactgatgcgctaccatttcgtattggaaaacaaggacaagcggttcggcccagaagtgttttagtactcgagctgcatgcaggcccatttagcacgatctggctatgacttcctacatggcccagaagccgtcgtctactgatcgctccagcttcttcttccttcgtcgccgctgggctggtaacattcattcgcggaccatcctccctcgatcgaagttagcgaggccttgccactgcacctcatcgcttggccaccctctgttctccgttgcggggcggactataatttccgctacaaagtatttacatgacatttgtggcaccgtcaatgctctactcatattttcaattttttaaaattataacgat

SEQ ID NO: 26311 - DNA, 1392 bp, Zea Mays
gcacaatggcgtaggttatagtcggcgtcatgtttcgatttcgagaactcttgcgcggcgcctgacaagaaatccttctcggcctttggtggcattggcttatcctttgtatgcttccattaaggcaatagagaccaaatctcctgtggatgatcaacaatggctcacatattgggtcctgtactcactaataacattgtttgaactcacatttgcatcaattattcagtggcttcctttctggccttcaatgaaattgatctttatttgctggcttgtcttgccatacttcaatggcgcagcctatgtgtaccagaattatgtgagacctgccttcataaagaaccagatggtcaacatttggtatgtccctcagaaaaaaggccttcttgggaaatctgatgacttcctcacagcacttgataagttcattgaagaaaatgggactgacgcgctgaagaaattggcgaacaaggctggcaagccatttaaacagtctgggaaatcatctaaggatcagaaagagacaaaatcatcaaaggattccaaagaaccgaagccatcaaaagatgcaaagcaaccaaagccatcaaaagatacaaaggagccaaagccaccaaaggtttcaaagtcacccaaggactccaaagaacagaagaaggcaacgctgaaagatccgaagaaagcaccaaaggattctaaaggactgaagaaagcgcttaaggatccgaaagaacaggaatcattggaagacccaaaggaacatacagcaaagaaggccggcaagcgtgtgacgttcgccgaggtggagcctgagaaggagctcaaggcctcgaacagtgactggcacccatcctctgatttccacgcggcgtaccctgagcagaacccatgggctagcggcttcatgatctttgaggatgaaaacagctactggaaccgaggacccctagactgctgagatcaaatgtatcgaggtggacactttttggtccgctagcagtgcaaggtcccaccagttcatcttcagccgaggagatgggtctcactcgcattatggcgacttgcgcctggtgtctgactctcggtcctgtaacatatttgtccgacgaatacctgtaggttgtagtgtagaattatcaattatgcagtgtggatggtgaaccggtgatattgtgtttcaggcggtgaaccttgttagttaggagaattgagatagtagcagtgtggtgctaaaccttatctggtttctggttgtgttgcttgctgtgctccctggtgcgtttccagtatctgcacaagtgccacaaaagtctgaccgtgatgaaaagatccgtaaaatcgtgcgaacttgccgttaccaatgccattttggaacctgaaatcttcttg

SEQ ID NO: 26312 - DNA, 3210 bp, Zea Mays
gtccatttcctactgacgagtcttgaagccgtgtgccgtgaagcgaccggccagccgatctgatatctgactgacccgcgccgcctgtcgccgtctgcccccacccttcccctccaaatccaacagcgggagcaaagccaaaccaaaccagcttactgctccgctccgctttgttgccaatttccgctccaagcgtcgcggtcgtgaagtctcgttgcgatggattcgaggccccgcgagactgacgcccccggcgacccggccaacggcgccgcccctccgctggccgcggcggtgacggccgcgaccggggacgtcgagatcatcaggccccgcaacgacaagcgtgggtaccgccgcgtcgtgctccctaactcgctcgagtgcctgctcatcagcgaccccgacaccgataaggcggcggcgtcaatgaatgtttcggtggggtacttctgcgaccccgatgggctggaagggctcgcacacttcctcgagcatatgcttttctatgccagtgaaaaatatccagaagaagacagttactcaaagtacattgcagagcatggtggttcaacgaatgctttcacatcttctgaacacacaaacttctattttgatgtgaacagtgatagcctgcacgatgctttagataggtttgcccaattttttatcaagccattgatgtccccagatgctacacttagggaaataaaagctgttgactctgaaaatcagaaaaacctcttgtcagatccttggcgaatgagtcagcttcagaagcatctttgtgcagagaatcatccttatcataagtttagcactggaaattggaacacacttgaagttaaagcaaaggagaaaggattggacacaaggcttgagcttattaaattttatgattcacactactcagctaacttgatgcaactcgttgtgtatggaaaagatagccttgataacctgcagaaccttgttgaaaataagttttgcgatattagagatgttgggaggaagccattttcatttcctggtcatccatgtacacctgaacatctccaggtccttgtcaaagcagttcccattaaacaagggcacactttgagaatcttatttccaatcactcccaatatccgttgttacaaagaaggcccttgcaagtacattagccatctgattggtcatgaaggagaaggatctcttttttacgtacttaagaagttgggatgggctatgagtttggaagctggtgaaggggattggagtcatgatttttcattcttctgcgttgttattcagctcacagatgtaggccaggaacacatggaggatactctcggactattgttcagatatataaagttgctgcagaactctggaactcctaagtggatatttgatgagcttcaagctatctgtgagacaggattccactaccgagacaagagcccccctatcaattatgttgtaaatatttcttctaacatgcagatttttccaccaaaagattggttgattgcgtcatctgtgccatcaaagttttcaccagatgctattcagaatgttttaaatgaactgactcctgagactgtaagaatattctgggaatcgaaaaagtttgaagggaaaacaaaattagcagagccatggtatggtacatcatattctgtcgaagttgtccctccatcaatcatacagaaatgggtagggaaagcccctgaggaagatctacacctgccaaagcgtaacatcttcattccaagtgatctttcactgagaagtgtagaggaaaaggtaagttttcctgccatgctgaggaagacacaattttcgagactctggtacaagcccgatacaatgtttttcacacccaaggcttatatcaagatggattttcactgtccactatctcaaagctcacctgagtcggcagttcttactgatgtattcacaaggttgcttatggattatttgaatgattatgcttatgacgcccaagttgctggcctctattatgttgttaagccaaatgacactggttttcaggtaactatggttggcttcaatgacaaaatgagaacccttttggagactgttattggaaaaattgcagaatttgaagttaaggctgaccgtttttctgtgataaaggaagctatgacaaaggagtatgagaatttcaagtttcggcagccataccaacaagtcctatattattgttcgctaatactggaggaccaaacatggccatgggatgaggaattttctgcactttctcaccttgaagctagtgatctgggaatttttttgccccatttgctatcaaaaaccttcatcgagtgttattttgcaggtaatattgaacccaatgaagcaaacaatatcgttcaacatgttgaagatgtcttattcaatgcaccaattagtgcttgcaagccactatccccatcgcagcatcttgccaagaggattgtaaagcttgagaagggtttgagatactattatccagcaatgtgctcaaatcaccaagatgaaaattctgctcttctgcactatattcagactcatcaggataatgttaagcaaaatgttctacttcaactacttgctcttgttggcaagcagccagcttttcatcaattgcgatcagttgagcaacttggctacatagcgcttcttaggcaaagaaatgattcaggtgtccgtgggttgcaatttataatccagtcaacggtgaaggatcctgctaatctggatgccagagttgaaaattttctcaacatgtttgaaagcaatgtctacaatatgtctgatgcagagttcaagagtaatgtaagtgctcttattgatatgaaactggagaaatacaaaaacatacgcgaagaatcagctttcttctatggagagatttctgaaggaaccctcaaatttgatagaaaagaagcagaggttgctgcactgagggagctcaagaaggaagagttggtaggcttcttcaatgatcatgtcaaggtcaatgcaccacaaaagaagattcttagtatacaagtgaggtcgaggcctttatatggatcattcaggggaggcgttggtcagatgaagctatagttcaacattttctcatcattctgtaaaattctgaaaaagagtcatctttctgttcaactgcatctacactaaaaaggaaaaaaaaagaaatattcggttaatcaa

SEQ ID NO: 26313 - DNA, 843 bp, Zea Mays
gtcgctgctgccgttccaattgatccatcaatcggtcgattaggaattcaaggaaacacttgcaggactgaagaatagagaaacatgtcgtctggtggtgtgaaagatttttaccggcagaaaaagaaaggaggcgtggcgaagacagcttcatcctcaaagaataagacacggcattacactggtggggcttctgttggtgcctcagatgcagctcagacatcagctctagtttctcatggctcctgggatctcaaagatgactttggtgatgaagaagagcagctgcgacagtttgacgtggacatgaagtttggtccttgcatcggtgttactcggcttcagcgctgggagcgagcctctgccatgggcctccagccaccagctcatctccgggacctcctactgcacgcggcatcgacaaagaatcgcggtggcggtagcccctctgtcgagtgcctttgggagggtaaagtctagaagaaatatcttctaatcccccatcccaggtcaacttcaggtggttaactggagacgcttgttgtaccatgcagcctcttgttgatgtatgttggcactcgtttgtttctccaaggcacgtgttcggtaacagtatatagatggctacctgtgcgtatgttggcgcacttcatgctgaattctcttctcgtattgagatcctgttgcgttgtctgtatctgagtgcgtcaagcacgcacatgaacacatctcctatgtgctgccagttgcattgtgatcgaccgttttgggtgctgcgatttgacgcttatttagcagtcaaatcacgtgggtagcggtccatctacctcacgagtgtttttt

SEQ ID NO: 26314 - DNA, 3832 bp, Zea Mays
cccccctccagcttttcttttgcgcagccaccctctggcttgccgttaatttctttcccgtttcactcctcgcgtttttacacttggcccccaatccaatccccgccaggccgccatgccgacgccggtgcccgccgcgcgccagtgcctctccccgcccgccgtcacggccctcgacgccgccgtcgcctccgcgcgccgacgggcccacgcgcagaccacctcccttcacctcatcgcctcgctcctcgcccccaccgccgcgccgctgctccgcgacgcgctcgcccgcgcccgcagcgccgcctactccccgcgcctccagctcaaggcgctcgacctctgcttcgccgtctccctcgaccgcctcccgtccacccccacctccgcctccacccccacctcacacgagccccccgtcgccaactccctcatggccgccatcaagcgctcgcaggccaaccagcgccggaacccggacacgttccacttctatcaccatcaggcggcgcccacctcccccaacgccatcaaggtcgacctctcccaccttgtcctcgccatcctcgacgacccgctcgtcagccgcgtcttcgccgacgcgggattccgcagcaacgagatcaaggtcgccatcctccgccccgcgccgcccgtcccgctgctcggccgcctccccacgcgcgcgcgcccgccgccgctcttcctctgcagctttgccgccgcggacgacgccgacgtcccctcgcccgcgcccgccctcgcgggggccgcaccgggggaggacaactgccgccgcatcaccgacatcctcgcccgcggacgcaaccccatgctcgtcggcgtcggggccgcctccgcagccgcagatttcgccaaggcgtccccgtaccgcatcgtccccatcggccccgcctctgccaataatcaggcggcaccgacgacgcccacctctggccttatcttcagcatcggtgatctcaaggacctggtgcccgacgaggccgacctgcaggacgcggctcgccgggtggtggcggaggtcacgcgcctgctcgagacgcacagacctgctgcccgccaaacccaaacggtctgggtcatgggctggtccgccacctacgagacctacctcgccttcctttccaagttcccactcgtcgacaaggactgggaactccagctgctgccgatcaccgccgtgcgcgacgccggccctgcagcgggactcgtgcctcctcctccagctccagccaccacggtcgctgccttgtccatgcctgccactacaagcttcgcggagtcatttgttccttttggaggtcttttgtgcgatacctatgaagcaaatagtctcacaacaaatttctgccctcaggctctacgatgtcaacattgcaacgatagatatgagcaagaagttgcctctatcattagaggaagtggcgttacagctgatgctcaccaagaaggtctaccttctctgttgcagaatggcggcatgatgggttctaacaatgagtttgatgcagtcaagtgcaggttagagatgatcaaatggtattgagtacaaaaatattgaatctagagaagaagtggaatgagtactgtgtacgtctccatcaaggttgcaatagaatcaacagagatccttgccagttatttccacatcacattggtgttcgagttgacagggaaagatgtgcaaatccaaaccaaagcgcacagacaattgcacttcagagggatattattaaaccttgtgcattgtcttctccatacaccaatataactgcaaagagtatttcagcaccagaccaaataaatgcagaccttgtactaaaccttcaagtgaggcagtcgaggagtaatgaaccccttcaaagtggggttgtgccattccaacatatcaactcatcaaattataacaaacccgaagaatcatctgctgcacctgtgacaactgatttagtgttggccacccctcgtggatcttccttcaaggattcaagtagtgccctgtgtaaacgtgtagaggacattgaagagacaatccagctgatgcctaacaaggttgacgatctgaatcttaaacctcctcacttgtctatacaaccttacacttgctccaagagttcctcatcaaattgggagcaaacatcacctagtgctctgcattcaacatctttaggaggcacttctgcctttggccaatggcagaggccttcaccgctcgcaacacaaagttttgatttgagcaattacaagctacttatggaacacctgtttaaggttgttgggaggcaggaggaagcattgagtgctatttgtgcatccattgtgcggtgcaggtcgatggagaggcgtcgtggtgcaaacaaaaagaacgacatatggtttagtttttatggccctgacagcattgccaagcggagagttggtgtggcacttgctgagctaatgcatggtagctcagggaacttgatatatctggacctaagcctcaatgattggggtaaccctagtttcagaggaaagcgtgccaccgactgtatctttgaagagctgagaaagaagcggcgatcggttatcttccttgacaatattgacaaagccgattgccttgttcaggagagcctgattcatgcaatggagactggtaggtacaaggacttgcatgggggacgagtgactgatcttaatgactcgattgtggtgttgtctacaagaatgatccaaggatgccaggatgcttctcttggggtggaagagggcaatgctttttcagaagaaaaggctgtggcagctcgtgggcatcaactgaagatcatagttgagccgggcacaaccaacatcggtggaggcaacgttgtagtttcgtcaaggcattccttgggaagcagtgaagcctcaagttattccagtaagcggaagctccacatctctgatgggcaagaaaagacagaagaatcggcaagcacttcaaagcgactgcatagaacatcaagcatcccattcgacttgaacctcccaggcgacgatgaggaagcccatgatgatggtgatgatgacaagagcagtggcagccacgaaaactatctagagggatctgtcggaaacctcttgcgttgggtggatggttcaatcaatttcaagccatttgactttggcaagctttgtgaggacatcctgcaggagttcagcaatactaccagcaaaattctgggcaccagggggtgcaggctggagatcgacgctggggctatggagcaggtagtggcagcggcatgggcatccgattcgcatgagaatgagaagaggcctgtgcggacgtgggtggagcaggtgtttggcaggagccttgagcaggtcaagatgaggtgtgagaatctgagcagctgtaccctgagactggtttcctgtgaggtgaaagaagatggttttggagctttgcttccctcgagaataattctggattggtgatggtgatatgtgtcgtttgcattattgctgctagctatctagctgtaagtattggttagttagctgacaccacccaccgtactgtagcatatataggttcatatcattatttggtggcttcaaaataatgtaattaagctggagtatgtacgtacggtagtctagcaattaaactactcgttcaagtccatgacctggggatggatggctgtatttattgttgctcctgcgtgtatatatatatttgtaagaccgacgtgatggccttttcatgtggaattccatatactgatgtcatttaactgtctgtgcaagacaattgcataattcacaagtatggaaagcaaaa

SEQ ID NO: 26315 - DNA, 420 bp, Zea Mays
ctgagccctgaattgagtttatctccaacaggagaggggactggagcgagagcagcatcaatggtggcgagaagcggaggaagagggggcaggcgagcaggctggccaaggcgagttcctcctcgtcggcgtcagtggcgtcctcctccacgtcatgggcgagtggctccactgtcatggaatgggacatcgacgaggttgcccagctgcagagcagcgacggcttctccctcctcgtctgttagaacccaaagctggtggcggatgatcaacgatggcgagaagaaacgacagcggtggctctgcgtggtgactgcggcgagggtttgttcgtgagcgacagaacagagagactcacttttggcctgtgattattgccgtagtttttctgtgtgcatttaacagcaataaataactgca

SEQ ID NO: 26316 - DNA, 3300 bp, Zea Mays
atggatcgcgccacgccgcgcgtttgcggccgccgcggcgtatcccaagcggcggtggaagctgcgccgtcctcctcccgcgcgcgccgccgcgataaggcgccggccgttgtcatggaccttggcgacgacgactgcggcggtggcggggccaggaagacggttggtggcgctgcaggtaggtgcgagggatccacgaaggctcctttgcctctgctgccgccgatgatggtgccggcgggagcggtggcgctgcggacacgatcgaggaggcgggcgatgctggcggcggcagtggtggaagaggcgccaacgaagaagaagaagaaggaaggagcgatcccagatgccgcggaggcgccccgtggccacgggagcaaggccgctgctacctcgatggcgacgtcgagccataagcggcgcgctgggacctcgaggtcgacgtcgagagataagcggcgcgcgcgctcgggacgtgcctcggagccagctcgcgtgggccgcgcgcgcaagcgcaaaaggaacgagttggaggcccccgctcggagagaacgtgtgaaggcgccatgtgtcagtgaaagtgatgacaacagcgggcgaggcgatgacgcttctcatgacggggatgcggagcctcgcgtcggggtcgccattggcactgatctggttaacggggatcatccggcagctaaagaggtagtggaaggtgctggtgacgaggacacaggggacggagggaacagtggcctggcatcgactgctgatgtgtttgctgaggagatggcaccctttgaagatgactacgatgatgagatgttggaggagcagcttgttggagatgtgattcgtgcttacagtaatggcagaaacttcgattcagatggagtggattgggaggcagaggatgagatggagttcaatgacgatgctgacaatagtgattttatggatgatgctgacgatagtgattttatggatgatgcttatgaaggtggcaattccaaaccaattcaaaatcatgctaagttggaaatacaagactgggtgaaccagaaagttgttttgagtggagggaggtgtgaggcgaggggcgagggggatctggaggaagaattggatgtgggaaaggaagcagatgaggaggacgtggaaccaaagagtgaagcggctccaggttctgataaaagggtcttgcagttagaaatcctaggttccgatgaggaaatcaaggtgcttgaaaatatgagtagtgccccatccaggaaggcgtcagttcaatcgaagttaccaactattccatcttgtgttgcatggagaacccgatcatcatggggggtaaatcaagatagactatcgtacgatacatattttgaggaattatctgatgagccaaaagaggatgatgatgatacagaggtggaacttgatgaagttgaggatgacaacaatgacgatgacagtagtgatgcttatgataaagatgacgaagagaaggaggaagaggaagaagaggctgaaagaagaaaacttaataacaggatttgcacatccgatgaagacatgatcaatattactgttcctacatcaagatatgatatgtttaagaaaaaaaattcctcaagatatgatattgagtgggtggaggatgaagatgcaagtgttgatatgttacagccagtttcctttaagaaagatagcagctggaagcctgtggctgttggcaacgacacatttactgagcaacaaaagcgatcacgatttacttgggagcttgagaggaggaaaaagcttaagcttgagatgaagacaaatcctttgcatgagcgggatttggactcagatccgaactcatcaggttctgaccagatcagaaagtatggtttcaaaagtgatgggagtcataaagttgataggaaaaagaagcatacatcgcccaaatcgggcaagaaacccagcagcgcaatcatactaaagcggcagtctcttttgaagcttttggtagataaaatgagtggtgataaaagtttagcatcttttccatttgatcagaatcctcagcttcagtttattttcaaagaaatgcatccattggtattttcatttggagatgaagatctagtagcagctgacaggccagagcaagatgttggattggatatgttatgggctgactttgactttgctttagagtctgagaatatcggtacttattatgatgatgagtgtcaagaaggcaatcaactagatttttctcttgccccagtaacaccctgttctcgtgggaagcatgaatttgttattgatgatcaaatagggatcagatgcaaatactgttccttggtaaacctggagatcaaattcatgtttccatcactgtgtttgccgagaaatcagcatggccaaatgacaaaggcgtgaaaaatacactgatgtttcatgatctttatgaacaaggagtcaatgacactgaacaatctcaagatattcatcaatatggaacggtgtggaatcttattccaggggtcatcagtactatgtatgagcatcagcgtgaagcatttgaatttatgtggacaaatttagttggtgatattagacttgatgagataaagcatggagcaaaacctgatgttgttggtggatgtgttatctgtcatgctcctggaacaggaaagacacgattagctattgtgtttatccagacatacatgaaggtgtttccagactgtcggccagtgattattgcaccacgtggtatgctctttgcttgggatgaggaatttaagaaatggaatgttgatgttccttttcatatactaaacacaactgattacactggaaaagaggatcgggagatatgcaagttaataaagaaagaacataggacagaaaagttgacaagactagtcaaactgctttcatggaacaaaggtcatggtattcttggaataagttatggtctgtacacaaaactgacctctgaaaaacctggctgcacagaagaaaacaaagctaggcatgcgtgggaggaccctgcaggcttcattttctttattattgtctaccgcacaatgaatctgcaattttgtatcttgggaaggactaaaagcagaagttaataatgggtggcagagccacaatgtacatggtggttcacaaggttgtgggcattacgatgcccatacctatatccaaatgtcatgtctaataataaaactattggacctttttggcggttcaattttatttacataaaagacagcctcaattcgaatacataggctctgccccctttcagca

SEQ ID NO: 26317 - DNA, 1455 bp, Zea Mays
atggagtcggccaatgaagagcggaaggaggagagggtcaacgggggctcaatagctggttggtgtagatgttgctggtttgagaatagtggcggcaagatctcatggagagaagctatgcggactcccagaaaaggcgaaatcatcgtgcgattgtggagattgtcgatgggaggctccaccagcgctagggtgcggccaacaagacgctgctcgccaccgcttgagtcggtagtgagatcttagggggagaagccctgcagcccccatgctcccactccctcctgcaccccacgcttaccggcgagccgctcgacctcattggagcttgccaagccgtcatgtgccccagtgcggtggtcgacatcatccacggcgtcgaccgcgtgctggtcctgcgctcaatgcaggagtccttcaactggcggcggtggagcaaccgtactaccacagcgcgtacacaggacgcagagaacaactccagaaggcgagccccaacccctagatctgcgatgcagtcttctcaactgaaaaaagagggcagagaacaactccagaaggcgagccccaaccccagatctgcgttgtagtcttctcgactgaaaaaagagggcatctctaccgccaccaaccactagcaggcggcagacgttgctggcaataggcaatggcatgcatcaggcattgtttgcacaaaggacggagatctgtcgtcgaagaccacctcattgtttctcatggcaggcttgcttgctctagcttggcacaatatgtcgcttcaggcttcagtcggttatgtgatcaccagaacattatgggctctaaagtaggacttttgagaaatgccaggcgatggtgcatgcatgatgaagctgttgtccattatattgacatgattgatcagaccacgcttggtcaccggatgatcaagaaacaattcaacaagactccaagagctggctggcaaatcgatccttttggacattctgcagttcaagcttatttgcttggagcagaggatgacatactgatgtttgactataatgttgaagaacgagttaatgattttgttgttgtagccatagaacaggatggccaagtgcatgcactgtattctaccccatccatttacacagatgcaaaacatttgtcaaatgtatcttggccagtaaaatatgatgagtatttcccctatgctgattcaaaaaattcatattggactgggtactatacaagccgtccaactttcaagcgatatgttcgagtgttgagtggttattacctggctgcacgtcaaatagaatttttagtaggtaggaggagttccttagggttgttcacgaccagcttggaagacccaatggcaattgcccagcatcatgatgcagtctcaggtacaacaaacaacacacgacagatgactacttgaaacaccttgctcttggagcatctaag

SEQ ID NO: 26318 - DNA, 1422 bp, Zea Mays
atacagatccacatacaaaagcagatacagcagttaaacatgtgcagtgggatgcttcaaaagttaggaataaactgcaagagcatatacaagctcatgtagaatgtattaggaacgcaaaattggctgaactgagagctaactttgagaagaagctgtcagacgcaatttctgggcctgtacaatccatactggaaactggcgagagagactcctgggcatgcattaggagactatataggcgtgagattgaaaatgctgctctttcattctcagcttccctttctgagtttgacctagaccaaacaatttccaataagatggtctcagatttgagggaatatgcaagaagtgtagtagaaactaaagctagagaagaagctggaaatgttctgatgcgcatgaaagaaaggtttttcactgtgttgagccatgataaggactcgatgccaaggtcatggatgcgagatgaggatatccgtacaatcactagagaagcacgcttaggggctttaagacttatgtctgtaatggcagctattcggttagatgataatccagacaaaatagaacgagctctgactactgctcttttagatgggggccccctttctcacaagaggagtatagaatttgcttctgatcctcttgcttcaagcacgtgggaagaggtttcaccaaaggatacactgattacgccagtgcagtgtaaatccatctggaggcaattcaaagcagagacagagtattctgttgcgcaagcaatgtctatgcaggaagcacaaaggcgtagcaagaactggttgccacctgcatggactattctgcttctggcaatactaggctacaacgaatttatgtttcttcttaggaatccattgtaccttctggggctctttgttgcctttgtgttatcatatgccatatggatgcaatatgacatcactgcttattttcgtcatggcacgctatctgctcttcttacgattttatcaagactgctcccaacaatcatagacattatgatgcaaataattaatatgaagcacaagcacaagtccccacatccatctcgtcatccccaacatatccatgctcagagcttcatgaaccagacgtggggacgggcccaagtgcggtaccagtctcctgactcgccatcctcatcttcctccgtgggctcgaacagtggtgatgactcttgaagctgtgcatagaacatagaacttccatgtggatgtcccagtacttagataggtagccttcaggttccggggtttcttggtaactaggaaccattgtcgtgtcatcgtgtgcttcaaactttgatgtgtaaatgtataatgtaagattaaaaccataacttttacgtaccccagttacgaatttgaagcaggacgaccccgaaatcgtaagcctagc

SEQ ID NO: 26319 - DNA, 4768 bp, Zea Mays
cacgccggccccacaagacccaagctgcaaaactatccagccaccattcacccctccgcactccgcctccgccgcctccctgccctcaactccacgcccggcagggtggccgctcgccggcagccaaaccctaggcgatcgcggaggccaaccacgcttcgggcgcgatcagccgccgccatgcagggcttccccggcggcgcccccgatccgcagcagctacaggccaccatgctcgccatcgagcaggcctgctccctcatccagctgcacatgaatccatctgaagcggaaaaagtgataacttcgctgcattcgtctctcatgccttatcaagtatgcagattcattcttgagacatcccaaaaaccaaatgcaagattccaagctgctggtgcaattggtgatgctgcggtaagggagtggggagttcttacagatgacaataaaaggagcctaataatatattgtttaaactatgttatggagcatgcaagttctcctgatggctatgtgcaatcgaaagtttccgctgtggcagctagattactgaaaagaggctgggttgagttttcggaccaagaaaaagcagctatcttctttgaggttgagcaatctatccggggcatccatgggcctaatcgacagtttgctgcaatcaatttcttggaaaccttggtttcagaattctccccttcaactgcttctgctatgagcctgcctaaggaatttcacgaacaatgtgaatactcactcgaagtgcagtttttgaaggatttttactgctgggcacaagctgctgtgttcaatactgctgacaaaatcttgaattcaactgtaacaataccggacgaaagagcatgttcagcagcattgcgcctgatgtttcagatactaagttggaatttcaaacatactgtggagcacgagagttcagatgctaagataaatttcggcttaaggattgatacgataaatctgaagaagtttgaacgttcgttggtgaagccagggtctatgtggagagagattctaatatcaagtggacaccctacctgggttttaaacttctataccaccttgcgccaaaagtactcatatgatacactgtggggtgattctccaattgctgtctcttgcagacagcttatagtgcagttatgctccttggcaggctctgtgtttcctaatgataatggggatgcacagattaaacaccttatgctgatattatctgctgttgttctatggattgaacctcctgatgtaatcacagcatcaatccgaaatgggggaagtgaaagtgagttcatagatggttgccatgccttgctttcaatcgcatctttaactactggctcactttttgacaacctcctaaaatctataaggccctatggtacagttaatctgctttctgctttgacgtcagaagctgtcaagtcggttctgaataaccagagtgaagaggaaacctggggcatagattcccttgatattttgttagaaacatggaatgttcttttgggggacgtagatgccgataaaaatccaatctcaaccgatggagcacttgcatcttcaagtttgtttaagatgattgtggagtcacacttgaagggtataaatctctttatattcccatttaaatgtaacctcagtcttgaagaatgttacagatggtgtaaaagattttctatgttgtttacattctgcatactgattactcttattttctttgacatagctgctgctgattctgcgttcgaggatactgatgatactgaatattttcatgtttctgtttcaaaacgtgatgaacagttagccttgtatgctctaatagcacgggcttctgcaaatactactattccatttcttgcacagttgttttcagaacgatttgcccggctaaatcagagaaatggtgaaagtgatcctactcaaacactggaagagctctattggctgttgttggttactagtcatgtcctaactgactctggcgaaggagaaacactacttatccctgaagcattacaggctggattccctaatgtgattgaagcagcacatcatcctgttgttacactctcctggtctataataaatttttccaggcagtgtttagatccaggaattagggcaaaatacttcagtccacgactaatggaggctgtgatctggttcttggccagatgggttgcaacctatttagtgccacttgacgtgagtagaggaaaagtaagcagagaaattgataatgtgggtacaaatggatcccaacattccagaaaactgctaaacagttttgcttgggaaaataaccaaggagagcttgttcttgattttgttgttctcatttcaatgttagctcttactacctatcagggagaaaatgagttgcaggtaagcttcatttttactttttaatcatgatggaattgtgcagagtgcccagacatgtttgccccagttcaatttgcagtgcctaatgcaaaaatgctcgagtaaaacatcttgatcttttgatttcattatctctttgatgtgactttagccttatcattccatcacactgtgcgattgatccaaaataccaaatactgcataacttgaccaaacattaacaatgccatcaactttcaagatttctcattagagtgttttcactagcgttagacaagataaaagtttccaatgtcccttatatgttgttttgattcctgttcacagacactgacatgccagaagctacttgctacagtcgttcgccggaaacacacatgcacttatcttgttcaactggattcatggcgtgatcttacaagagcttttgcaagtggacggtctttgctttcattgagtggacgtttacaagtgataggtctctagcagaaacacttgcctctgcagcttcctgcatcaaagatcctgaagcatctgcacagtacctgagggatctcatgggaccagtggcagggtgcctggtagaaaatgctagcaggagtgatctaaaatctgtggcacagcaagcagatgttatttacatggtctgttgcctattggaacgactaagaggcgctgctagagctactcaaccccgaactcaaaaagttctatttgagatggctcatactgtgatgaacccacttttgactcttctggaggtctacaaaaatcattccacagtcgtatacatgatactcaagtttgtggtggactttgttgatggtcaagctgtattcctggatgctaaagagacatcagctttggtgagcttttgcttgcaactactccagatatactcctctcataacattgggaaggtaatgctctctctttcttcaagtctgcgtaatgagtcacaagcagaaaaatataaggatctgcgagctttgcttcgtcttctgacaaatatatgttcgaaggatttggttggctttctgtctgattgtggcggtgaaggttcacctgatatcgcagaggttatctacattggtcttgatattgtgacccccttgatatctttggatcttctgaaataccctaaacttagtcgtgattattttgtgcttatatcgcacttgttggaactgtacccggaaaaggttgctcacttaaatagtgatgcttttacaaggattattggaagtcttgacttcgggctccgtaatcaggatagcgatgttgttgagaggtgcctggcagcagtaaatgctcttgcttcatacaatttcaaagaaagattaggagggagaggaagactgaactcgcagctcatggaatctgaaggatctaatggcaaactgcaggaaagcatatcaagtcacttcttgagacttctgttgcaaatacttctttttgaagatttcagatcggagttagcaggttatgctgccgatgctttgcttcctttattgttctgtgaacaggagctatatcagaggttggtccatgagttgttggataaacagcagaatccgaccgtaaaatcaaggctggcaactgcgttccataaccttacaagttcaaacaatctctcaagctcactcgaccggccaaacaggcagagattcaggaaaaacctccttagcttcatggcggatgtatcgggcttcatgcagatcaagtagatgcgatggcagggaacaggtgatgtttgaccggtcaattaaaccccgaggaagcactgcaccactgtggtaggggtgcatgtgggcaccacatgtctgtggattgatgagagcgaagactgccacgacaagtctagtagatcttgaagagctagtgtcaccagaaaagacagggagatgagctagtcttagggttggcattcatagcgcatttgctggacaagatggaggcgtccctggccacgagatcgtcgtgtaaatgcgtttgttagacgcacagaaacggtggggattttgtggtggcgactcgttttgttcaattcccacaggcagaaggtagagatgttaagttgatgtaaataccgtttgatttaaacatgccttattcgtaggagaaagcgacacggcttgctgtaacttagggtttattactctttctcgtggcataggatccccaaagaagtctttgctggggtatttgcagccaaacgatgaccagtatgattgcgagaggttttcaatcttttgtaccaaatttggcctgcagttatgatgacactgagtgccgatacaggcatgaggcattccaaaattggcgggcaccacatgtgtctgtctgctgtctcagtggg

SEQ ID NO: 26320 - DNA, 4551 bp, Zea Mays
gcctgaaccagccatttctctctcttgtctagtacttcctgccactgctagtagcacagtactacctctctctctcatcagtcaaatcaatcagagtcggaatcgagttgtgtagttggaaacgaaaaagaaacaacaagacaagcatctgctgcctcgtctcctcgggctccggccggcgacccgccctcgcccgtcgcccccgccgaggaagcatcgcatcgtacagcagcagtacatgcgacctagagagagagaaagaggaagcagttaatggtcgagaggggccacaacctccagccgttgcagttcttgcgttgagttggattgggttgccaagccccgccaaataaaacaaaagggcttcctgtaatcctgcgctgcaccgatggtgatagcgtcgggagccgttgacaggggccacctgtccccgattgctcccctgtcagagtcgccgtcgtcctcatcattcttctcccaggatctcgtccccactgagaggcaagttggattctggaaatcgtcagagtcaatggtcgatcacaaagggagcaagcctattttcacttctccactcgataaggcccatcccataggctcaagtcctgcaggtggtctggaacatcaacgaggtcaagccttcaaggggaagctgggcatgcttaaccttggtaatttggtggaccaacaagaaaatgctcctggcataccttcgatttcttggggtgatgtcctcagtacctccaggtccagtcttggcttgtctacaggagggacggcttttgttgaaccacccagtgctgatcaacatgtgcaagactatggagactgcttttcatccagctccttcactgaagtcttcggtagaaaatcagcaagattgatggcaagtggcgtttatggccaatcagctggtgcaaatgattccggttatgacggagatgaacctctagggtccatgaaagaaatggaagctcaaactattggtgatctccttcctgatgacgatgacctgatgtcgggaattattgatggctttgaatacaccggcttgtctaaccaggatgatgccgatgaagatatattctacactggaggaggtttggagctagagcatgatgattccaacaacgtcgacaaatttcgtgatgtgtccttcaagattcaactttctgagaagcactctatcgataaacaccattccagagctcttattgtaaaaaatattaatccaggcatcgagggttctgatttaagggctctgtttcagcaatatggggacgtacagacattcgacacatcctgcaagagccatggaattgttacagtgtcttactatgacattagagctgcacaggacgcagtgagagcagtccataacaaacctctggggctgatgaaacttgatgttcaattttcccttcctaaggaaaatgttccaaacaaagatcccaacaatggaacactggtggtatctcttattgactcttccatctccagccatgatcttctccaaaaatttagtgtttatggcgatgtcaaggagatttacaagtctcctacaagctgcaataagaaatttgtagaattctatgatatcagagcagcacaagaagcactgaatgacctcaacaagggtgaaatatcatgctcacaaatcaaagttgagcatagcttttctggaggagcaggatcttgcttcgcagagcaatattcaggagaacagaagcaaaatgccgtagctcaccaacttaagaactctccacctgggaccattgggaagttagatactaagagttgggacagcagcactgttcataatttatattctccagttagaccgcaacacgataaatcacaacatggcttctctgtgaatcctcctcagaagttgtcatcgcctatcagaattgaatctacacagcagcatagtaatcaaactgcttttggtgaacatagtggatctcttggtcatggcaactttggaggtgggctgcaagccttccacccgcactcactgccagagtgtcacaatggtatttgcaatggctataactccatgacattaaatgcaaggaattctaacttcagatttactgaaggaatagactacaataatcacaaagttgaccacagtgaccttcatggtcattcctctgatcaaaatgaagcaattagagttgctggaattggaagttgcccccttcatggacatcactatacctggagtaactcaaatggttttcctcaaagcccctctgctccaatgatgtggcctaactttcagcaaccagtgcatatgcattgctaccctgctatgcctcctcacatccggcgcagtgctgcccatcctatggaccaacatcacttgggttcagctccaaacagtgttggtggttttgcaaatgcacactcttttcatccaggatcccttgaaagcgtagggtttcctggcagccctcagctgtatccatcagatctctctgtatttgcatctgccagaggaaattacagggagaccatgttctctgccataagtgccgggtttccatcaattcagcaaattcttcatgcgaccaacggaaggaatcctatgatgcacgtctccacctcatatgacgccactaatgatcgcataaggagccgcaggcatgatggaaatgctgcccagtctgaaaacaagaagcagtttgagctggaccttgaccgcatagctaagggtgaagactcgcgcaccacactgatgataaaaaacattcctaacaagtacaccagtaagctgcttttggctgtcattgatgagaatcaccgaggaacttatgatttcatctaccttccaattgattttaagaataaatgtaacgtgggatatgcattcatcaatatgacggatccacagcagatagttccattttacaagacattcaacggcaagaaatgggagaagttcaatagtgagaaagtggcatcacttgcgtacgccagaatccagggaaggaacgctttgattgctcatttccagaattctagcctgatgaatgaagagaaatggtgccgccctatgcttttccacaaagatggcccgaacgcaggagaccaggaaccattccctgtgggtaacaatgttcgttctcggtccgggaggaacagaccacttagcagtggttcggagactaccaaagaggcaagtccatcaacctctcctaactgaagagaagccggctcccgatattccaactcaggacaggcaggcggtatttgctcactaactggaggctgaagggcatgtaataaatcatccccagttttgctgcttctttttcttttggtcctcgtcagcaaggtgacctgacttgctgagtgtgactagctaacgagaattctgcactgcatgagcctgctgaagattcaccttaaagtaactatgccttggttttgccataccattgacgtcaacggctacaggtaatggagaagacctggagtggtagagggaggtgtgtttcaggcgggtgaaaattcaagttgtacagttgaactcaccaggattggaaaatggtcatcaattcaaatttgagttgtttttcttagggttcttcttgctatgtttgatctcgtttatgtgcgtgtcatgtgtccacggtgtgagcccaaatgtttgaatgccttgtctttgtgcaatttctctcaaacctcagattctggtgtgctggttcattccatgtcctcttttgtttttcaaattcaagatttattacatcataaacatgttacaaagatggggggtcatgttgccccgaacaatccaagtttcaaaacacatgctagatattacaggttggagaatgaagcccctagagaaaaggcatggatttggggtagttgcccgtcttgctttttttttgcaagaacatcagctatcttgtttctctctaggaacctgttgtgccaaaatcatggcgtaagccaacacctggctgccagttaacaaaattgcatctcgcagatcgagtgcagcagctaccttgaaattaaataggaattgcatcctggaagaaagaagcatggggaatacctgtagcaggtcggtctcccccaaaccaaaagaaatggctgcaacactgcgcacagcaaaggttccacacccaaaaaagagggcgcccagcacccactaccttcagcatgctctgccacggcttctggtcctcctcgctggactgtcatcagctcccgtggcattcacactgctccgagtcaccctgcggccgctgctcacagcagggctgccgttgccgtcatcatgcatatcaccactcttcctggtccgtttcataggagtgacgcacacatcaacctcttccactgcagcactgctcttcaccctcttgccaccagtctcagcatcagccttgtgcttcgtctgtttcgcagcagcatcttcatcagccgtgcgcttcttcggctgtttcgcagcagcatcttcaactaacacatccaccacttcagccgcgcccatctttgactttttatcatcttttgcaccctccattt

SEQ ID NO: 26321 - DNA, 1240 bp, Zea Mays
ccttccctggcgcgcgagtgacgagcgtgcgcagaagctagccaagcgatgccgctcctcttccccgccacgccgccgctaccgctgtgccgcgccgcgcgcgtctcacgccgcgccacggcctccgtggcgtccgcggccaggagctcgtcgtcgtcctcggcctcgttcgacgcggccgccttcgaggccgagcggctgcgcctggacgccgcggcgcgggccgggatggagtccaccgccgcggcagcggaggccggcccgcgggcctggaagtgggcgatacggaagcgggtgtgggacgcgctcgaggctgagggcatcgcgcgggacccgcgccccgtccaccaccgcatccccaacttcgacggcgcccccgccgccgcagacgcgttggggaggcttgacatatttcagaagtcccattgtgtaaaggtcaatcctgacacacctcagaagcaagttcggttcttaacattgtcagctaaatatgggaggccaattggtttagatgaaagccttaaggtggatttgattgtgattgggtcagtggcagttgatccaagttcaggagcacggttagggaagggagagggatttgcagagctggaatatggaatgcttcgctatatgggagctatagatgattcaaccatgatagtaactactgtgcatgacaagcagttagttgatgacattccagtggagaagctgctagttcatgatgtgccagttgacattatctgcacccctactcaggtcatcttcacgaagactacgatcccaaagccacaagggatttactgggaaaagttatctccagaaaaattgggccaaatccgaattctaagagagctgaagcaacgtatagagcaagagacaggaactatgcttccttgtggaccttcggagaagctaccgccaacagctcagagaaagcagaggtggcagcggcgacgatgagacttttgtatgcttctcttaactgtttcttttactcaataaagagctatgtgcacccttttctttcttagggcaaatcaaggtcacaattcaaaactgctagcattagactataggaacattaccagatgtaatagaaatgccaaaaaaaactttgtttgcacttaagaggcaatgaggatagatagtatagctctttccacacatatttaatttctttgcaagtatgaagttccatttggaaagtggtacttaaaatttgtatcttggatgtagc

SEQ ID NO: 26322 - DNA, 1377 bp, Zea Mays
aggcccagcacgcgtcctgagggccgcgccgtccagtcctcgccaattcccattccggttccggcttccgccgccagcggcagcaatcccctcctcctcctccctgtccctggacgccggcgccggcgtcggctcctcatcgtccgcgggtaaggagactgaagtggtgaacgcggaagaaggttgtcattttgctaagttaaagttagatcattggagcaatgccgccccataagatcgagacggggcaccaagatgtggtgcatgatgtcgccatggattactatggcaagcgcctagctacatcctcctctgataatacaataaagatcattggcctacgacggccgagtgatcatctggaaggaaggaagcaagcctgatgaatgggcactggtacacacctttgctgagcacaagtcctccgtgaattccatcgcgtgggcgcctcatgagctgggtctatgcttggcttgtggttcatcagatgggaacatttcagtcttcactgctcgttctgatggaggttgggataccacgcgtattgatcaggcgcatccggttggtgtgacctcagtttcttgggctcctgcaatggcaccgggagctctaatcagcgcggggtcttctggtcagtttgagtatgttcagaaactcgcttccggtggctgtgacaacacggtgaaggtgtggaagctcaacaacggcagttggcggatggactgtttccccgccctacagatgcacaaggactgggtgagagacgtcgcgtgggcgccaaacctgggccttccaaagtccaccatcgccagcgcctctcaggatggaacagttgttatctggacagcagcaaaagaaggcgagcagtgggaaggccggttgctgtatgatttcaggacccctgtgtggaggctgtcgtggtcactgactgggaatatactggcggtgtctgacggcaacaacaatgtgaccctgtggaaggaagctgtggacggcgaatggcagcaagtgacgactgttgagccataggtctctagagttgtccctcgtctatattgccttaatacttgtagtttttgtgtacctatggccctgtgtgggtagcaagcaggccacggtgcatgactacttgagacgtgatttcaggctcgggcagaagtgaaaaatgaacttgttgtatatgtggagcattctgtttctcgattcagtgccttttctttcccatggttaattcgttgctcactcaggtgttcatatatcagttattctgttcaggataatggttaattggatatatttggtgctctaatgcaagctttgcacttgtagcgcaaagttttttccggtgaaagttgaaactgtggccagacagaagat

SEQ ID NO: 26323 - DNA, 1686 bp, Zea Mays
acccttagggccaccaattcacatccctaaacttctggtgaagtaccttagtgcaaaacatgtttttgctctaagaagaccattactacacacagttttggattatgaagacgatttttttgctttgttaatgggtgtccttgagtcccatagcctacggacaacagatggttccttttcagagtcattatatggtctcaggaggagacctgttaaggttgcagtgaagagaaagagtcctggtacagaatccaatgacaaagtctatggttctgctctaaggaagcgccagaaaatcctttcagttgtttttttggttgttttgccatattttaagtcaaagttgcagtctatatataacaaagaaagggaagccaggttgcaggcaaccctttggggtcaggatgatgttagatttgatgaagttgactttgtattagatcaggagcagacttctcaagcacagactgaacctacaactggagaaatgtcaaatttgacacgttttaaaaagaattttgcctcacttataggtgtttgctatccatggattcatgcaactaatgaaggtctctcgtttgcataccagctcttgtatctgttggatgcaactgcattttatagtccagcactacatgtacttgggattcatgtttgtcgtgctactggacaagagctgatggattcatcttctaggatatcaaggattagaagtcgtgaacttgagaggcttcgcggtcctccatggttcaaggctgtgcaacgagtgttccttagttgtgtgtacacaactctagattatgcacaaaccggtttaattgctgcagtcttctttttcaagatgatggagtggtggtatcaatctgctgaagaaagaatgtcagctccgactgtatatccaccaccccctcctcctccaactcctaaggttgccaaagacgggattccgttgccacctgacaggacgctctgccccctgtgctgccagaagcgtgctaacccctccgttctttctgtttctggttttgttttttgctacagctgcatattcaaatctgtctcacagcataaaaggtgccctgtcacgctaatgcctgccggcgttgagcaaatcaggcgtctcttccacgatttgtagccatggaagacccgaaaacttcttttctaaagaccagggacgtcagcaactcagcatacagaaacatatatcagaaccaccattttgtaaactataagaaactcagcatacttttttaagcaaatgcatggatggcactttcttcccgatttcctttgtacggttattcttcgtccattggaaattgcacaggaaaagcaagctggagtttgagcttgacagtcttaggttgggggtgtataatctgttgttaggtgatactagcatatccattgagataggctgttgttaggtgatactagcatatccattgagataggcgttaattgtgtacctgcatgactgtatccactctcttcatttgtttgtaaaaaaaactgtctgtaattttggattggtcctgctcgacgtcacttatattggctgtttggagtaatctctcagattatgggcatgtttggtttgtggctaaatgtgtcacactttgcctaaggttagtcgttcgaattgaataactaatcttaggcagaaaagttaggcaaagtgtg

SEQ ID NO: 26324 - DNA, 2185 bp, Zea Mays
gcccagcctccactctccagtccggttttcagttggtagccacgcgcacggggacggggttctccctttgctgtcgcccccgcctccgattccgcgatgataacccaccatccctccctgatccgcccatctgtcctcaccctccgtgccgacgtcctccgtcggcgcccaacactgcacgccgtcgcctccgcgccgcctccccgattgtggtctttgcgcgccaccaccggtggaacttcgcccgtcagtggcgatggaggcaaacgcgctgtgccgcttcccacgcgtgggcccgccctgctcggcttcgtgcgtagcaacttcctcccgcttgctctcattggtgggatcatattgggtcttctagatcctactcttggatgccttgcacacaaatactccctgtcaaagtacagcacttttgggatattcgttatctcaggactgaccctgcgcactagggagcttggtgcagcgttagaagcttggcctgctggactatatggactaggatctattttgctgtttacaccctttcttgctcagtttattatgcaagttcagttcttcccccctgaatttatcactgggttagctatgttttgctgcatgccaacaacactatcaagtggagtcacactaacacagcttgttggtggtaactctgcacttgctcttgcaatgacagttgcatccaatttacttggcattataattgtacctctttctcttgcaaaatacattagcaatggtgttggggtttccttgcctactgagcaattattcaaaagtcttgtcaccagccttctaatccctcttattatagggaaggtatgtggttattcatatctttgtactccatgccataccttactatttcatttcaatacaataatactgcacccattatgttcagatctcctttcagtttaatctttggatgtaaaaacaacagggcttattctgaatctcatgtaactacctttcatggggcctgtttgtttcggcttctggcagcttctggtcaccaaaagctgctgcggactgccaaacgctcagcttttaagacagcttctataaaattcgttggggcaaaaaccatccaaaatcaacataaacacataatcagttgagtcattgtgatagtaggaatccgtcactttctagatcctgagccctatgaacaactttatcttcctccacacgtaatcgtaatgatactcagattctcctcacagccagattctccccacagctagattttcagaaaagctgatcagaaaaaagctgaaccaaacaggcctatgatcaactgataagcatgatttgtttgtcgaatgtttaggagcacaatttaggcaagtattcatttcttttagtagattatcagccatgaaccacctaactacaatatatataaataaaaaactcgacctgtggggctaagacaccccccatgacattatattaagaaacacagatcgagaaaccccctcgaacccctgtcccacccagacacagcggcaccgtagcctgaccgaggccggaccttggacctgtgctttggtgtgggacagatgagaggacttttttaaccacaactaaaattcgctctcacggaaagtcgaacccaggacctaaggagtgctactcggaccacctaatcaactcaactagatgccctttcacatctgactacaatatgcaaagtataatttgaactcctctaccctaagtgcttataatgttctgtttattttgaatttagtccctctgtttcttaaacaagaaataattaaattcaccatatatcccccatgttttccttaaagactatagtgccatcttgaaatatctgaagcttcctggagacacttatgatggcttgttctttgtcaggttgctcgagaaacctcaaaaggtattgctgattttgttgatggaaatcgacaaggcttttcagttgcaagtgctgttctcctcagcctagtatgtctctaatttgaacatatgccagttgacatgttatttacttgctctgtagctcccttgatttgtccttcagcatgtcatgcttttgggtccatatatatagtgcttcactgcttccagcccaattacccatcccttttggcgaagcgggtacaagagggaaactgatgcatgcataaacctatcctga

SEQ ID NO: 26325 - DNA, 1606 bp, Zea Mays
aacaaacacgaaacgcaggtccgaatccaaatctagcggcacgcttaacgtcgcgatcccgcggactccacccacgcccgcggcggcagcgcggatcccgcctagggctcgcgtgtcggtcgctccggcgctaactagtaactaccccctcgcggcgacgggaggtcggtagcggcgatcgcgctagcggagccgcttcttcgccctcgacgccgccggcctcgatcaggccccgccgacggaatggcatccaaagtccgctttacagtgggttctcaagtttgggttgaggatgctgaggtggcttggattgatgggttggtggaggaggtacaaggagatgaattaattataaactgcacttctgggaagaaggttactgcaaatgtctcaagtgtgtatcctaaggatgcagaagcgaagcgctgtggcgttgaggatatgacgaggctagcttatcttaatgaaccaggagttttacagaacttaaagtctagatatggaatgaatgaaatatatacttatactggcaacattttaatagctgttaatccatttcaaagacttccccacctttataacaatcacatgatgggaatctataaaggcgcagaatttggcgagctgagcccccatcctttcgctattgcagatcatgcatataggcttatgatgaattgtggaaaaagtcaagccatattagtgagtggcgaaagtggagctggtaagacagaaagcactaaaagccttatgcagtatcttgcatttatgggtggtaaagctcaatctgggggaaggtcagtgcaacaacaagtactggagtcaaatcctgttcttgaggcatttggaaatgcaaaaacagtcaggaataataattcaagtcgttttggaaaatttgttgagattcagtttgacaagaatgggaagatctcaggagctgccataaggacttacctcttagaaaggtctcgtgtctgccaaatatctgatccagaaaggaactatcactgcttttacatgctatgtaatgcaccagctgaggaccgtgagagatataaactgggagatgccgcatcatttcactatcttaaccagtctagttgtattaagcttgatgcgatggatgatgcttcagaatatatcataactaggagggcaatggacattgtgggcatcagttctgatgaacaggatgcaatatttagagttgttgctgctattcttcatttgggcaatgtggaattttcagaagggagtgaagcagattcttctgtacccaaagatgacaagtcccagttccatcttaggacagctgcggagcttttcatgtgtgatgagaaggctcttgaggaatctttgtgtaagcgtgttatggtaacacgtggtgaaagtattgttaaaaatttagatgcacgagcagcagctctcagtagagatgcactagccagaattgtttactctcgtttgtttgattggcttgtaactaagataaatacttcaataggacaagatctaagctcgaagcttttgattggtgtactggatatatatggttttgagagtttcaagacaaacagatccaagagggtcagtgaaaatcccgtga

SEQ ID NO: 26326 - DNA, 555 bp, Zea Mays
atgcctcctggctcgccgtcgtcgcccacagaccccacctcttccaaggtggttcctccgcctagttactgtagtcatggctcccctgccatcattctctccttcctctattgtctccttcctccagacagagaggcggcactggtacaggtgctaccgggcgaggtggagcctaatcgcatcccatggaggaccaccctccaatggatccaggacgtgaggcaccaaatcaatggagccgcgcaggtggtaccagcgaggtggagcccggtcgcatcccatggaggacaaccttccaattgatccagggcgtgaggcaccaattcagtggagagaaaaacaagaatcgtgactgcaatggcaaatggaaggtgaaggcccttttgattgacaacttaggaaaagatggaatggaactcaaattttgatggtcggtcaagtgtgtagacttgaaatcatatatacctagttaggctcaactttagcgcaaactgttggtgaccatgttttttagttagtattttagtttggatttagagtacacttatgtatgag

SEQ ID NO: 26327 - DNA, 1620 bp, Zea Mays
agatacggaggggcaaggtacgtggtgccttaccttggctaaggcactgaatctggatccctcctccacctccacgcgagcggacgacacgaagcggccatagccgcacgttgggatcccctccgctacgcctctcgatggtctccgccagcgcgccgccgccgcaggcccagtccgacgcggccgggtcgggggaggaagtgagcaagaaggtgcggaagccgtacacaatcaccaagtcccgggagagctggacggagcaggagcacgacaagttcctcgaggccctgcagctctttgatcgtgactggaagaagatagaggcttttgttggctccaagactgtcatccagattaggagccatgcacagaagtaccttttgaaggttcagaaaaatggaaccagcgaacatgtcccacctccacgaccaaagcgaaaagctgcccatccatatcctcagaaggcttccaagaatgattcatcttccatccataggaactctggcatgaacgtgcctgtttcttcatgggctcatagttccatcccacaagctgttgcttcatcaatggtgaaagatttaggtgctggaacaccaggttcaaacaatttttgctcaagtagtactgaaggccttccaagaacttggcaacctggtgaaacaaatgatccaataaatcaaattccgtcactccgccttatgccagattttgcgggagtgtacagcttcttaggtagtgttttcgatccaagtacaagtggtcatctgcagaaacttaaggagatgaatccaattgacgttgagacggcactgttgttgatgaggaatctctccatcaatttaaccagtcctgattttgaagatcaaaggaagttgttgtccttatacagcgcttctgatggacctgggctagggagctcaagaagttcagctctagcgacgagcgcgcctttcatgtaaggtctctcggcatataatttcagttcgacagacctcaggaggatagtgcctgccctggcgtagtagcaccgatgagtgatgaaggaggcgtttgcaccttttgtgcttctcgctagctccatgccttcggctgacgattgtgaagcgtgcacccttcctggcctttcctatccccaaaagctcggccatctaggctcgtgaaatgctgcttcagatcaaggctgtccttggaaatgggaagatgaaaggagaatctgggtaatgccggttgctccctttcccattctttgttgagttcagctttctgattggtttctggtggccctcttgatacggaacttgtgcgctccgtctgagaaagcatgtgtgcaaagtttcatttgaggagttgaggcgatcatggcgctgtaaaatgcggcttatcttcccccttcagggctggtttggtggaccaaccctcaaacatttgcaattcctatgtacgtctgtagtgcatcaggtgttgttgcccacgtgtaaaaggaaaataaattcacaatgtaaaggagacttgtgcgttagcactaccatttgaatttatgaaatgtcaaagcagcccagcgagtttgtacttgccacatttttttgtcgctgtatcagcagtctggctactctggcatcg

SEQ ID NO: 26328 - DNA, 476 bp, Zea Mays
agtcactatgggatttaggcagatatgaggtatatcttagagaatgttcatgccaagagtggcaacatatcgagaagccatgccaccatgccttatgccaagagtggcaacagacctattgatcattcatgtgatgcacctgctgctattccaactgaggtgccaacaccagtgttttcttcagctgaagttggtttgttgatgtccaccccgaggaaaattaggagagctgtcaataagcttactcccaagaagaagatgcatggcatgtagacagcttcaatggtgaatgtcgactgtattttgtttcagaatatctatggcatgaagacagcttcaacgcatgttaactgaatgtatctgtctttcctttcagttatgtgttgtttcagaaacaaatgtgcatgtgattatgtgaactgaatgtatctgtgaaccgaatgtgcctgtgcaatgaatgttcgtgttaattgaat

SEQ ID NO: 26329 - DNA, 444 bp, Zea Mays
agttctgggtgaaggggacactgcaaagcttgagattcagattaagttggacaaagagaagaaaatcctctccattcgggataggggtattggtatgacaaaggaagatcttattaagaaccttggaacgattgctaaatctggcacttcaggtactgccttttcatctttccagctgattactgcactcataatatttgtttatgagtgcaggaacaggagctgctcgagtctcttgtcgaagctgatacgtttgtctgtttttcaccaggaactgccaggccaatgctcgttgtggtttgaaacctttgttcgatatatagtctgaactctgaattgatgcagagaaggcaggaaagagctaagaagatggaagaaaagaaagtgtatctgcaactatacgaagcaatggaggcgttggtcaagatcaatctggagaccaac

SEQ ID NO: 26330 - DNA, 1461 bp, Zea Mays
aagtcaaggttcagtcatgtggatagctgttttcaatgcactcctattcaaggctaagaattaaagaacatgaatacagcaaactttgagtctaacatctgcactaaagaacaacaaggactatatttgtcaggatcaaaagagaagcaaatatttatttaactgtctaatgtttgaaacaagatattaaccctttcaggaagtcattggaaactttatcaaggttaattattctaaatttcactcgacaagatattgtaagcacactgaagcaaagaggtatcttagttttgaacagagggtagaacctcatcaaactacacaacttgtttaagaaagcatcaaagcgatgatcaatctctaaaataatgaatgaattaatactgataagtggaacaagaaacagtagatgttaactggttaaggcacaactgatgggtgtaccatatgtattacaattgtgaaccaaaaacaatcttatagacttgtacagacagattatcacattaatggcatatcaaattacatggaaacaccagaaaatattttagacaaacatttcagctggcagaagatcctagccttcatgaaaatcaaagattccaaaaaggaaagcatagattactcaacaaattcatgtagacttggactagcaaatatcaatgaatgctaatgtcctgagcataaaaaatggaccgtaaaaaaataacaattaccacctaaaacggatcataaacataacatggatctgagacctaccaacagaaaaacaaatcgttcgaactaaatcagactataccagctacaattaggcatggcaaaacagcagatctgagttaacaaattggtgtcacccaaggatcacagcagacctgattcatcttaaacataaggtgcaaactaactggtacacgcaaaaaaaattgaagaatcgagaaatctaagacatctggattgaaccaggactgcaacttatcttatctctacagatcggacagaccaatcacagagagaacagtcggaagccagtaaacccaaatccacctaaattacctcgagtacccacacaaacatcagattcgaaccacaagcaattgaaaacctctgattcaatccaatcaacacaagacaccgtgagatggaaccaaaacgccttgaagccaactagaaataccgatcagctagctctagctctagcaaccagagaagaggggagagagagccagtaaccttggtttcgcctcccgatctgagagacgagatgtggaggcgccgccgggagagaagcactaaaaccctagtggcagcctgtaaagatatatctatagcagcggagctggcgcagggcggaagaaatatcctacgggggcgaatattcggccactgacccgcctggttttgtcgacgcagattagcggcgggcagctgctgggctgctcgtcactctcgggcaaccattcg

SEQ ID NO: 26331 - DNA, 2929 bp, Zea Mays
cacgatcaaccatttctctgtcccgcgcaacaccgatgtggccacaccatattgacttgacaattgctgcacttagggcttgggccctgtttggtccataactcattctagaatttcattatcagctaaatagctcctagattttgtattggtttttgccagaatttcacaatctcaaaataggttgataatagaattcgtttgaattttgcgtagtatccaactcctcaaaatatatgggaaccaaacaccagattatttgtcatttgcgacaggtagcttggatccataccgtcaatcgcatcagatcgtgaatccctttcctcctaccgcgctagggttttgcaacggcctcaatggcgtccaccgccgccactgtcacgtttggcggcaagggcgccgccctatcgccggccgccgtctacgcgctctccatcggcctcgccgccccgggcatcgacccttcggcgcacaaggcgctctccacccgcgcgccctcgccacaggagacccccgcgccccttgccgccgcgctcccggcgctggcgcccgccgagtcccgcgccgccgcggccgtgttgctgaacaagctggtcctcactgcgtccgactctgcctccgcgctcgtcaccgccgccacggccgtcggcctcgcaggctcgctcgacctcgccgccgcgctgccgctcggctcccgggacgaggtcgcggtggcagcggcttccgcgcctgtcgcggtcgggctcgcagcgctggtcgactgctgcgccgcgccgctcgcccgcgttgccgacgccgtcgccgcgctgtcgtgcgaagccgtgcgcggggacgccgcggccttcgacgtgcaggcctccggcgacgggctctcctccaaggacgaggccgacgtcgctgccgacatcaaggtgctcgtcttcgggtccaagcttgtcggcgctgccgggggcgcccccgccgccgccacgttcgccaaggtgcccgcgctgaacgggatcttccgccaggcggttcgggcgctgcacgcccaagtgcgcatcgagctcaacgcgcctgtgaaattggggaagaaggatgccggtcaaaccgatgctgtgtcagtcttgaagggggtgtacaaccacttgctcaagttcagggactttctctcctgggaagcagctatggccatggcagtaattgaaacagacagttcaattgagaagccgcaatctgctgttgacaacgaagcagctggttcaagtgaaaaggcacaggctggtggggacaaagcaaagggtgacaagaagagcaagaagaagaaaactttggggaagggtacatctgctgtgctgatgctgcttagggaccatgtgacaaatggaagtactgttgcttccgtgaattctgtgcttgttgcagagtgggcagcctctctctcattgctctttgatcctaaatgtcccggattggtgtcccttgtggagaaagtgaaggagattgttgagagcaatgaagtcaggagattgcctaaaattcctaagggtacacgtgactttgggaaagagcaaatggcgataagagagcgagcattttcaattataactagtgtattcaagatgcacggtgctactgcacttgatacccctgtatttgagctgagagaaacccttatgggaaaatatggtgaagactcaaaattgatatatgacctggctgatcagggtggtgagctttgctctttgcgttatgatctgactgttccatttgcccggtacgttgccatgaatagcataagcgcactgaagagataccagattgcaaaagtatataggagagataatccatcaaagggaaggcacgtatgagataaaattaaatcacagaaagttgctggatggaatgttggagatttgtggtgtgcctcctcaaaagttcagaaccgtttgctcgagtattgacaagctggacaagcaaacattcgaacaggtgaagaaagaactggtggatgagaaaggtatatcaaatgaaactgcagatgaaattggcaatttagtgaagactagaggagcccccttggaagttttgatggagttgagaaaggatagcagcaagtttatgaataatgaagggtctgttgctgcactgaatgagctggagatattattcaaggctctggataaagcaaatgcaatagacaagatagtttttgatttaagtttggccagggggcttgattactacactggtgttatatatgaagccgtttttaagggttcagctcaggttggctccattgcagctggtggtcggtacgacaaccttgtgggtatgttcagcgggaagcaaatccccgctgttggtgtgagccttggaattgagagagtctttgcaatcatggagcaacaggagaaagaaagaaatgagatccggcctacagagacacaggtgctggtgtcaatcctgggaaaggaccttacactagctgcagagctcgcgagcgagctgtggaatgctgggttaaaggcagaattcaagctcactactagggtggcgaaccacatcaagtatgccttgcaatcaggcattccgtggatggtgctagtcggtgagtctgagttgcagaagggaagtgttaaattgaaggatgttgaagccaaccaggaagaagaggttgataggaaggattttgttcaagagctgaagaagagattgagtaaacccaacattcatttgaggcaaaatcaattacggcagaggcggagaatgatactgcagcattgtagtttaaagtgctggggatgtttttgttagattacccgtctagggtttggtgtcttccccatgtaattaccttctcacccctttgtaatggaccagccccaattacctaagtctattaataccacacccaaccctgattagggttagggtttttattccaact

SEQ ID NO: 26332 - DNA, 2249 bp, Zea Mays
aaccaaaccacagcaatccttcaccatcctaagctagccaagcatgtggaggctaaagatcggcgagaggccaagcaacccgctgcttcgctcgcccaatggcttccttgggagagaggtgtgggagttcgaccccgccgcaggcacgccggaggagcgcgccgaggtcgataggctgcgccaggagtacacccgcaaccgcttcacgcgacggcaatgcagtgaccttctcatgcgcatgcagtatgcaaaacagaaccttcataatacaaaccttccggctatcaagattgaccaggattcagacgtcacagaagaaactatactaattacattgaggcgtgctcttaatcaatattcttctttgcaaggacctgctgggcattggcctggggattacggcgggatttcgttcattttaccactcatgatatttgcattacatgtcacacgatcaatggatgaagttttgtcaatagagcatatacgtgagatatgtcgctacatttataacatgcagaatgaggatggaggctggggaacacataccttgggaccaagctccatgtttggcacatgtgtaaactatgcaaccttaaggattctaggagaggtgcttgatggagaaaatgatgcattatccaaagggcgttcttggattttgtctcatggaagtgcaactgcagcaccacaatgggcaaagatatatctctcgatgataggtgtatacgattgggctgggaacaatgcaatcattcctgagttatggatgcttccacattttctcccaattcatcctggaaggttttggtgcttttgtcggatggtttacatgccaatggcttacatttatggaaaaaagtttgttgggcctatcactacaactattttagaaataagaaatgagctctacaatataccatataataagatcaactggaacaaggcttgcaattcttgtgccaaggtgtatgttggttgccatagttgggaaactgcgctcatagttcaggctttttgctcaacagggctcaccgaggagttttgttcgactcttcaaaaagctcatcagttcttaaaaaatgcacaggttatcaaaaacattcctgattacaagagctactaccgtgaaagaactaaaggttcttggactctatccaatggagaaaacttttggcctattgctgatacaactgctgaggcacttaaggcaatactgttgctgtctaacattccttcagaacttgtcggggatccaataaaacaagaacgactatatgatgccgttgattgcctcctttctttcgtgaacaaagatggtacattatcatcagctgaatgtaaacgaacaacttcatgggtggagtttatcaatccttctgagagttttcgtaatatcatcgtcgactatccatatcctgaatgcacatcatcattaattcaagctttagtgctgtttagaggcaagcatccaatatatcgtcgtgatgagatagacaaaattatcaaaagtggtgcatcattcattgagaaagtacaacgaaaggatgggtcctggtatggttcttgggctgtgtgtttcacttatgcaacattctttgctataaaaggattagttgctgcaggaagaacataccggaatagtttggctattaggaaagcatgcaacttcttgttgtcaaagcaactaggaaccggtggatggggagaaaactatcttggttgtcaaattgaggagtatgttgacagtggcagtccacatggagtcaacactgcacaggcgatgctagctttactctacgctgggcaggtcgaacaagacccagcgccactataccgtgctgcaaaagaattaattaacatgcagatggagaacggagaatttccccaacaagaaattgttggcaacttcaactcctcacttttcttcaattacccgaactaccgaaacttatttcccatctgggctttaggagaatttcgccgccgacttgttgcaaaaaaaggttaagatgggtatcttaagctatttctaataattgtatttgggatacaagtatccatgtatattttatttttcgtgatgatgggaatgtaacacaaaataaaatttatatttagtacgtatatgttaatatttgtaagattatcacaaacaagttgataatcatcagtgatctggttcctcaaattcaataacaaggatgcaaaatgtttggtagcaagaatactgcaatggaatggaatag

SEQ ID NO: 26333 - DNA, 1279 bp, Zea Mays
atactccgtataaagcagagaggagaggagaggagaggagacggggacggcaccggcagcgctccacaggcccaacctgccgtccacggcgcgaaagaagagccgcgaacccgggagtcctgcctgtcctcgtcctcctcccccttgccatccgccgcccatggcgtccgcgtccgcccccgaagtggtggtggtcttcgacttcgaccggaccatcatcgactgggacagcgacgactgggtcatcaccaagctcggcgccgccgacgccttccagcgcctgcgcccaaccatgcgctggaacccgctcatggatgatggcggagctccacgccagggggaagacgcccgaggacatccgcgactgcctcaggagcgcgccgctcgacacgcacgtcgtttccgcagtcaagacggcggcggcgctggggtgtgacttgaaggtggtgagcgacgccaacaccttcttcatcgagaccgtcctggcgcaccacggcgtgctcggctgcttctccgagatcgtcaccaatccggcgagcgtcgacgcggacggcaggctcaggatctcgccgttccacgaccccgcgtccgcgccgcacggttgcagcctctgccctgacaacatgtgcaagggcaagatactggggaggatccaggcaacaggcagtgacaagaagcggcgccggcgcttcatctacatcggtgacgggaagggagattactgcccgtccctcaagctgggggaaggggaccacgtcatggcaagggagaactaccccctgtggcatctcatctgcgacaacaagcagcttctcaaggctgaggttcatccgtggaacagcggcgaggaactggaaaagacgctgcttaagttggccggcgaagtgatcagtccacctgcacaggcttcacaatttgactacagcaaatgcgagatgagcaatccagcatcctgccctccgtcgtgtgccgcactgattaccgaccaactcttagttcgcaagtactgataaaagtctccatcctgcattcaacatgatatatgtcgtcaatctgcacagcaatttagagatggattatctatgctatacactatgttatcaaataaactgtagcgtggcatggaaggacatgagttgagaattaattgatgccagtgtgggaaactatagtctctaactcctcaggaaaatccaaatttccaacagcagaatccattatgtcagtctgtcagatcaatagccaagacagtaacagcatacggtggatgtggatatgc

SEQ ID NO: 26334 - DNA, 2423 bp, Zea Mays
aggttgtgagcctgtgactgttgtgagctgctgaatccaggatgggcagatatttgcgccaccgtggctataaagcctcttttgaccaaacccttctccctctcacaaaaccctagctttccctcctcccctgttttgcggcgcgccacgaactcgcgacgctctcgagagatccatggatcggcgcaagggcggcaaccgcgacgccaacggcagcctggtcgaggccacggcgtcgcggctgagggtcgaatccgacgaggaggcggaagaggtggggatggaggtggaagagagcttcgacgcgggggtggaagacgagcaggcggcggcggaggtgattggaagcgaaaagaccagcgccgactactacttcgactcctactcccacttcgatatttgaagtcagtatgcctatgcagtggagatgccaattatttgcatgtgctgactgcaggaaatgctaaaagatgtcgttcggacaaaaacatatcaaaatgttatcacccagagtagctttcttatcaagaacaaagtagtccttgatgttggtgctggaactggaattctttctcttttctgtgcaaaagcaggagctaaacatgtctatgcgattgaatgttcccagatggcagacatggcacaggaaattgtaaaatcaaatggatattcagatgtcataactgtaataaaagggaaagtggaagaaatagaacttccagtcccaaaagtagatgtcatcatctcagagtggatgggctatttcctcctgttcgagaatatgttgaacactgtcctatatgcacgtgataaatggcttgtaagcgatcctttataaaatcatcagtacaattttcagattctgttcttcactattgatgttacctgtttgattcattgtgtttattctctttttagcatttttttacaaaatacaatttgattgtctatgaatatccttatctgtcgttctgtaaaatatttgaactttctgagggcagcttaggttgtgctacttttctgtaggctgatggtggtgtggtcctgccagacaggacttctttgcgtcttactgcgattgaagacgcagaatataaggaagacaaaattgaattttggaataatgtatatggatttgatatgagctgcataaagaaacaggcgatgatggagccactggtagatacagtggatgcaaatcagattgtcactaactgccagttactgaagacaatggatatctccaaaatgaccccaggtgacgcgtcctttactgtaccattcaagctggtagcagagcggaatgattacattcatgctcttgtcgcatactttgacgtgtcgttcaccaaatgccataagctgatgggcttctcaacaggcccgagatcgaaagccactcactggaagcaaactgttctctacctggaggatgttataactatctgtcagggggaaagcctgagtggttccatgacagtcacacccaataagagtaaccctcgagatatcgacattaagctcaagtactccataaatgggcataggtgtcaggtatcaagaacacagttctacaagatgcggtgacaatggaacaaacaagagttgcttcaaagctcattaaattttgtttaacgagtatcttgtttgacagaaattgtgctatttttattgttcatgtactatgcatcaaatattagattctttggaatctagcaaaagtagggagtagattaaactggtctgctgatatgagattgatgtagtgcaaaactgtcatattgccacaaggccgttggtggttgtatgcatttgaagtcggttgcaaattattgctttacgcattccaccattaatccttgccttaggtttttgtgtgtatgtgctcattgtttcaattgcttggacagtcaaaactttcctttgcgtatggttcttgtgacagcaatacaagttacggacagccttttggacaaaaagactgttgtctgtcctttgtttttgtgaggttccttttctttacagcaaatgctgacataggttatcctggagacatgctaagggctctgcaaaaatgcagctgcctaaaatcatttctgcgccggcgacgctgatgttgccatagctatacagttgtttgaaaatgcatttaccgagcgcatcatttagatcggccaagagtcacttcactgggagagaatgctgcaccagaacgtgaaacacgcagatcggtcaagattcagaggaccgggcacataaataaacgaatgaaaaatacggttttcagtaaagctgacgaagttacttgtagaggtatgttgcaatgccaagaatgatgcagatcaagatgatatcaattgtgaagttcctggttgaccgaaactgctcaaaacaaaacacccacattcgtcagtagaaccaag

SEQ ID NO: 26335 - DNA, 422 bp, Zea Mays
ggaatgtgatatttttttaaaggccagtttaggaactacgttttcccgtagaatccttattttttcaagaaaaaataaactggaaaataagaattccataggaaaacgtggtttccaaactattctaaaaaatgggctaaaaaaaatcgaccgtcttcctcccaacccaagtggatattcaattctctgcaggtgcaggaccgcgaacacgaggaggcaggggagcagcatccacaaccacaagccatggcggggaggactaacatccccactaacaactccgccctcatcgcaatcatcgccgacgaggacaccgtcactggcttcttgatggccggcgttggcaatgttgatctgcgcaagaaaaccaattacctcctcgtcgacaacaaacaccttagggtcagtcctcagcacaattt

SEQ ID NO: 26336 - DNA, 695 bp, Zea Mays
gcctcccaggcatgtataaaactttgggcaaaaggagatcttcctacctagcatatcttgcctcggaggagggttgttatattcaatactatgggtttgatggaggtaatttttaacaggcctgttgatattctaaggaaattgtttgatgggaacaccttgagatcacaaatcaaagaattctttaatcgctttggtgctggagaggctgctgcaatgtgcttaatgatagctgcgaagctactttatgttgaagatagtctgataagcaattctgtttctgagaaagccactgaggcatttgaggaccctgggcttgttgggatgcctcaaattgttggtaccactgctttatctaatacacgaacttaggctggaggctttactatgggccaagttgttcaagaagcataacctttgttttctggtgcatatgaagggctttgtttgtgctcgtcaagactactttatctcatatgggagtttcctattatagtgattcgaagaccggctggtactaataaatgcaaggatggtgtaattgtttgtaggctttcagctggggccatgaaaattcttgagagcaagattcattcactggaaacatttttaagatctagaagaaataagagaaggggccacgcagtaccattgacacttaccctcaaggttgttgtaattgaagcgggtcaaga

SEQ ID NO: 26337 - DNA, 3045 bp, Zea Mays
cacctcaaaactgaaaaaaagggaaaaaaggtgctctcgatctagggaatagggatccccttcccggcttctagttcccctcctcgtccaaaaccctaggccagcctagcggcggagcccgcgcgcccgcctccaggaccatggccgaagaccacttctcctccgcgccgtccgccccgtcggcagcggcgacagcggcggcggcggccgccgcggcggtcgggtcctcggtgatcccgatcgtcaacaagctgcaggatatcttcgcgcagctggggagcagctccacgatcgacctgccgcaggttgccgtggtcgggagccagagcagcggcaagtccagcgtgctcgaggcgctcgtcggccgcgactttctcccgcggggctcggacatttgcacgcgccgccccctcgtgctgcagctcgtgcaccagccgcgccgacccgccgacgccgaggccgatgagtggggcgagttcctccacctatcggggcgtcgcttctacgatttccgcgaaattcgacgcgagatccaggcagaaacagaccgagaggcaggtggtaacaaaggtgtatcggataggcagatacgattgaagattttttctccaaatgttcttaacattactttggttgatttgcctggaattactaaggtgccagttggtgaccagccaactgatattgaagctagaatacggactatgataatgtcatacatcaagcacaagacatgtatcatcttagctgtatcgccagcaaatgcagatttagcaaactctgacgctcttcaaatggctcgggttgctgatcctgatggttctcgaacaattggtgttatcacaaagttggatataatggacaggggcactgatgcccggaactttctgctgggaaatgtgatccccttaaaacttggctatgttggtgttgttaaccgcagccagcaggatatcaactctgacctcagtatcaaggatgctctggctcgtgaagaaaaattcttccgtactcagccggcatatcatggtcttgcacagtactgtgggataccacaattagcaaagaagctaaatcagattctggtccaacatataaaaacagttctgccagggcttaagtcacgcataagcagtcaattgactgctgttgccaaggagcttgctgtgtatggtgaccctgttgattcaaaggctggtcaaggtgctaagcttttgaacatactagctaaatactgtgaagctttttcgtcaatggtggaaggaaaaaatgaagatatatcgacaactgaactttctggtggagcgaggatccattacattttccagtctatctttgtcaaaagtttagaggaggttgatccttgcgaggatgttacagacgtagatatccgcatggctattcaaaatgcaactggtcctagaagtgctctgtttgtacctgaagcagatcagcagattgcttgatccaagtcttcagtgtgcacagttcatatatgatgaacttgtaaagatgagccatcgctgccttgcaacggagttgcagcagtttcctatactccgcagaagcatggatgaagtcattgggaagtttttgcgggatggacttaagccagcagaaagtatgatatcacacattattgagatggaggaagattacataaacacatcgcacccaagttttattggtggcagcaaggctgttgaggaagcacagcagcaagttaggtctgccaaaacgtctgcagtggtagtaagaaaggatggagtggattcacaggtttctgagaaaactcaaaaatcacgcccgatattgggtagaagtggtgtaaatggagtagttactgaccacatccagggggtacggcctgctgctgaggcagagagaccaggatcttctggtagtggaagcacatctttctggaatcaaatatttacttccaatgaggatcgaacacatgctcctgcaagagataacacagcaaacaaatcttatgctatgcctgcccctaatctggatcattcattctccactatacagttaagagagccaccagtcgtcctgaagccttcagaacaccagtctgagcaggaggcacttgaaatagcaattacaaagttgctattgaagtcatattacaatattgtcaggaaaaatgtggaggacttcataccaaaagcaattatgcatttcctggttaatcacacaaaaagggcactgcataattacctcataacaaaactttatagagatgatcttttggaagacttgctcaaagaacctgatgagctaaccataaagaggaagcagatacgtgaaaatcttaaggtccttcaacaagcttacaaaactttggatgagataccacttgacgcagaggcagtagagaggggtggtggatactccctcgattctgatgcgattggtctaccaagggctcatgggctttcttcatccctccacggattcaatgatggaagctcatcatattcaaccccgaagcagtcaaggtcaaggaggccaaaccattctggcgagcaacttcctttcaaccccgcaacgagtggcaatggtttttgatgccaccctacacgatggccacccagattggttatggaaccaaccattgcagcaagcacaccttactctgctccaagtttgttggcacccgtagatatatgttatttctagttaaattctttgcagcgttgcgctgatgaagcctggcatggtgcgagttttgtcatttcgccttttgtacagtatatatctttgcccagtcatttcgtcttgaaatggtatcaagtgataggtatactttttcttcggacccagggaaagcaatggaaaaagttatactaggtgcagcacccagcgtctgagtgacttgccacggatttgccttgcaaaatagacatggttggtattgtggtggcaataaaatgtggcatgaaatagtttccgtttcgttaatgttttgtcttgatttaatacgcctttgttaatagttgtgcatttgtacatcagcattaataactgtgggat

SEQ ID NO: 26338 - DNA, 1310 bp, Zea Mays
aggagagagaaaattcccacacacacaaatggcaacaggagagaaaatctatagagagagaaacaagagggagagagagagagggaacagaagcaccgcgcggccggagacgccaaaaatacatcttcccggtccagctacaggaaaggtcactacaaaagtagatgtgtatgcatacggtgtgatactgatggagatgattacgggaaggaaagtacttgatgactcattacccgatggcgaaacgcatctcgtaacgagcttccgaaaaaacatgctcgacaaagagaagttcaggaagtttttggaccccaccctggagctcagcgctgaatcttggaacagcctgctggaggtggccgatcttgctcgccattgcacggcgcgggaaccgtaccagcggccagacatgggtcactgcgtgaacaggctttccagcctagtggaccagtggaagccaaccaacattgttgatgatgacgatgaggagggtgggacaagcgagatgggtcttcaccagcacctagaaatatggagatgcgatgatttcactatatcggattcggattcattcagcgcacacaacacatcaaggaagtaccattgacaattagcgaggcttttttttgtcatacatacatataaatgaggaaccatggtgtggcacatcaagaggctccccagtccccacacgtctggatcacgaacagctttgaaggtcaatgtgccagccagtcaggttgtagttagcgcattgaaaacaaggttacttgataatcagcatcttcattcattgaatgtctgctaaccaggctcaaacttgagagggaagtcatgataccagaaaacttgtgctgtatctagcttagcctgtttatacaatttggtcactttggacactgagaaacattttgttcttgaatggtgaagagggaaaagagatgaaagaaaccatagcttcgccgaaggcgagttctggtggttagttttttaggatgtagagggttgccttttgtgtacaaccaaccatgatttcattattatttatctagtatctgtatttgctctgtacaaccaaccgtcaggattgttttcttcaaatacctgaacgtgcgaaacgatgctaccaaaagttcaagttttgcgttagcatgcaatttttttttttcatactggacgtcttgtactggcaagaaccaataaacaaatgtctaagctttagctttgtacagcctgcaaagcaaaagataagatgaatcagagaaatgtccttaggataccaaagaatatttaatgtaacctaacatatc

SEQ ID NO: 26339 - DNA, 2398 bp, Zea Mays
ttaccgaatgtgattgtgactacaccgccactgctctgctcaacacggttcaccggtaatgatccccggttcctccgactgcaaccgggcgccacgtccgcacctccatctcgctttcagccgttcgtacctaggctacactacatgaaaggtcgctcttcagctgaaactgaagtctgaaaccaccgcccagcgctcgcctgtttctgcggccgtcgatggagctccacctcgccaccatcgcccaccgcccgcctttgccggtaccggcgcggggccaccacctccgccgccgcctccaccacctcccggctcctctctccttccaaaacacctactccccctccctttcctccccgcatcatcatcgcctttctcccacccttcgccgccacctccgcctgcctcttctcgcctcccaagcgcccaattctaacccggagcctgaacctgagcccgagcccactggtgcgaagctactgccgctcgtcatctccatcgccatcggcctcgccgtgcggttcctcgcgccgcggcccgtcgaggttagcccgcaggcgtggcagctcctctccatcttcctctccacaatcgcggggctggtgcttggccctctccctgtcggcgcatgggccttcctcgggctcacagccgccgtcgccactcgcacgctccccttcaccgccgccttctccgccttcaccaacgaggtcatctggctcatcgtcatttccttcttcttcgcgcgcgggttcgtcaagacaggcctcggcgaccgaatcgccacctacttcgtcaagtggctcgggagcagcacgctgggcctttcctacgggcttaccctcagcgaggcctgcatcgcgccagccatgcccagcaccacggcgagggccggaggcgtgttcctacctatcatcaagtcgctctcgctgtcggctgagagcaagcccaaccatccatcgtcgcggaagcttgggtcctatcttgtgatgacgcaattccagcacaaaacctgttgtgcttgaagctagcagaggagcttggtgtaatcattgcaaatccatgggtatcatggttcaaagctgctagtttgccagctcttgtttctctgctagcaacaccatatttgctgtacaaaatcttcccacctgaaacaaaggacacccctgatgccccagcactggctgaaaagaaactgaagctcatgggccctgtgactaaaaacgaatcggttatgattggcacaatgattcttgcagtctccttatgggtttttggggatgctattggtgtgtctagtgttgtggctgcaatgcttgggctctccattcttctcgttctcggtgtgctagactgggacgattgcttgaatgagaaatcagcatgggatacattggcttggtttgcagttctggttggaatggcaggacaactcactaacctgggaattgtttcttggatgtcaaactgtgttgccaagctgcttcagtcgttctcattgagttggccagtggcattttgtgttctggaggcctcctactttctgatccactacctatttgcaagccagactggacatgttggagccttatactctgcatttctggctatgcatatagcggccggtgttcctagtgtgctgtcagcacttgctttggcattcaacacaaatctgttcggtgcaatcactcattatagtagtgggcaggctgcagtatacttcggagccgggtatatggagcttccagatgttttcaggctgggttttataacagccttggctaacacgttaatctggggagttgttggaaccatctggtggaaatttttgggtctgtactgacagtggcagacatgtggttgaccaaaattttcatttggcactggtcgaattgctcttgctcattgttaggaagggcagaatatctagttaactaccgttgctccctccggtcagctatcgctgaggtgatcagcagttagcaattacgcctgtgtcgtgcagttccttgttttctctttggttccgtagaagtccttgggcaatttttctgcgcttggaaccaacgaattctcacaaaacatcagcgagctcgtcggcttgatggtcgtagaggctttgcgtcgcaatctggataatcacatttatttattttggcacgaatcctggatggccgcagcatctgtgtcagttgtcacctctgtttctttcactcctacagctacagatgaaggaacaacgatcctgctactgcactcagaagtcaaaaaaattgattcatgaatggatgtagccaaacaatacagaccacagtaggaacttgggctacgaacagtaagacaaggcagtttgtggtaggaatgaacttgtcacaaacacacgcgtgacacacccgat

SEQ ID NO: 26340 - DNA, 1794 bp, Zea Mays
tatagctatgtactcgaggcatcttcatacctcgattggaataaccatcagagcccatcaccttaccccctttcatccttttcaatgtctccctaaccttagattcttggatcctacgcataaggctacgtccccattcttcccgttgaacaatttctcaatactaaccatcatgcttggcctcatcctgcttcaccaagaggttaatattgattttgagaaagaacctattggcatctcgaaagatggaaaagaggtttacttccgggatgtttggccatccacagaagagatagccgaggttgtcaagtcaagtgtgctccctgacatgttcaagagcacatatgagtcaatcaccaaaggaaatcctatgtggaatgagctgccagtctcaacaagcactctctacccctgggatccatcatctacatacatccatgagccaccttacttcaaggatatgaaaatgagtcctcctggcccgcggcctgtgaaggatgcatattgccttttgaattttggtgacagcatcacaaccgatcacatctcacctgccggaaacattcacccagacagcccagctgcaaaatatctgaaggagcgtggcgttgaaaggaaggacttcaactcatatggtagccgaagaggaaatgatgagatcatggctaggggaacctttgccaacattcgtcttgtgaataagttcttgaagggtgaggttggacccaagacaatccatgttccatctggggagaagcttgcagtttttgatgctgctatgaaatacaagaatgaagggcatgacactattatcctggctggtgccgagtacgggagtggaagctctcgggattgggctgcaaagggcccaatgctgcagggagtgaaggctgtgatagcaaagagcttcgagaggattcaccgcagcaatcttgctggcatgggaatcatccctctatgctacaaagcaggggaggatgcagacaccctgggcctaaccggccatgagcgctacacggtccaccttccaaccaatgtgagtgagatcaagcctggccaagatgttaccgtgacaactgataatggaaagtcgttcacttgcacactcagattcgacactgaggtatgattgttcttttcaatgcataaatcgctgatgctgtctattgatgttttcgttactgatcaccttcacctccaggtggagcttgcttactacgatcatggtggcattctaccatatgtcgctagaaagatagcggaacaatagattgtaccgtcgagatggttgcgatgcttgcggtgaatcgtaattggtgtaaacggtttgtttagtagtacaacccatttttgcggactacttataataacctctgagtatctcagagtgagctgtctgaaatttgatgaactgctacaattctggtgcgccatgaggatgggatccttttgccttctatgttaataatatgctaacttctgcaataccagatatacatttggcagaagattttgcacgctgtaaatgacactagtattaacactgatgcggttcaaagctgtccttgttttgttatctgccaacaattgatgagcagattttgtttcagatttgtattacgaaccttttaccacgttgccatgtgcgactggtaatgactctgaagcaaccgatgggtgtaaaactgtcatgtaagccagaatctgaagctgctctttgcaaaaaaaataataaaagggaaatactgggggcaataaagctcgtgctgaagctagagcaacttgaaagagaac

SEQ ID NO: 26341 - DNA, 2978 bp, Zea Mays
gtccgggacggtcggcccgcgggctccatccattgatgccgctcctccccacggctccttcctgcagcctcctccttcctccctcgccactctcccctccaccgctgcctggtgtgtagcgtagcgtagaggcgcggcgcggcgcggctgactggttggttccagttgttctagacaacgctggcttaaccgcgcgaggcccgaggaaagttagcttgtttcttgcagctgaatgcgggaagcaagcaactgcattttactaacctcaccacaccagacccaccactgacttcccggcctccggctctggagcagagcaggtggcagcactagcacggccacgtgcggcatgaaggggcaccagcaccagcagcagtcgtcgtctccgctgctgccgatgccgccgcccagcaagcgccgctgtagcgcgctggcggcggccgtgccggcgctcgtcgtctgctccacgctgctcccgctcgtctacctcctcgccctgcaccgccccgccgggtatggatcggacgaccgcgccgcggtggtcatcagcaccgatgtttccaaaaaggtgtctggatctgatggggtttccgctgagagatctactagatcgaggtttagccaggatcatgctgccaaatcaaaagcaaagctcaagggcgctttctctttacttggactgaacaatgataccttcaaaggtaaaggacctcgtacctccaaaaggtttcagttgaaggacctgtcctggagatcaaaggatactactgtcaatgggaaagagaaccatgatcaagagacagtgcatgaggagaataccaagtcctgtgaacatgaatatgggagttactgcctctggtctactgaacacagggaagtaatgaaggatgccattgtcaagaagcttaaagatcaactttttatggcaagagctcattatcctagcattgcaaaattgaagcaacatgaagcatttacacgtgaactgaagcaaaacatccaagaacatgaacgcatgctgagtgacaccatcacagatgctgatcttccaccattttttgcaaagaagctggagaagatggagcacacaattgtgagagccaagtctagtgaagtaggatgctccaatgttgaacggaaacttaggcagctacttgatataactgaagatgaagcttatttccatacaaggcagagtgcatttctatatcatcttggagtgcagactatgccgaaaactcaccattgcttgaacatgagattgacagtagaatatttcaagtctggatcaaatcatgtggatcagttaaatgaccagaagcttgaaagtcctgccttacatcactatgtaatgttttccaggaatgtacttgcagcttccaccactatcaattcaacggttatgaactcccaggattcggaccacatcgttttccatgtattcactgatgcacaaaacttttatgcgatgaagtattggttcgataaaaattcatacttggagtcgactgtacgcgtaactaacattgaggacaaccagaagctctctaaggatgtagattcccttgagatgcaacaattatggcctacagaggaatatcgtgtcacgattcgtaatcattctgaacctttccagaggcagatgaaaactaagtacatatctatcttcggcctttcacatttcctcttgcctgaccttcttcctggcttgaatagagtagttgttctggatgatgatttgattgtccagaaggacttgtcacctctatggaacctcgatatgggtggtaaagtgattggagcagtccagttctgtggagtgagattagggcagctgaaaccttatatagcagaccataacgtcgatgatgattcatgtgtgtggttgtcgggcctgaatgtcattgaattggataaatggagggacaccggcattaccagtttgcatgatcaatcagtccagaagttgcgaaaggacagcctgaaatcacagcgactgcaagcactccctgcaggtctacttgcctttcaagacctgatatatcctttggaagattcatgggttgagtcaggccttggacatgattatggaatcagccatgtcgatatagagaaggctgctactctgcactacaatggtgtgatgaaaccttggcttgacttggggatacttgattacaagaactactggaggaagtacatgaccagtggagagaagttcatgacggaatgcaacattcactaattaacagggcatgaaatgcaccaaacactcattttttcgggcatttggacaacagacttcatgggctttgttcatcatgaaaataaacagaatcacgcctgacctgcaacatccatgatgacacaaattcacccctgacgtgacgagggagtgctcagtccaattccaagaggagaataagatgaaatgctttctgcggaacgttgccataacagcatccacgatgtctgaaggacgctagcacgaaacctgagttatgttgcagagtaccaagatataacgtagaatatttcacactgttcattatggtttgatgagtttttttccctatattcagcttggcattgcaaaagtgcagttccttgctgttcatttttagtataagatctttggtgctattctttttgctcattgtgcaagagcaatactgagggagttcaatgttgacggcggcacatcgtgtataggaaacagcaaaccatgactgaattagcgagtatttccttgtactctttgcagcaagtcgtgtgtttgttatcgtcagatgttgatgtcccattgacgacataccaaatggtggtttgttccgctcaatggcagtctctctcaatctatctgatttgttgggatctttttgtttggaaaatctcaaggtactagaattcagatagttatgtctacgtcccgtttggatcattggtttggatccttggaactgaattttattctaata

SEQ ID NO: 26342 - DNA, 2744 bp, Zea Mays
acccgatctccaccacggctccacgaccacgagcccaaccgggtagcttcttcttcgtccgctgttacccacaccgcgggaagcctccatgcgatcccctgggcggcgcctaccagcgccggcgcggctcgtcgcggctgccctcctcctcgcagctctcaccgggggagccgtcggcgccgatgggtacgggcgggcgaggagggtgtacatgaagaacaaggtcctggagatgttttaccatgcctatgacaactacatgacttatgcattccctcatgatgaattgaagcctcttactaaaagtttcacggactcgcttagtgagcttggcaatttaaatcttgaacacttgccacaggattatagtggatccgcgttgacactggttgagtcattatcaagagtttgagagaggagttctctggctttcagaaaatctgacatttgatgttgatgctcggattaatctttttgagtgtaacataagacttcttggggggcttatttctgctcatattcttgcaaaagactacagcagccagtttaagcatgggctgtatcaagatcaattactacgtcttgctgaaagtttaggcaatcgttttctaccggcatttgagacacctactggattgccgtattcatggattaatcttaaggttcatataccgaactttggcttttttcagactttaaaatcttaattttttgcatgcatgaatcaatcgtaagattcctttacaacctgaaatcgtatggccacttgaatgccatcatttattgtgtgtacatatctgtgtacattcaacaggtcaaactgagaaagggtcttctgcaaagagttaccacatttgtctgaaagcagactacaacaaacattgagtttcttctccaataatttttgaaaaaggacgtgtatagttattaagacaagcatgctcattagtacaattttaacatctatcaacgtttaccttaggaaaactgggatattacttgctatcagctaaaatgataagaatggcaaattataagcatgctatggtagaatgaagaaccacagaatgattactttgtttgaaaaactcaaagttcacatatattagaactctggtactcattacttttgcaattggcatgatacaacaacctttttcagtatggggtgatggaaaatgaaacaactgaaacaagcacatcagggtgtggctcccttatacttgaaatgggtgtgttgtcacgtttgactggtgattctagatatgaagctgcagctcttcgtgctctccgcaagttatggagcatgagaagttcactgaatctagtaggcaccacacttgatgtttttactggcaagtggattcagtattcatccggaattggtgctggtgttgattcattttatgagtatctgattaaagcatatattcttttcggaagtgatgagtactgggatatgtttcattcagcttatcttgcggtgcagaagtacttccgacatggtccatggtatcatgaggctgatatgaggactggagaagcaacgcactggcagctaactagccttcaggctttctggccaggtcttcagacacttcttggagacgtaactgctgcaaatctatcacaccgtgagttttacaatatatggcaaagatttggtgtgctacctgaaaggtatactgttttcaaccaagtttttgttaatggagaacaaaagtacacacgtctagtaaggcaaaactagttcagttatcgatgaagcagaatctagatacatgcatttatgtatgtattatattttatagatatcttttggactatggaatgttgcatcctacagagaagtactatcccttgcgtcctgagtttgctgagtcaacattttatctttatcaagctactaaagatccttggtacctagaagtgggtgaaaccattgtgaggtcacttaattactatactaaagtggatggaggttttgctagcatcagagatgtttcaacaatgaaacttgaagatcaccagcacagcttctttctttcagaaacgtgcaaatatctttttcttctgtatgatgattcattcttgaggaatcaaaattacatatttacaacagagggtcatccccttccaataagaagcacgtggcatgagaaatttcctgcagcatatgttcccagcaattggacatctgttaaggatgagatccaaccaattcgcgcgagcgcattatcgtctcaagtttgtcccgagacgattttcggaagaagtgttggtaccccatgggagagtgcgtgccatgttccagatgcgcacgctagccacagatgcaggactgacgatgactgtggaatagaagcaataacatgcaagaagaggacctgcagtatggctggctactgcggcttatttttttataatggaaacaagagttccggctttagcatgataatgcgtacagccaatacaagtcgattattacaattaagaactgctgcatgaatagtgatactaactcaaaggaactaaattacaatactatgactaacactagtcatactcaattcttgaatttgagcgccatccatggtttgcgaagacttccatcgccaccacttccaaaacttgcgaagcaatgaggatttgttgttgcgattcctccttttgtagcagtctccagaatcttaaccagtgagtacatctgaaaataacctgcacaattgatggaattggtttat

SEQ ID NO: 26343 - DNA, 2894 bp, Zea Mays
cgacgcaccaccaagcccctgcccccgcaaccccgctgcaccgcgcccgatctctgtcgtcgacaccgccgcctccggcgaggccctttccgctcttgaggtttccacaggtgtctctcagcctccgcaccctgcctcgtgggtttccccgggctcccctgccccaaaccctaaccctagctcctggcgtggggccgtgcaggttcattccctgctcaatcgggcgccccatttggctccctctgccccccacagacccgtagggttgcatttcaggaaacagcgtgtctcttttctggacttgggaatctgagaagatactgtgcagtttaatggcacacactgctgactatatgcgcatataatgatgcatgggctaactgtgcttctctggtctagtggctattgagctgtgctctatgggaggtattgctgaatgtggtgtgagcattgacactaaagcttcaccacgccgtgcagccatagagaaagctcaggaggagctcaggcaggaatatgatgtccgtgaagaacgaaggagagagcttgaatttcttgagaagggaggcaatcccttggatttcaaacttggccatgtagcttcccttagtgtacagtccacttctgtgacagaacagatagctgaacaaaatgtgataagtgaggccaaaggtagttctgcatttgctacgtcatctcatggagattctgttgaaagcaacgacaagccaggaaattcattgtgccgtgaaggcaatacagccgataatcttacgcttttggatggagatgccagcaacctgggtgtggataaaattgtgaaacatggaactaagagaactaattcagctcaagctgagcagttcctgcactgtgatggtcagaacaatgcaaaagaagaagattctgggttgttccgtcttggtccaaagagccaagcgtatgcacgacgtaggtcaaagcctatcagagaaaatgcatatagtctatctgttatgtacccaccaattcctccattaagttctcagcaaaaagatgtgacaggattaatcccagaaaccaagactgaggataatggtgtttcatccattggtgattcaaaaccgactagtcctaactctaaaaatatggtgacaaatgcatcattactgaatgataaggtggaaatggagacagaaaatgttcaagcaattcctgaaggcaatcaagcaccaaaaaacgagttatcaaacagcaacaatggtagtcctgctatggagatttcaccaaatagtgtgcctgataattctcgtcttactgtaagtgatcagatggctactgcatttgtttctgtggaatccccagatgctatttcaaaagtagctgcttcaaggatagtttgttctctcccatatatatccaatgaaatattgaaagaagcacaaactcttgagaaggcaggtaataacccatctatggtaagtgtggttgacgttcatgcatatggtatggataacaatggtgcagcaccttactctgctgtgaaaagtgctagtttgaatgaaaatgaagttgatccaattcatgcatatgctgccaaagctgttactgaacatccagaccaaaatgagaatcttgtaccagtgaatgcagatgaaatggctgatgaaggcttgaatgagatcctacctgatgacaaggatgacaagaaagattgtcaactggaagttagtagtgggcctgtcattttgaatgacagttctactcctgtctatcctgaatttagcaatttcttttatgcaaaagatggaacagaagtttctaacaatgcagtagattcaaaaaataacgcagaacagcatgcttcttctaatcagggaaaagggaacatggaggaatgtaaagattctgatggaaacaatgcaagtgaatcgagtgttgcccaaaagctagtgtctgttattgtgctccctgcttcagacacaggcgatgtgagtaactttgtagaaaatgatgttgagaaatctagcagagatcaggagaaggtagcaaagaaggaatatgaagattctgtcgtggcaaagaaggatcacgaagatgctatcctcagaagggcacggtatatagaggcaaatattaagagggctggtgaatggtctctctgcaatatttctctagagaagaagcagaagagccactgggattttgttctggaggagatggtctggatggcaaatgacttcacacaggagcgtttgtggaaaaatacagtcgcagcacagatgtcccattggatttcttctagaggtcgagcggcatttgaagaagcaagcattcagagaaagcagaaatctgttgctagagttctagccaatggtattatgaacttttggtgttcagtccatactttacgagctagtggtggtattcctaaaccaatgcaaatacagcaaccgaatgagctagaggaaaataagcttggtggggtcaaaaccagaaaagcggatgaggagtgtttggagcaagaaaagtcccgtcagtctcctattcagagctttgcacttaggcttcttgagtataacattaatgcatctgaatttctgccattagccgaagcaccatcaactcctgacaggctaaatgattttggcattttgaaagtacctgatcaactttcagaagcaaatctcttttatggcgtagcacccggtgcaatgcaggcatacagggagtctatggagcgtctccttatttataataacaagatgccagctggtcattcaggtcctggaagtccatggtcaagttttgaggatcaggctcttgttgtccttgtccatgatatgggtgaaaactgggaattggttagcgatgcccttaacagcatcatccaattgaagggctttggatcttaa

SEQ ID NO: 26344 - DNA, 2826 bp, Zea Mays
cgtccccgcagtaggcaaaagaaaccggccctacgtgtcggcgacagccgagtaagcacgggccggctcctcctcgcccaacaaccaccgcggcgtgcgccgaccgtaccctctccctccggcgcaccgctctggttcatctccaactacatccaccgcgccccaaatcgcaccccgcctcccccattcgcgccgatcgaaccccaaatcggtggcgatgagcgtggtcggcttcgacgtcggcaacgacaccctggtggcggcggcggcgcggcagcggggcatcgacgtgctcctcaacgccgagtccaagcgcgagtcccccgccgccatcgccttctcccgcaacgcgcgcctcatcggctgccacgccgcgtccgcctcgtccgcgcacgcccccttctccagcgtcaagcgccttctcatgggcgccacggggaggcacccggactcctccctactccgcgacctgtcccgcctccccttccccgctgccgtcggtggcggcgctgtcgtccacgccgaccacatcggccgccgcatcgcgctctcgccgacccacctcctctccatgctgctggcctacctcaagcagctcgcggaggccgacctcggcggcgcccccgtagccgactgcgtgatctccgtgccctgctacttcactcaagcgcagcgccgagcctacctcgacgccgccgccatcgcggggctcaggccgctccgcctcatgcacgacctcgccgccaccgcgcttggctacggcctctaccgctccgacctcggcggctccgggggtcccacctgtgtcgcgttcgtggacgtcggccaatgcgacacacaggtcgcggtcgtctctttcgacatgtcggggatgaaggtgctgtctcacgggttcgatgcagacctcgggggcagggacttcgacgaggtgctgttcgagcatttcgccgaggagttcaaagacaggtacatgattgatgtcacaggaaatgtcaaggccagtatgaggttgagggcagcctgtgagaaggcgaagaaggttctgagcgcgaacgcggaggctgtggtgaacattgagtgcctgatagaggagaaggatgtgaggggggtgatccgaagggaggacttcgagaagctatgtgccaggctgctggagagggttgttgaaccttgcaacagggcggtgacagattcaaggattggattggagaggctgcattctgtggaactcgttgggtcaggttctcgtgtgcctgccattgccaaggtgcttaaggaattcttcagaaaagaacctagtcgcacactcaattcaagtgagtgtgtggctcgggggtgtgcattacaatgtgcaatgcttagtcctacgttccgtgttcgggaatacgaggtgcacgatgcaatccctgcttccataggattttatactagtgacggcccagtttcaacattgtcaagtgatgcattgttccggagaggcctgccctttcccagtgttaagatcattactctacagaagaacgacagttttagttttgatgcctattatgtggatgcgaatgaattgcctcctggtacctcaacagacatcggtagttttcagattggcccattccaagcacatatggaagcttctaaagtcaaagtaaaaattcgtttgaatttacatggtttggtttcagttgaatctgctgctttgatagatgattatcaaaggaatgcaacttctgctgaccatatggaggtggataccagcggtgatgacatgggtcacaagtcaagaagtgaaaggtctatccagcggcaggagttgccaatcactgagtacatctgttgtgcaatgagcaagcaggaactgctggaagctcaggagcaagagcaccaattggcttatcaggataaacttatggaacggacaaaggacaggaagaatgcattagaatcttatgtatatgacacccgtaacaagctttctgagaggtaccggagctttgctactgattcagaaagggaacaaatctcatttaatttacaacagactgaagattggctttatgaagaaggtgatgatgagacagaagtggtttacagtagcaaacttgaggagctgaaaaagatccaattgaaaatcgttgtaatgatgacgaagtgagagctgaaatcgcaagggagcttttgaagtgcattgttgaccacagaatggctgccaagtcattatccgcacctgaaagggatgctgttgacaatgagtgcaataaagctgagcagtggctaagtgaggggtccaaacttcaagaatccttgcccaagaatgtggacccagtactttggtcctgtgaaatcaagggaaaggaagaagagctggatatgttctgtcgaaacataacaaggcacaagggctccccagcaaggacagatggcagcaggggttcagatcacatgcctacacctgatagagattagatatattcacaaggtttcttcactgtacgactgataacaccgtcatataattgactctgtaccacactaggcccgcattaggtgaccgcttcttggttctccagggtgttgtgcagttttcacttgagagcctactaatcatggttattgatacctgttaattctttttctgtactcggaccatgggtattgtctgcttcagtttgtgctgaatgaacaggaaaactaaccgcgtgtttggttggtggacgagtgcgtgcagctgtatgcacggagcgttgaagcatggtttgtttggttgccgcaccgcacacacgcaaactaggatgggttgaatctatgacaactaagatgtgattgtac

SEQ ID NO: 26345 - DNA, 1235 bp, Zea Mays
cgcagtgtaacaactaacaaagcttcattaatttttttaataaatcttccgaggcgtccagcgtcctcccggcgacgacgcttcccgagctctctccttcccgcgaccctctcctctgccccgctccactagggttttgccgcagacctctcgctcgcttccggttccgcgaggcaaccgtccgaccggtcggaatggtggatgtggaggagaccgggaacaagttgcaatcgcagatgcgcctccacgcggagccggaggacgacgccgccgacctccccctcccggccctcttcgatagggcgtcgcggctccacgccctggcctccagctccgctctcgaccaggatgggatccgcacgggggttgacctgctgcggcgctgcgacgacatggtcagcaagctcggcctcttctcccccaacgagaccaaggaggacgtctccacagcaaacctcaagtacctactggtcccatattaccttgcagaaatgaccgaaaagatagcacaggaggatcggatcccggttcttaagacgtcacaggaccatctgaaggagttcattgctctatgtgaagtactagagcttatcccagaggatgagctagaattgtctaggcagaagcagccagatactatgacaaacagaagagcgcagaaggttgcccggttcaaacgtcaaaaggctgcagaaacgaagctccaagagatcagagagagaaaagaaaggcgtggacgctcattgagagcagctgctttgtctgccccaattgaagctggagaggaagatgacctggagaatgatggggaggaagaaagagaggcttggttagctaccatctcattggctctctgcaaggcatttgatcttctcgacatgctaaagaaggaagaagaaatgcttcaagctgtaaaggaaaggaaggcaaaggatgggaatgcatttgctcgtgaaatgctcgatgaacgaacgaagaaggccgaaacatggcaccataatgctgccaaccgtgtggcatattccaaaccagctgatcctatcacttgtgcaacatttgctcaagatgtcattgaaggtagagcaagcgtttcacaagctcacgagcacaaacaccagcccctgatatttggacctgcaagtattgttggtggtggtctaaccagtgaaagggaaagaatgacagcgcaagtttttcagcctagctacagccataagacagcaacaagtttcaag

SEQ ID NO: 26346 - DNA, 985 bp, Zea Mays
gaccgggaccaggcacaccacgcacgcagagccctagaggcattcccaagttcgagcaatcgagccccagaggaacgactcctgccggacgccgccacaccatctgaaactgacggcggcgggcggccgctgcttcctctcccttctccgttcagatccggctactggcgtccctcctccgccatcttccctacccccgacgtggcgacgagctgtgagccgtgagctgttccaacattcctgtcctagttcaagctgaaaggagaacataaaagaggagaggctagggttttggcgtccgagaccaaaccaagctctctccggcgacgaggtcatctccgtcatcaccaacgatggccgcaacatcgtgggtacgctcaggggattcgatcaggccaccaacattatactcgacgagtcccatgagagggtctattctagaaaggagggagtccaacaacttgttcttggtctgtacattatcaggggtgacaacataagcgttgtgggcgaggttgatgaagagctggattcaagattggatatgtcgaagctaagggcgcacccactgaagcctgttattcactgaggtccgagtatgtctttgggtaatatgtggactggatggatgggtcactgttgaatgcaggatgtagcatcatcatggtgaggggactgagtaatatggacatgtatcttgcgtattgtgcaatgaatgtgttggctgttgggtcgcttgcctacgcattctgtaagattgcagttaccattaggaactgaactcaactcgactgaattaatatcatttggctctactcgtagatacagtatgcttgatttgactcgaaatttgaagaatgaaagaaataggactcggaaacagtgaaagtagcatagtaaattatttggatccacgcaaattaattccttggtagtaagttggctactttgttctaagaatatattataaggatatacttctctg

SEQ ID NO: 26347 - DNA, 4354 bp, Zea Mays
ctcgcacctcgcctctcgatccaccattctccgtccgccgtcacccacgcttgctggctccgccgacgcatctcgcaagctgccagcgcccccctcgcccctctccactgtggtccgcagccgcttggagcttgcagcttgcctgttcgtcgtctcggtcccagccggcagccggtcaaccctccaaccccctctctaggcggctaggcagcaagtctcccaggctggcaggctcccagccggcagcggcaggagcccgcacaatctgctcggcccctggcccctaccatgcttggccgcctgggcaccttggtgctaaacctgctgaggcagagagtagaaaggacatgacatcgctctactaactggccaccgttgcagctccagcaagtcgccattgctctagagatccacatgtggttctcggtgcattttcgtatcttttagaattgaactgtgaaaaacacaatggcatcgatcttatctggagcaaggagccttcactcactcgctctgctatcgcggatgttgggcgagacgactcagctcggtccttttaaccgcagcgtgcagcggaggtggagaaagcctgtagattcggcaagaacacgtcttgagggaagaacgagggatcataggctggacaaactaatggttcagctgaggaacttgaggctggccttggctttgcatgaggtgatatctcagcagaggaacggatacgcgtctctccagctcctctcaaggtggaggcatgaggtcgggctgaacattgaggtcggtgctttcctcaagaaatacccccacgtgtttcagacctacgtgcaccctgtcaagaggaaccactgctgcaaggtcacgcagaagatgtccgacttgatcgcagaggaagacgctgtggtcagggagaatgaggtcggcgtagttcagcggctgaagaaacttctcatgctctctgtggatggaactctgaacatgcacgcgttatggctcataagaagggagcttgggcttcctgatgattacaggtcctctatactgccgaaccatcgacatgatttaattctcaaatccccagatactctatcacttttctctagggatgaaacattggctgtagctaaggtcgacgagtggaggaaaagggagtacacagaaaaatggctagctgaatcagagacaaaatatgctttcccgatcaacttcccaactggatttaaggttcaaaaaggtttcagggagaaactcaagaactggcagaggcttccctacaccaaaccttatgagaagaatgattcgcatccgatatgcaacgtggagcggcttgagaaacgcattgttggtgttcttcatgagcttttgagcctgacggtcgaaaggatgatgccacttgagagactgtcacacttcagaagattgtacaccatggaggtaaacctgcgagaattttttctcaagtatccaggcattttctacatctcgacgaaaggaagcacacagacagtcatcctaagggatagttacagtaaaggatatctgattgagcctaaccctgtgtacattgtgcggaggaagatgctggacctggtattatctggatctcgtaacgttggtgaatgccaacaggatagtgcaacttggtcagctgaggagcatgatctgggaagcagccatgggtgccaggataacatatgctaggtggattctgcaattccatactggaacatggagttagaagtgacgcatggaaagaaccaattaactcaaccatgatcttgctgtaatatctacatataaaaatacctactgatatcgtctgcccggggtgaagcgatgcctagctgcggcattgccctgcctagcctcgcctcgtctccggcacgcgaacacccagctcggactctgtaaagaggaagtttaccacaatctctggtggactttctttgctcactgcccctgctcctccatcgctctcgtgcgccactgttctccatggatctcttcaatttgatgctaggtggcaacattgcacctagcaatgctatttttactatgctgatcaaggcatatgctaactgtggaatgctagatagggctatgattatcttcaatgagatgagagcaaggagtgaaacctgatgtggtaacctatttgacagtgattggtgccctttacagaattggtaagatggatggtgctgtggaaaaatttaatcatatgattgatcaaggagtaacacccaaaaaatctacttactgttgcctgattcaagttttttgtattcatggtggtttactgaaagccaaggaattggtttggaaaccatgaataaaggtatgtgtcctgacattgttttcttcagttcgataataaacaacctttgcaaactaggaagggtaatggacgcacaaaatatatttgacttaactgtaaatgttggtctgcatcctactgttgcgatgcatagtatgctgatggtgggtactgtcttgttggcaagatggagaaggcatcaagggtatttgatgctatggtgtctgctggcgttgaaccaaacaatgtagtgtatggtgtacttgttaatggctatcgtaaaattggaaggatcgatgatgagtcttttcaaagaaatgttgcataaaggaataaagccttcaactatttcgtacaacatcatacttgatgggttatttcaggcagggagaacagttcctgcgaaggtgaaattccacgaaatgactgaaagtggtatcacaatggacaaatggacatacaacataggtcttagtgaacattttaaaaacagatgctctgttgaagcaatcttgctttttgaagaattacgtgcaatgaatgtaaagatcaatatcaaaactctcaataccatgatagctggaatgtttcaaaccaggagagttgaagaagctaaggatctgtttgcttctatctcgagaagtgggctggtgccttctgttgtgacttacagtataatgatgacaaatcttataaaaggattggtggaggaggcagatgatatgttttcatccatggagaatgctggccgtgagcctgattctcgattgtgtggttagggaattactagagaaaaatgaaatggtcagggctacaacgtacctgtccaaaattgatgagaggaatttctcacttgagcattcaaccacaacattgttgatcgatctcttctcaagcaaaggggcttgtagggaacacataagatttctccctacaaagtatcgttttcttgcagggggctcgttaatgttcgattgcaagcagcagtcggtgatccagcagctcctctggcgcaaggggcgcctgatagtgatgtgttcgagggggacgcctctgctgtatgccccagtggatcctgcagagtcattcaagttctagagtttgtagattgtctccagccagtgattaacataatcccattacaggtttgtttgtctaagcttgttttgtcatatttttttttggtacagttcactgttcactgaacaaattctgctgtttttttggttcaattgctcgcgtaccatacataaatatcgattagttgaggtatgcagtttatttcctgattcagcctaggagtactttaacggcttattggaactggtctaattcagcactggagcaacaagggagcctaagctgcaaaaatgtggattgttccaacctgtgcatgtgttctggtgttagtttcttcagagcggacattgaacttaacagtgcaattttttagaactttgcagcagttttaagcacaagcacgcttcatcgacaataaattaaattcaaatcaacctgctggtttgtgatacgtaaaccatattatccattttcagcaaataaggttggtttgcacttaatttgttgatgatgaagcgtgcttgtgcttgaacctgctgcaaaattctgaaaatttgtactgtaagttcaatgtccgttcagaagaaactaacaccaggacacatgcacaggttgctacaatacacattttcttgcggcttaggctcccttgctactctagggctgaatcagactagttccaataaactgttaagtactcctaggctgaatcaggaaagaaactgcagatctcaactaatcgacatttatgcatggtattcggtgattagtagtattgtgatatgcacaggtcaaatttattattgggaatcatatacatctaaccagctttcaactcttctttcctccttataagatctatgatatcttcaagtttcttccgtcgaagattcagagaatagctggagcttcaaccaacgatgaggccttgttcggttataggattgagatgtattgagg

SEQ ID NO: 26348 - DNA, 2170 bp, Zea Mays
ggctaccggcgcctgctgcctttcctgaacgagatgacgaaaaacaatagctcaatcggcaaggaggtgttcctgcaagacacggctgcacacccaacggatgagctcagccgatctgattctcggttagctgatgaatctataggcgttagtcacagcgaacctgatgccatggatcctgtcgagccggcggtggtgagcactggaggagacaccgatgggaaggctacctgcggcaatgtcatggaagagaccaagactgcccctcatgacctaactaacaagccgttgcttgcccgatgcacaaggtcgaggtttgtccatcatccaagctcgttcagctacaagaggatgctgccatttctaatggaagacgaaatatatgctcaagaaagtggcagggtcaaaattcgaaaagttgctgaggaaaggcagtttgcggcaaacaagcatgatgcctcagccaatgggcagcagtgtcttgctgtctcggatgactcttctcaggaaggcaatagagctcaatttaaaatagtggaagaagaaaagccactaaaagcagatgtgaatcatattcttgatgacagacagcttaagcctcctgtcatagaagcgtctcctgattgtagtgcaactgaagtgcaaaatgtcatgcagcaagaagctttagcttcaagtcaagttcccctaacttcttttgatggtgaattaacatcagacggggacaatgtccagtccattggacaacatcagcttgttgtatcagaagagtctcaagaggaatgcaaaagagatgaagtcaacagaagcattcacgatgaagcagtacaatcagatgggggctatgctctggatagcagagaatttcagcctgctgcatcagaagtctcttgttcagaaaacagcatggctggagtgcaaggggctgcacaagaagaaccgttacctttagatggagttcaggaaaattcagacatgggcgacgatgtttccacagagcaggctcagctctgtgtcacaagtgaatccttgtctgcgcagctgcaaaacaatgctgaattcgctgaagtactgccgtgccaagacttggactcaggatgtcacgacattggtttcggtagtcctaccaagagagtcgtaccatcgttgcatcggcattgcgcacaacaacctcaggactctgtggtttctcatgatgatcagcttcttgacgatgacatacaaatggtcggcagactttctgatccctgtgctgctgacagatcctcatcaatggaggaaatgtctggccgcattctgttcacccaatcagcatcgagcaaagcagccatatcatggccaagtggtgcccattcaatggaaaaaagagctcggtctcctaaggagctttccccaaagaaagggatactcaagaggagtacacgggggtgcaagggtatctgcatgtgcctggactgctgtacgtttcgcctacacgccgaccgagctttcgagttctccaggaagcagatgagagaagccgatgacatcataagtaacttactgaaggaggtggacagtcttaggagcctgctggagaagcatgctggccaacccgaagacaggcctgccgggtgcaggaggtggccaggaaccgctgccagcagatgtttgcggatctaaactcccactgcagaatccccggaccaagggttaggttcgccgaatacgtcgaggagaaggccgcgtcgtctccacgcaggagcagccggaggtgactggatttcaggaggtggcaggtgaactggcctgcccgatcgtgttgctgaattgttcggtacaataactaagtagtgctgcttggcgaaccatcacccttgtcactggtttgtgttggtttgccatgctttgagctttgagttttgtactgtatactatgtgttccctacattccagaaaattgtaagtcgatttgactttttagttatatgcctagttacatagcaaaagttattacatatctagaaaagtcggagtgacttgtaatttgaagaggaggggatacaatttatatattcatagacaatagcttcagattcgttgagttggtcagcatgagttctggtttgtttcaggtcttctttttgaacgttagactgtctccagcagcgtcccctaaatttcgtcccct

SEQ ID NO: 26349 - DNA, 1043 bp, Zea Mays
tggattgccgtctaaacaaacatgccctgaagatgtaatctactaatgtttgcttcatacaacattcagttatggtgttgtgccttgactctttgtttttgccaattgccatctagaagagctgaaggggctccctatttctaaaacatttctttagcgatgtccactgatattgacagaggagtatgcactctgtgatcgatttcagagatggactgaactggattggactgatgccatgccacatagccatagatatatgcagatgtcaacttataatgagactgttcgctgagggctaagagggtgagccaaatatctgagaaagtggcgactgggattttgtccggagtggtgaaggtcactggttacttcacaagctctctggccaactcgaaagctggcaagaagttcttcaacatgttgcctggagagatcgttcttgcttcgcttgacggatttgggaagatctgcgacgccgtggaggtggccggaaagaacgttttgtccacgtcgtcaactgtgacgaccgggctagtatctcacaggtacggagacaaagccgccgccgcaacgaacgaagggctggacgccgccgggcacgccatcgggacggcatgggccgtgttcaagatccggcaggccttgaaccccaagagcgtcctcaaacccacggcgctggccacgtccaccatcagggccaacgttgccgagcttcgcgcgatgcacggcagcagcaagtagctcgcgcctgccgtccctgtttcgtaaaaactctattatctcgctctgtcacgaccaacgatgcactcgctgcttccagcagcagcgttggctgttgcctgttggcctgtaaattcgtgtggctgaaactgggaaagccgggaactgaaaggcttaccgcttccgctttgttagtgatgctggtgatgttctaagagcttttaccactgctgtgctgctgcgttggcttgaactgtcacgagttgttcggttttggcctctgaagtctgaaccaagtaaaaaaaaaaactaactaataa

SEQ ID NO: 26350 - DNA, 3010 bp, Zea Mays
cgggggtgtggtgtggccgccgagccgaaagcggcagcattcgtcgtctcccagatgcgcatgcggcggtagctagcttccgtcaccgctcccccagtaggccagtaccaccaaatctctagcgaggccgcccgcaaccgtgtcccggggttgaggatctgcgcggggccgtcctcgcgcgcgccgccgcatccccgccgtcccactccggcgaggctggctgcgttccgtcgtcgtcccccgcaccgccgctgactcctggaacaggaaccagcttcttcgcccccaccatctcacgtccagcgtcgcgaactcgcgatggcgggcgccgccactcctcctccgtcgtcgtcgtcgtcggcgtcgtgtggcacggacgctgcctacctgctgttccgcggggagacgctgctccccgacggcgtccacgcctccctctacgccgtcgctctcgcgtactgcttcgtggggctgtccgcggtcacggcccgcttcttcaaatccatggagcagatcatgaggcactcccgggaggtggtggtcggcgtggacccgcgcaccggggcgcccgtcgtgaggcgcgacaaggtgtggaactacaccgtcgcggacattgctctcctcgccttcggcaccagcttccctcagatctccctcgccaccatcgacgccatccgtaacctcggtcaactcacagcaggaggtctaggtccaggcacacttgtcggctctgcggcgtttgatctgtttccgatccacgctgtctgtgtgcttatgccaagggcgggatcaaagaagaagatctcggacctgggcgtttggttagtcgagctcttctggtctttctgggcatatatctggctctatgtcatcttagaggtgtggacgcctagagtgatcaccctctgggaggcatcgctgacagtcctgcagtatgggctgcttctactccatgcgtatgcgcaggataaacgatgtccatttgtgtcgatcccgttgtacgatcccgattcctgaatgaatgcctttttcttttgcaaacttatctcatggtcatgtgtgctccaccagaagaaggttgggtgtatgtatgtagtagcttatgtttttggttcaatctgctgcgatcagtgcgagaggtgagaggcctgaagattgggttccaccagaagatgtttctgctgtttattacgccaaatgtgatggcattgacgagacactccctatgggtgctgacgggaacgatgggattgtagacatcttctctgcacattcctactacgatgcagcagtcaacttgcagaagaggatatggaaggatcgtcaacaatggatcaagttgtaaagaacacacaagataacatgtcctggctttctatttggtggcaacaatttgttgatgcttcaatggtaatttggttcatttcatttatgggacagatgtgcctaacccttttaatacattggacaccataactagcatggtgcatggactgggaaatatgttctagacttttattttacaaatagttgatgaatttatttctaggtgctgctgagacaaatttgtttcccagagatagttatattgaaatagtttaatccacaccccttcccatctagccaggagaaaattcagtagcattaacatttgtcatttgccagtcttaaaactgagccccaatattaagaactttctgttttttttggcatagtaattgtttttttagcaatacatgcagttggagagccctgagtcaatgaagatggattctgtctgcctgaggtacaccagaatattttggaacttgatcattgcgccttggaagtttttgtttgcttttgtgcccccataccacattgcacatggctggattgcttttatatgctcactgatcttcataagtggtattgcttatggtgttactaagcttacagatcagataagctgcgtcacaggttaaattaaaacatactcaaaacacaactttaatgttcaatttgctgaccaagatgttaccttcacgtatgaagacaaaaaaatcttctgttttgagcaggagtaagtccatatgttattgcattcacagcactggccgctggaacctcatggccagatctagttgctagcaagatagctgctgagcgtcaagtcaccgcggactctgcaatagccaacatcacttgcagtaactcggtgaacatatatgttggcattggtgttccatggttgattgatacagtgtacaacttcttcgtttaccgggaaccattgtacatagataatgctgccggtctcagcttctcccttctagtcttcttcgcgacatcatttggatgcataacggttttggttctgcgtcgtattatactcggtgctgagcttggaggccctaggctatgggcttgggttacatcagtctacttcatgatcctttgggttgtttttgttgtgttttcctctttaagagtatctggagtaatatagacaggaattaaaaaaaaaaggtagtgggggcttcgattttccataaattttgttgcaattggttttcatatccacaaagaaaacaactattgcgggtgaaaattagggtctgtgaattagggattatagatacaagtgcttgttctatataatgattactgatgaagccaacaatatattgtgtagtataattgaagttattgtatcagaaagaagggagaacagttggatagctcttaaattttttattcaatcagagtgttgcattatcaatcatacatgtaaatatcgaggcttatgttttgctagcattgtactactactattatgtttttatgggttaacaacagtacattggacataggctgcctcacattcatatgttttgctagtaactagagactgtataaggatatagaattcttaattcttgcactccctccgtttctttttattagtcgctggatagtgcaattttgtactatctagcgactaataaaaagaaacggagggagtatcata

SEQ ID NO: 26351 - DNA, 1122 bp, Zea Mays
ttggaactaggaacatgacacaatgagtagtggtggtgtgtggtaggatgtggccttggacctcgctggtgcggttgagtcgccgtggtcggcaaccatactgtcaaggcagggatataaacacaaggagctgcagattccatgaagatttgtcaactccaattaacagctacacgattttcaaaacagaataattctggcgaggatgacgagctcctttctgaactaaaagataaggttgcatacaaagttatattcctctatgctaataatcttggcacaaaaaattacgatgatgtttactacagtgggatgcaatggagaacaagtcctctcttgccttgtatggtgctggagcaatcctcgctgtctggatatccttggtcgtagtgagatctctcgactctgtcccattgctcccaggcatattggagctagtcgggctcagctactctggatggtttgtgtaccgatacctgctttttcaggaaaaccggaaagaattggcgggtgttatcgatgatataaagagaaggattgttggcgatgatgaatagctgtttcctggtttgtaattctatttatctcgccctgtttggttctgaggaattgaaaaataatccaatggtgaagtgagaaagcactttctagctattggttttaattcatggggtccaaacaggctcttgatagaatcttgtaggtttctgttcttaattaatgccagtcagagctacgaggtattggcctttccacatctcttgtgccgtctgcagttgaacatgttatttgcagaatctttttatttagcatggtctagaaaaattcttgtatcatccgtatattccgctgaggtatggccttccacaccaagatgtacctccagtttagcatggtctacaaaaaaaaatattttattctctgcatatgccgctccagttcctctcaaattccctgtgctgccctagccagaagttagccgtcagagcatataattgtaataagatataaaatcatctgaaacataaccggtagcacttttgtcctcacctgctcaaccgagcacctgagtttcggcttttttttaagtaagaaaaaagggaaaatctaaatcgattaaac

SEQ ID NO: 26352 - DNA, 2591 bp, Zea Mays
caacatcgagacgcggagacggagacttgaccatcagcaagtaagacttgaccatcagtctgcagagcggagcgaggtaactgcatatgcatgctaatggcgaaggcgacgagtcagcacacttcacacaagctttcgcgacgcccatcggcactagctagctagctagcaggacggcggcgatgagctccaccaccacaaccacaacacgtcttctcgtcatcccgcttgtctacttgatgctcgttgccagtgccagccatagtgccctcagctccgcttctctcttcttcgatgtcgacttctccaacgcctccacgttcagcctcgcggacttcacgaccgccggcgacgccgcgttccacggccaacgcttcgacctcacggcgaacgcgtacagagcggggatctccgacagcgtcggccgggttgcgtacgcgcacccggtgcctcttcgggacaacgccacgggccaggtggccagtttcaccacatccttcaccttcgccatcaacatcaccgacatgaacaacaagggggacggcatggccttcttcctcggcaattacccctcgggtctgccgcccaggtcggagggaggcgcactcggcctctgcaccgactactgcgtcaaccggaccgctggcagggacaggttcgtggccgtggagttcgacacgttcgacgactcctgggatccccacctgacctacgaccacatggggatcaacgtgaactccgtcgtgtccgtggccaacatctcgctgccgagcttcagcctgaacgggcagatgagcgcgcgggtggactacaacagcagcaccagcgtgatgggcgttgacctgagattcgaccgcagccccaagttcggcagcgctacgcctatcttcaacgtgagcgccaaggtggatctcagctccgcgctgccggagcaggtggccatcggtttctcggcggcgaccggcgcgtccatcgagctccaccagttgctctcttggtccttcagctcggtagctcctgggactgggagcccaaccgatccaggtgctttggcttcatcgaatcccagaacaggactgaaagttgctcttggaatcactagctcgatatccatcttgctctgcgcggcagttgttgctctgctccgtgcactacgaaggaaacacctggcgttggctgagatacagctagaatcggatgctcgaggaaggctctgttagcaacaactgggaaggggatccaagaggaagagctcagaggagaataagacttggagaagggaatagctgggaggaagacgagtttgtctgatatttgatagctaaattgttcatgcccctattacacaagtgtttgtcttttatatagtactactcgaacatcaagcgacccatagatagctgacccactacttggcccatattggctcagtaaccttggcgtttggacgatggactctcacgtgccgtggcttgttctcgttgtctgctcattgctcctgtctgagatgctgacattccccaccgcttgaaatacagcttgtccccaagctgtgatatgcataaccaccaggatcccaaactaagactttgaaattgccttggccactagcaacagcacctagactagaagaaacaaggccaacaaccatatcaattcctgaaccagctcgacaaacgattgctgtggaggaatggcttgggttggctttctcaaatggttcaccgaacgtagctgagattggatcactaatggtgatggggaagcggtcgagcttggcttgctttgccacagtaaccgaaagtcttcccagagcttgaagctcccagtcactcgtatccacattgacaccaagttggacaaaaaatccatgaactgcagttaagcttcctccaatggtatgaatggtgtactgaattttttgctcttctatctttggtgacatatttccaagagaaaatgtgctgaacctcagagattttattcccaaaggccggtaattatccatcagtggctcccaatcgtcgtccaacagcagcatgaaattcgtcttgttgaacactctgtagagcacaccaaagaatcggacaaacaacttttgcttgtcacgggaagtgactgacgactggacatatggctgacatttctccattcttgagcttcggctggctcccaagccgatggaaatttttgataccgccaagatgatatgccatggaatgtgccagtctgtaatgcggaatagcagatcgcagccacaccagacctggacatctgacacccctaccactatgtagtcaccagttgaaaggttgagctcggtattgccctctgctccatatgactggatttggattgcctcaaccaggaaatactccacgatctggaagttgcctcctgtcttaatagcttgctgtttggtaaggacaacaacaagcatgtgttcgttgttcttaagatcattgcagccgccactaactttcttcaaaagatggtaccacgaaggcccttctccaggagtcgatctcaaaatgtctgttgggcgtagtggcgagaacctcgtcctccttgctcggcggcgtgtacaatcg

SEQ ID NO: 26353 - DNA, 892 bp, Zea Mays
agtcagccgcctgcccctcaattcaccgcccctgccccctgtttgtctcgtcgctgctacccacccatgctccccccaccaccatggcctcgacctcgtccgtctggtcggtgtggatcgccctgtcgctgacgctaacgcttgcctcggcatcaccagctgacgggcaagggggcggaggagcacactgcccgcccgtgctatgcggcggcgtggagatcgccttcccgttcgggatcgtccaggagcaggcgacggccaccaactgcggcgggatcgggttccaggtccgctgcgtcaacggcacgccgtacctcggatacagccggtacgaccactggctccagatcctcagcgtctcctacaccaacgcctccttgctcgtcgccgacacccacaagctcgagaagctgggagcctcggacggcggcggcgactccgccgtctgccgcatccccgggaacaacagctccaccaaggtcgccctcccgttctccatcagccctctcaaccaggacctcatcctgtacaactgcaccaaggcgccggcgccggcgccggacgaggaggggcttgtggagatgacgagatgcggcaaccgcactttcgcccgcatcggagggcgttacggcgagccggacgacgacggcggatactccttggacggctgcggtgccactgtcgtgcccgtgcttgtaaaggacgatggcaaggcgaacgcgagcgactacgagcaactcataagtggcggcttcctcttgacatggcagtggcagacaagcaaatgactagaagggctccaaccaagctagcgcttaaatctgcctaaagcttcctagtcctaggcatgcaattcaacgcgttgtacctttttttgaatagtcatagtatt

SEQ ID NO: 26354 - DNA, 1579 bp, Zea Mays
gccactttctgcccgcttggagtccccgtcttcgtcgtcttgtagtagcactgagtgcgggagtactggccggccggcggcgaggctcctccactttctctgcacccatacatacgtatatgcttgttctccgccgtctccgcctccgcctcccactgccacgccctcttctcgtctcctccttctcctccacctccccctcctcctcaccctcgacctctagctcctcctcctgttggtcgtcgacaggcgaaagtagaagggccatggcgtcatctccttctcccgattcggccgcggtcgttgccgagggctccgcggctcgccgcttctggatcgctgcctccacgcgcgaggccgccttcgccgcatacacgcccttcctcctctccctcgccgccggcaatctgcggctcaacgtgtttcgccactacatcgcgcaggacgcgcacttccttcacgccttcgctcgcgcgtacgaaatggccgaggactgcgctgatgatgacgacgacatggccaccatagccgccctcaggaaggccatcctccaagagctcaacctccactcctccgttctgaaggagtggggagttgatcctaccaaagagatacctccaagtgcagctacaaccaaatatactgatttcctacttgcaactgcggctggaaaagttgatggcacaaaaggttctgacaaaatggttactccatttgagaagactaaaattgctgcatacactgttggggccatgactccatgcatgaggctttatgcatatctaggcaaagaactcatggttttccttaaacaagatgaaaatcatccatacaagaaatggattaacacatatgcatccagtgattttgaggacaccacactccaaatagaagaattgctagacaaactaagtgtctcattaactggtgaggaacttgagattattggcaagctctaccagcaagctatgaaactggaagtggagttcttttcttctcagcttatagaccaacctgttgtagctccactttcaagatactgtgatccaaaatataaactcttgatcttttctgattttgatttgacgtgcactattgttgattcatctgccattttggcggagattgcaattttgtcattccaaaaggcaaatcaaagtgggattgataataacctcgaccgtgcaaaatcgggagacctgagaagttcgtggaacatgctctctaagcaatacatggaagagtatgagaaatgcatggaaagactacttcctccagaagaatcgaagtcactagattatgataaactgtataaaggcctggaggtgctagctgagtttgagaagcttgcaaattctagggttgtcgactctggtgtgctgaggggaatgaatttggaagacatcaggaaagctggtgagcgtcttattcttcaaggtggctgtaaaaatttctttcagaagattgtaaaaacaagggagaacctcaatttggatgtccatattctttcctattgctggtgtgcagaacttataagatcagccttctcatcagttaactggcagtttctttcctttgc

SEQ ID NO: 26355 - DNA, 2646 bp, Zea Mays
acgagcaccacctcgccctcgccagattccaaagggagtgggccaggcaaagtcggctcttgcgtcgacatcgacggggagaaacagctgtgggcaggcgatgaactgtagcgcgtgacagtgaggggatttggttggatccaatgtttggtcggtctgcttgcatcacctggttgcagctctgcattttctggctataaagcgacggggcccttgcgctgggcgcggagactggagagggcgagagtcctcccatccacaagttcttagcttttgcgagattgagatccggctggggacagaccgacagaggaaggaggacagaaaaatggggattggagatggatcttcaaatgggaaccagcaaccggtgcataaggaaatacgagatgagaccacaccacttcttccagtcaaggtggaggaggacgaggggtttcatgagttcaatggagcttcattctctggggcagttttcaatctgtcgaccaccatagttggggctggaattatggctcttccagcaagtatcaagatgctgggcatcatcccggggattctgttgatcatccttgtggcactgctcacagaggcatccatcgacatgcttgtaaggtgcagccaccagggcaagattacatcatatgggtggctgatgggcgaggttttcgggcagtgggggagaattgcgctgcaggcctccgtcatcataaacaatgttggcgtgctaattgtttacatgattatcattggtactcttaaactcagcactctacatctaatcttatttttgaaaatttgagatgcacactaaaatgactcggtatgagtagttatcccagtatactttttattcattcagcccagtatactttttagtcctttttacctgagatcatgacacactctttttgagcatgcctctggagccccaaatcaatttttcctaaggatgttcatatacaatattttttttaaaaaaattcgttccatagctttagatatgggtttcttcagtatattactctctgttaattcaagaaacttacctatgacctttatgatgatagtttctctcctgttagagagagaaagagagaaatattcccgttgtgcaacaccttgtgccttaaactgaacaacctatgcaatggagaatgtactgaaattgatactggttcttgatactttgataggtgatgtattatctggaacaacatcaggcgatgttcatcatcgtggtatattggagggctggtttggagctcatttgtggaattctcgtgccattgttcttcttgccacagctcttttggtgttcgctccgttggtgagctttaagcgcttggattcattaagatacacatctgcgctatcagttgccctggcagtagtttttgtcgtaattactgctgggattgccatcatcaaactcttcaatggaactgtagcgatgcccaaactttttccagaattagatggtcttaattctatctggaatctttttacagctgtccctgttcttgttacggcctatatctgccactataacgttcacagcattgacaatgaacttgaagacagaacacagatcaagccgattgtgcgaacatcgctgttcctgtgctccagtgtttacattgccacaagtttctttgcttatctcctcttcggtgaaggcacactggacgacgtgctcgccaactttgacgcaaatcttggcattccattcagttcagtcttcgatgacatagtgcgagtgagctatgcagcacatgtcatgcttgtctttcccattgtcttctttgccctccggctcaacttggatgggttgctcttccccacgtcaaggcacatctctcgtgacaacaagagattcgccatcatcaccgtctctctcctcgcagtaatttatcttgctgccattctcataccaagcatctgggacgcgttccagtttactggtgccacagctgctgtcctgattggttttatatttcctgccatggtcatacttaggtaactcaatgtttagttcttggtgtatgttgcctactactagccaagccattttgtatagcatgtaatatcgtggcttgaatttctgcagggattcttacggaatcgcgagcaagcgcgacaagattctggctgtaaccatgatcgtgcttgctgtcctgtcaaattctgtcgccctatacagtgacgcgatgaacatcttccgtaagaaggaagtggcctgatctcagatttcaaaagtagtcagtgctggatgaagaatggtctcgcaatgcaagactcgatggtacgaaggaaaacgatgcgcttggattccgtgaaggaacgatttctttgtcagcacctcagaatttggccacttgaaagaatctgatgcttgaagtttcctggttctgtgtacacaagtcggctcaatgtcagaattgagccgcttgaaatatatttagttatattctatgcggagagtaggtcttggaaacagccttttccacaataatgtacagttattatgccaatttctgagttcagttaaattttgtgaaatatggacatgggcgtcttgtctcgattaaaattgagaatggtatgattgcacattacgtcgctaccatgtttgtttttgccttc

SEQ ID NO: 26356 - DNA, 458 bp, Zea Mays
ccccactgcaccgcctctcccacgcttccgccgacgtgaagcggattggaaaaccggactagccgcagcgaaagcaacaaacgcgtcaaaattctcggaaacgggccccgaaaaccctaccgcgaaaaaaaaacattcttcacaccacaaacaacacacggccaaaatgcaaacgcacgcacccactgcacgaacgcgcacctaactaagtgagccgccggatgcgacgaaacagaggcagggacgatcggcgttcctccagcggcgtgatcaagccgccggcggcggcgcgcctcctgcacgagacgccagaaacggacgacgtccggcggcacgcgatcgccgccacctggctaggatctggaggccaaacgattccggagagagagagtttttttccaggatgcgaggggtttcggcacgaggtgtatctgggagagcaggctgccctccgccga

SEQ ID NO: 26357 - DNA, 1156 bp, Zea Mays
ccaccacggctcttctccctctgccttctcgcatccacacaccaaagacatcaggcgtttttatctgccctcgattcgatctgattgggtttgtccggttgcggtgcttgcttggttgggcagcttaaaggtgcataccattcagatatagggatattaatgatggagcttctgatgatgaacaaaagaaacttgttgaagttctcatgatcagctcccaaagtggaccgggtcttctatttccaaagggaggctgggagaatgatgaaactgttgaagaggcagctgcaagggaagctatcgaagaagctggagtgcgaggagatttagtgcaactgctggggttctacgatttcaagagcaagcagcccgaagcaacgtgcagagccgcaatcttcgccctgcacgtgaaggaagagctagcctcctggccagaacagagcacccggcagaggagctggctcaccgttcccgaggcggcggagcggagccgctacccgtggatgcaggaggccctcgtgacaggcttctccgcctggctcgagaactggagaaacggtggtggcggcggcggcggctgcgtggaccgaactgagagatgacaccaccttaaagcatcaggggggcccccggcggagaagccatctgctagctatttcttggcgttgtatcttgcttggactagaattttcttccagaggctgactgcctggcatacatgcatgagggctctctgatgctcggtagcttttgtttactttgtcgctttattacaccgtcgtcttcaggatgacagtctcctcagctgatgatggcccgaggtttgttaaattgtaagcttgctgattctcgcggtcgccagctatatttaactgtcttgtattgagccttgagacaaagcaagctttgtgtatatcatgtgtcgtcgtcgtcgtggtgtactggtgtttgcctttttttgaagagttactggtgtttgccttgctatggaagtgcaacgggagtcctcttgttgtcacagtcgcaacttctctgcctttttaccctcggaaagatgctcttgcgaccatgtcatttgcaagtacacaagtcacaggagatggaaatgttaaaatttcaaacatgagatttctttgttgaaaaggtctgtttgagg

SEQ ID NO: 26358 - DNA, 1166 bp, Zea Mays
ctgcgctacgaagtgtggcccgcctagcccacaggataataaccggataaggggcatgcaatgcacgcccaggtggccgtgctcctcgccgccggcgcccctccgccaccgtggccgcctcacccctcgtggcaccatcgccagatcccttgccgtcggcctttcaagccgccccactctctgcgcgacggcggcggcggacagccgccgcccccggtcgtggtcccagcttcgaagaggcgcgcctggccggccgtctcggcggcgctgttcggtgcagggttcctcctgggcccgctcctcgacggaatccactcccgcgtcggcctccaggtgtacgggaacggcgccctcgaagccggggcccttcgcacccacgtcctggtgccgcccctgctcggcgcgttctacctcaccgtcggcctgctccacctgttcctggacgagagggcgcccccgaaatccagggccaccgggaccgcgcggaggacggcgacgtcgctgctcgttcttgcgctgttcatcgagacgagcgcggagatgtacagggcaggggtggcgagcaacgtggaggcctacgtcctgttcgccggcgcggagtttgcgtggctcttcctcgatggctcctggctgggcttcgccgtcgcctgcctcgtcggcacggtttgcccgctcgcggagatcccgctgatcaagttgcttgggtgctggagctatccgaacgccgacgtccacctgctcggcgaggggctggtgagctggacgacgacgtgctacttcgtctacaccccgttcctggcgaacctggcgaggtggctcgattcacggctggcaataaacaaggacgtcgcggacgcggagggaggcgacgaggcagctcggtcttgagtcacaccggcgggaacaccagccggcgtatcccgggcttgggtccatgcggactggagtttagtgctcggagcagcagtgctgttcgtctaaaggcgatgcggccttaattttacgatgatggccgggaaccatgtccggtgggccgggccgggccgggggaggagaacgatgggaaaaagggcgaaaggcactcctggggcgatgttcgtggcgacaggtgttctgaattctgatacggtttagtcttttcgctctgattgaacgcgcactactac

SEQ ID NO: 26359 - DNA, 1389 bp, Zea Mays
aaatagtgaaatttctcacaccttgaagatgctctggtagtctggtactgtacagtcgcagcggcgaaaggggaatcgcgcgaaatggagctctcatcggcggggaggtggactgacctccccgaggacatcgccctagccgtcgcctcccgcctccaggaggctgatgtgtgcgcgctcggcggctgctcgcgcacctggcgcagagcctgcgacgccgactgcatctgggagcgcctctttcgctgccgctggccagctgccgtggcggaggcgtcggcgtcgtcgtcccgtatgcaggctagcagaaccaaagtttcttgaccggcgaaggaaggacatctcccacgatattgtttggaagaagaaaccacagtgcaccctattctatgagttatcagggagggaggctttttaaccagcactgaaaccccacaggagttgaacccaggcgctggaggtggtactccggagtcacaaccactaggctatgaacccttttgctagtggaaccaaatccattggaccagaactggacctgtctgcctactgcaaatctatggttaatctttagggaacattttttttgcattttttgaaggattgctttgttctttccagagagtgagatatacaagttaaaaagggctggaaagctctctacatcagccaacacagaagaatggctgctgcaatatctaatgtggttgaatttgtgggaggcagcttaaataatgggtcacttgaatccgaatactatctgaaagctattgctgatttggccatgatacttgatataggatttctcgatgtccagtttttcttgttttcaaggaaccatagtgcgataataaacctaattggactgcactactcgatcgcatctttgcatgtgctgctgaagtcagtaaagcactccaagctcaccgtgtatcagaaaggatggtttgtgtgaacttgctcaagcttggtaggtggttctatggtttccggttgcctgatgagtacgagtcccgcaaaatctcgctaggtgagctcaccacggctgagggagcagagattcttgccattcttaaccgtggagctgtccacgaggtgtttcgtctccgcatcggtttggtgaacgtagataagtgatctggagtacaaaaaaagtacacacacaatatgtacttggcttgttttgcccattgtaaatatgtgtagtctttctgtgttgtaagtcatctgctgctctctgggttcttctttgttgtaagtgcaactgtggggatggatcgaagtatggacccatttaaacttttgtggcatcatagtcttctataaacaaataataaaggcttgccatgtgtaattagtgctacacattttcaccgtttctgtgataat

SEQ ID NO: 26360 - DNA, 3500 bp, Zea Mays
cccatccctccctgatctctcccatccccttctcctgggctggctggccagtgacggaccagccctctcccacctcgcacgcccctgtggctcctgaccttcccaccaccggagttaatgccgcctggcctggccgtctcgctggcgcggcgtgggacgtggtagcagtaccgcgcgtcgcggttgggccaatgggacgggcgtaagtgcgtaagcgaggacgcgaggtgaggtgtggagattgaggggtgggagctgttgtggcgcgtgtctccctgtcgcccgcagcttctttttattcctcccgtccggttccgttccggggaattgattctggggagccggcgcggccgcggctgctttgatcccttgccgcctgcctggcctgggctctcgtaccgcaaccgcaatttggcggcgtgcgtgttccttgcctagattggcgtgatccagctctgctccaaccgtagaagtgcgcgcacttgctgctagctaagaagcatctgcagtgatcgttccaggctcgtgaggaaactcatttgctcgaatcatgtccgactttgtcgggagcagatataccaagcaagaagatttccatgttttgttgagcaagaaagatcctggagaaccacctgaacataagcacgtcctgtggatggcacactggaccaaagcaagcagcaacaatggcagcagcaatcctttggagggtaccaccaagggcactactacgaaagatagcgagaccttgccttatgaattcacggaatctacggttgctaaaaggctcatggtaggagtaagccatggaagcgcctccatgcagcatgaccgacaattcaattctagtgtgtggggtatggcacgccatatttccaacgaattgggaccgaagaatagtgaacatgttgatgggtcttttgaaaaatttgtgaagaaggatgctgtgaacttgagagcaagggcagttgtgtcagaaacatactctgttcacaagctttcagagttaccgttggattttcagcaccttgggaactccgacgatccaagtccagattggagccactttccaatgttcgaaattaatcgaaagattgacagtattctcaaccgcaaacgaaggtctgcacctctgaatctaaatgcgtctgcatcccatgtattggccctatcgtcacaagaatacatgatgcactcacatcaaatagctgacgagaacttggatatgtgcagacctgcagaaggctttgcatctcacttagaagatcctgctggcctcaattcagatccttcagggccaaagttaaaaggacagttattggataccgtgtcatgttcttgcagcaaggacgacaccaattcagcagattgtctaatagacgagcagcatacaagccactattttgcaaactcaaagcatgaactgccctctgtatctaacgaaaagaagttcaagtttgcaggaaacaaccacaatcgaattcttgcaagtgcgtcccataaacatgaaagtgttgcagaggcaatgttctgtgcaccagtacttggtagtgagcttcagaatgaacctataactatttccaacatcggcaagaaggatggtgaaaacttccatgagatgtataattgtaatagcaaggctgttccttgttctttgttagctcatgagcaccatcgtcatctgaaaacacagagaacggaatctgcaggaaatttgaaagtctgcacgttacctgatcaacaaactgcaaatgaattggcagacaagagtaatggtgacctgctgacatatggaccaaagccaaagaagggctcttgcaaccgaagaagcctctatttattcgaaaagttaacgattccttccaaatcacaaagtgcatatcctaaaaattctgcgtcttcaggaaaatctagcggctttggagtttgtatgtacggcaccaatattggaagccagttattcggagcacagaatcaatcttcatctaagactgaaacattgcacagcgatgctcttattgggtccaaatcctcagcaggcattgcttcattatcggcacaaaaggtatcagtgttccataatccatagcgatccgatctcctgtcttgcgcataaagagtgttcctggactacttatattgctcgatactaaaaactaaaaaagcagattttttttcaaaaaaaaactaaaaaagcagaatatggcttggaaccttttttgtattgtttggatggttttcaaagaaaaaaaaggtctataagttttgttgtcagaaatgcatctgatgtatcgtcaactttgtttttagtgttagtagatctttcttgtttatactctttcttggaatcttatcatatttatgttggtttgaatacacgtccacctacctgtttcttgtcattccacatgataattattccaagccgtgctcattagtcatggacccgtaccaaccagttgacagacctatgtactgattcttccattaccaataaatgtactacaggacaacggttgcccagccccagccccagccccagccccagacgaagcgaaaagcgagcagctagcagctccgtcgtccaacaccaagcagggaggagaatcagcatacagtaaagaagatggatctcataatctcaacgaaggccacgatgtttcgtccaaagcagctatcggtagcaagcaaccatgcatgcctggagcaggaatcacgaacctggatctcatactctcccagatgagcaggatgagaaaccagattcccagtggcggtgtaactcagccaccaataggcgccgagccaagtgatagatggctcaagcgcctgcagctcggcgtaccagaccctgacgtccttggttccaagaccaagaggccaaaagtcggagacagtcctccgccacccaggcaaataaaccggtcctttgacgtggcactcccttgcaacccaggaaaacaggaggagcagagcttgaatggaggggggaaagtgcagggaagagcccccccgattccagagaagagcgtcaatcgctggatagggagatggtgccagggcggcactcctgttttccgtgaaggcccaggccagggaaggcaggcaacgaaacctgctggccggttgtccgaggagcttgaaggacagttctttccaagcactgcggcgatggcgatgatggggcgcgcgatgcacaagctccggccgtgcgagcagcagcagaaggggccattcgtggtgtggaagatagattgacctttttgggtgtgatatacttgtttctttaaaaaaaataaaatgtaaggcaactatgcattttgcctggctgtggctcatggtttattgctttctggtagtggaagtagctaggtgtagtgcctactgattgtgtaatgctttgctgtaccaaaagtgtaatactatactgtttactgtgtcgttcgttatggtgatgtacaccatggagtaatcgaatgggacagacgaatgaactggaa

SEQ ID NO: 26361 - DNA, 584 bp, Zea Mays
gtagctactgctattactatcttttgggtgaagtgaatcagatttttgtttaaatgaactttgtaccgtttaaattactgatgcatagttttgcaaacttaaacaatatgtatcttggatttaaatgaactttgtactgcagttttaacagacatattttggcacctggtaatgcagtttctgttttactaatagcaactcctattagtatatgaatcagtgaccaaaacatgtgatttgagcaactaatgtgatgattatagttgttgtctgcagatttccccatgttaaactaatttgcagaaaacaactatatgatacctattgtttttattgttatgatttcttcttatttgttgtccaattacaaatagaaattgtgcaggatcgaaaggaacttcaacctgaaccagcgagagtatcgatacaaagactgtttgaaatcttctagaaatgacatcgaatggaacttcaagctgaacaagcgaaagcatctatacaaagactgtctgaaatcttctagaaacgacatcgaaaggaacttcaagctgaacaagcgaaagcatctatacaaagactgtctg

SEQ ID NO: 26362 - DNA, 2539 bp, Zea Mays
ctctgcccccgccgtacgccccacgccctcctccccgcgaggagccaccagcccaccatctacgccgcctgttctgatgccgccgcccacgcgaggccgaggccgaggccgtggccgcggccgcgggcgcgggcgcggtcgcggtcgcgggaggccaagtaaggacaccgttgctgaggactccgcgcacgccaccgaggaaagtggcgaggaaaacctccaggagaaggtgcaggaaggtggcaaggtaaacctcacggagaaggtgcaggaaggtggcgaggaaaacctcacggagaaggtgcaggaaggtggcgaggaaaacctcacggaaaaggagaatgaagggatagtggaggtctcaaaacccccccaaaggcgtcggaaggatcctgttgcagacccctcttctcttgagtctagtggtttcatgcgatttcgggagaggaggaatgcttcagcggttcaggagcaggggcctaagaagagaaggattactgaggattcaaacatgtgccatcagtgccagaggaatgatagcggaagagttgtacggtgccaaggctgtgtcgtccgaaaaagaaaatacagatattgtgtgaagtgcattaaacgctggtatccacatttatcagaggatgattttgcgaacaattgcccagtttgtcaaaataattgcaattgtaaggcttgtctgcggggagacataacccgagccaactcgaggaaaaaaaagaagttactgcaaataaattctggaggatatagtgtgtctgaacaagataaaattaaattctcaatgcgtatcgtgcactttttgcttccttggctgaaacaattccatcaagagcagatgcaagagaaaagtgccgaggctgcaactaaaggtattgatgcagacaaactggaggtccctctaaccatttgtggaaaaaaggaacgtatatactgcaacaactgcaggacatctattgttgacttccacagaacctgcaataaatgtaactatgatctctgtctccagtgctgccaggagcttcgtcgaggccttgtttctggtaatgatgccaaggttgatggtggaggcaagcaagattttctatcgggagttagtcatgataaaatcataagcaaagggccatccgatggacagaatgacatgttgatagatagtgtagttcctggtgaaaacaacacttctagcttgagacagtggagtgtgaataaagatggaaccataccttgcccaccaaatgcatttggtggttgtgggagctctcttcttgaactgaagtgcttgtttaaagagaagtttattgctgaattactggagaaagctaattcagcgctcaataatgaaatggaggtgaagatagaaggatcaaaatgtccctgcttcactgaatccggtgacatggatgatggtatatcacggaaatcatcttgcagggagaattcctgtgataactacatatattgcccaaccgctacagatgtccaaaatggaagtttagaccatttccaggagcattggttgaagggtgaacctgtaattgtccgtgatacacttgcgttgacttctggattaagctgggaaccgatggttatgtggcgtgccttacgagaaaagaaagagaaagttgagaggctctcagttcttgctcttgaatgcttgggttggtgtgaggtcgatgtaaatattcatatgttttttgcggggtattcaagtgggcttgttggtccagacgatttgcccctgttgcttaagcttaaagattggccaccacatagttcttttgaggagcggctcccaaggcatggtgcagagtttatgtctgcattgccatttcgtgaatacactgatcctaaatggggacctcttaatctggcagtaaagcttcccgataatgttaataagccagaccttggtccaaagacttatattgcatacggtgtttccaaagagttgggaattggtgattctgtcaccaagcttcactgtgatatgtctgatgcggtaaatatacagttttgtgtatgcttcttggcattgatatgcaactctcaacaataaagacctatcttgttaagggcttaacaacacttgaatttacagatctacaacagtagcttaggtaataaatgcttaagtcctgaatttggtgttgttgtagctgcacctattatggtagtaataatgggtgccagttttggccgaccatagttctggaaaatctagtaacaatgtctcagttattaataaatccggaaaaaggcgtttccactttgaatccttctggaccaagcttgaggggtttcaggatattgtcccttgctgcatggaattctattgagtcggctacatgcctttttaagtccctggagatgaagttacaaggagctacaaaaagtttgcaggcctggagcgaaagcaggtcgagcacgtgagatcccaacttgctcttgctaaagaaatcctccatatgctggaaatagcgcaggatggtagagtgctcagccctgctgaacgctggctcaa

SEQ ID NO: 26363 - DNA, 3721 bp, Zea Mays
agaaattagaatgtcaattgtgcaaagccagttatttagggtgtcaaaaatacaaatttctcctcccgaacaccctactcgttctcccccatcggcgccgctacgaccagcgtttgagccactcgccgccgcgcacgatcctccacgccttgctccagtcctcgtcggcacgcctccttcccaaccctaaccctagcactagcagtcagtcgagcggcggcaagtcaagggtctgtcgagcgggccggcggcgaagaagtgtctagcgaggcgagtcaggtgcagggggacccacccgcagcggtggcgtgaagcgcgtttgactggatcgaccaggttggcggctaaacagaggaggttgcttgtttgttttctccgtccggctgcggttttcctttgactggatcgatcagatttgccggcggcggcagcggtcccccggcaaaggcgtggggatccctgccgggatggaggtgccgtggctgctgctggtgcacgggtcagtgacggcgctggtggtggtgtcgttcctctgcgggcaatggcccatcttcgagggcaccttcatccagagcatcaaccacttcctcacctttggggcctaccactacctcctgcggtttgtgcagtctgtgtgcggcactggggctagggatctcgtcctcggtgtcgagggatactgctgcgaccgacccaacccgatattgcaggtattttatgttgccataattggagtgacatattttataatagtgcagacatctttccagtatattcctgggtattatgtgagtggattgcacagatatctgagtgttgtggctgtttctgttggtgctatactcttcgtgcttactagcttttctgatcctgggactgttactgctgaaaatgtttctcaatacgtatcttcctacccatatgacaacattatttttgtggagaaagaatgttcaacttgcaagattactagccagggcaaagcactgtagaatatgtgacaagtgtgttgctcgattcgatcaccattgtggatggatgaataattgcattggggagaaaaatattcggtattttgtggcctttttagtttggtgagttctgcttgggtttcattccagcttaccttataatctgtctgacctagatgggaaatctcactaatggttcttttctgttttctatgtttatcatctgtctttcttttttataacctaatagaaggtcccaagaatcaacttaatctcctgaattatcgtttttccgagtggttaaattttattccaactacaaataataatcatagggcataaatcaattggataaaccaagtaggcatcttgaaatcttatgtttatcgtactgagtttcaagattagctttcttacaagaagttggatcatagctcccttttcctcttttttttttcttatgtgaaatgctttgccttctagacttgaaagcatagttttccaatgtgttgtgcaaagtgaagttgtttagttgcagtattaactagcttatgatccatttgtgctgtagttttatgggtttggttgtagtttatagttcatcttacccagtggcggacgcaggacgagaactcacggcgggccaaaaaatcacatgacaaaatcaagcaagaccataaaaactatcgttgcatagaattcaagtttcatcatgtcaatacacgtaagttcaaagaaagaaactatataaacaaaagaagcaaacatatcactaagttcttgttggctgaggcaattgtatccttctagttttaagatactaaaatcgttgaatattgatctcatcatcaattgtcgaataatgatctcatcatcaatttgtgttcttaatgctgggtatgcaactatttcatctagattaaatgcccttccaacacttgattgttctaaaatttttatttgtccaacacttgatatgcaactatttcatttagattagaatgttcacattgttattgtcttaaccatcaatcgtggaaccccttgaaaccggttaaaaaaatctcctcatttatctaaataaagaggagcaataatcatcaactatttatctaatctccaattcacaatcaaaagtgaatattctaatctaatccaaatattgaatctctgggaaagaatggagccaggaagggggcggcgccgggaacgcggtgtcaggctcgggtgatatcgaaaagaatagagccgggcagatagatgtgaggactagatcgagagtaaggatgagagtcatgaggactgaacgtttgagctgatccgatgagtaaacccagatgtacaggactgttttggtccatccaaatttttattttttctatacttaacattagatataaggggttttaaaaattgaggagggggggcatggcccactttgccccccccctgtccgtcttccactgatcttacctctatattatcaaaccaatatggtagatctactcagctacttgattcttcctttttctttttccatagtgggtgagcccgaatttcattactaaactgcaatggaactataaactaccaccagtttagactttagaattttgtcactataacaaaaaaacttctctgaaacgaccacaaaagcacacatgctatgtgaaatgattccaccaccacacttacactggtcctatttgattactcaactttggcaaacacttgagcttttttttaaggcataattgtttcagttattgtaggtagcaacctaattaatcaagattattcactaacatgaaatattaaagaaagttttttgggcaaaaatattaaataaagtttgtaattgactattgtacattttcatcaacaacatctcattttttcctatatgttttgttatgcacttcctattcccttccataacaggcatttccttatatgtctgtacggggctttaatccttggcttcattcttgctggtgaaataaaagagcggaaaattatatacattctgacagtttattatggcatcgataattcattctcgggcttgtttccacatgttgcacagtggttgcttgctgtgcataacactcagatactcttgagtgtatttttggctatattagcactgctccttggtggcttttgtgcttaccatgcacatctttgtttgacaaatacaacaaccaacgagacattcaaatggcaagactacatcatgtggatgaaaaaggaaaatgaagcaaaggcggacgctgccacgctcagatccagcataggctcggccaatagtgatgcacagaaagctcctccaagcaaatggaggacgttcttcatgagatcccgcacaccaagcatggaaccagttgtgagaaacaacatatatgacagaggcatgattacaaacctgtgcgaggtggtcgtccctttatcagaacggaaggcattttcccgcatgaaatcagattgatgtcttttgttgcagttgctttgtcaccaaactgttgttgtatatcagtgtagaatttgcgacacattttttttggtcataccatagaggcataggggaaaatattcaggataatcgtgttcagtacctacgacctatttattataggtgaaaggttttgaagttgcatttgcctttgcaatacgccgatgtcactattctgtttttagaacatgattctgaaatggcactaaatatgaaactcatactatatgtcttcgag

SEQ ID NO: 26364 - DNA, 3869 bp, Zea Mays
gctcggcaccggctagcttggactccgctccgcttgtccgcggcacgagcacgagggtgcctttctttctttctttctttctttctccacgcacacacgcgcgcgcagttggggagagagaaagaggggtgactacgagctaccgcgttttaggtcgcgccggcttggactgttgcgtgagctatatctttttctcgctcgctcgctcccaaatcgtcaaaggaagtttggtggtggtggtggcttcattgcttcaagcagcggccggggggtgaggaggacagacagacaagggggaaggagtgatgcgaggaggaggaggaccgggcgtcggcacgccggggcgcccgcgatggggctccggcgccacgacgccgcggtcgctgagcacgggctcctctccgcgcggctcggaccggagctccgacgacggggaggagctggtcgaggtcacgctggacctgctggaggacgataacattgtgctgcggagcgtcgagccggcggcggccgcggctgctccggctccgccccgccgccacccggaccctaccccgtcctcgtccgcggccccgtcgcgctcgcgctcgcccgcgatgcgccggacctcctcgcaccgcctgctgcagttctcgcaggagctcaaggccaccgccagccgcgccaagcagttctcgcaggacctcaccaagcgcttcacgcgcacccagagccgcgccaatctcgcgggggagccaccggctgccgcgccctcgggcatcgacgccgccctcgaggcccgcgcccagcgccgccgccgcgcgcagctcgaccgtaccaagtccggcgcgcagcgcgcgatccgcggcctccgcttcatcagcggcggcaacaaggccagcaacgcctggatcgaggtccaggccaacttcgaccgcctcgcgcgcgacggctatctctcccgcgccgacttccccaaatgcatagggatgacggagtcacaggagttcgcgatggagctcttcgacacgctgagccgccgccggcagatgcaggtggacaggatcaacaaggatgagttgcgcgagatctggcagcagatcaccgataacagcttcgactcgcgcctccagatcttctttgacatggtggataagaatgcagatggccatatcacggaggccgaggtgaaagagatcattatgctgagtgcttctgctaataaattgtcgaggcttaaggagcaagctgaggagtatgcagccttgatcatggaggaacttgatcctgaagggcttggctacattgagctttggcaactggagacattgctactgcaaaaggatacctatgtcaactacagccaggccttgagctacacaagccaagcactaagccagaaccttgctggtctaaggaaaagaagtccaatccgaaaaattagcagcacattgaactactatctggaggacaactggaaacgtgtttgggtgcttgcagtatggattggaataatggctggattgtttatttggaagttcattcagtaccgtaaccgttatgtctttgatgtgatgggctactgtgtcacaactgcgaaaggtgctgcagagactctcaaactgaacatggcacttattctcttgcctgtatgccgcaacactatcacctggctgcggaatacgaaagctgcacgggcattgccgtttgatgacaacattaacttccacaagggaaccaccttgtatgtgattttccacggctcattagttcatcagaggtgaagtatgctccactgcgcaaatactttggggaaaataaaccaacatatctggatctggtaaaaggagtggagggcataacagggataatcatggttgtgtgcatgcttatcgcttttactctagcaacaaggtggttccgccgtagcctggtgaagcttccaaggccatttgacaaactaactggcttcaatgcattctggtactctcatcatttgttcatcattgtgtacatatcacttgttattcatggagagtgtctataccttatccacgactggtacaaaaggacgacatggatgtaccttgctgttcctgttggtctgtatgtaggggagaggactctgaggtttttcagatcgggcagttattctgtccggttattgaaggtggctatatatcctggtaatgttttgacattgcagatgtctaaacctcccacattccgttacaagagtgggcagtatatgtttgttcaatgccctgcagtttcaccttttgaatggcatcctttctcaattacttcagcacctggggatgactatctaagcattcatgttcgacaacttggtgactggacacgggagctcaaacgggtattctcagcagcttgtgagccacctgtgggtgggaaaagtggccttcttcgagcagacgaaacaaccaagaaagcgttaccaaaacttttgattgacggaccatatggttctcctgcacaagactacagcaagtatgacgttttactacttgtcggattaggtatcggtgccacaccttttattagcatactgaaagacctgctcaataacatcatcaaaatggaggaagaggaagaagcttcaagcgatctttacccaccaattggtcgcagcaaggcacatgttgatcttgacacccttatgaggattacctcaaaaccaaagagggtactgaagacaacaaatgcttacttttattgggtgacacgtgaacaagggtcttttgattggtttaaaggggtcatgaatgaaattgctgaactagatcagaggaatatcattgagatgcacaattatctcacaagtgtttacgaggaaggggatgctcggtcagcactcattacgatgctacaagctctcaaccatgccaagaatggtgttgatatagtttctggaactaaagtgcggacacattttgcaaggccaaattttaaaaaggtcttatctaagatagctaccaaacatccatatgctaagattggagtgttctactgcggggctccagttctggcacaggaactaagcaagctctgttatgaattcaatggcaagtctacaacaaaattcgaattccacaaggagcatttctgacatacaacaaggttaatgcagaatattggaacaagggggagaagatgtgatgtatgtaagtcacttgtgctttaacatgttgctttcttggcgatgagtttgaaagagcaagggattctgcacaaggtgttgtatcaccacagcttactccgcatttgtgatactactgtcccccagttacaactgcattatctattgcttgagatactaaaatacaataagatcgcatagaaaggaaaatgggggtcagcagcacatcacacaaggtttccatcgaaggttcaagagcacataccccaggtggagtagcaagggaatctctcccatggagtccacaaccataaattgtgattatataagtagcgtgatgtaggacacatacaatgaaggccaggatgtcacaaggctacctaactgtatatttgcatgcagctgagtggctgactgaggccacaagtttgatctaactttgtacttgtacacagggttgaaaaacaggaagaaggtacattttgtttttgtaagtagcgtaggttggtagtgactgggctcagattgggggccctcaagtttcattaaagcttgttccgttgcctcgttgagtggtaggttgcatttttttttaggacagatctggctgattcatgtatatctttactgaaggccatgttttttttaaaaaatttatgatgctgtctacatgttgatatggaaaggattaaatgtggaaaatgatatgtatacctgtgctaatttggcg

SEQ ID NO: 26365 - DNA, 200 bp, Zea Mays
atataaaccccccacaggtgaagagcaggtagtccaggaggaggtctacaacgaggagtacgagattatctaggtggcgtcttccagtcagctttatggcgccaaggaataatatttagttcgctttattgttatcatttaattttgtaagacactaccgctatgtaataatatttgtgatatttatctctgcacacttg

SEQ ID NO: 26366 - DNA, 1533 bp, Zea Mays
cagcctccgtatctcactctccatttcaaactccattctgtaaacagtattttgcatttatagtaatgcatttacaatacaaaacagtgtttgttttcaaactcaactctgtaaacagtacatttacaacgtagaacagtcagtgttttgcacgctgagatggcctctagtgtcccacaacaaaaaccaaatatttcctccgagcgaggaaaaaattacctgcagagaatccattggctgcccaccatcaggagtaacaagacttgcaccaaaaatgggtatactctagtctacaagtagaaagttatagaagaacaaaaaaatatcaaaccagtaagcttgtaatatttcatcttacagcaatgtctgtatatgtacaggagcaagttccgttattttcttttgccaacatcgatggcaacaatgacacttctgtaactaagacgtcgccgatgaagcaggaaaagaaaatgtctagcaaaaatgctagcaaagcctcttcaagccttccgtgccagcctccccaagttattccgctccatttaacctcatgttagtgactaaagatagatgaatagccatggccaagcaagcataacaaaaatgctagcaaagcctcttcaattatgtgaaaagaacaggtggtggttgcttgaagctggggctggaagcacctgctttatttgacgatgttaacatcttatccttagcagtggcattgcctacaacctgttcagaagaatccggctgctggttgctttcgctatggatgggtcgggcccaaatttttatcagcccctcgcggcatatagtgaggattgattcactagtgaattccaggccggataggggatctacatgtacccggtgtgcaacgagagatgggcttccactactgaatgtcggtgagccaccagacggatggcgtagagggacagcaatctcttccaatgccagatcccagagaagcagttgggtatcctaagtgcaagcaaagtgaaaagatacaagagctgcaactcagcaagattggagtgggacagccaaaatacaatgaagctgtcacttcacatctaacacactatgttcgtcttcgctgatgcatgcactacaagttactgcactattcgctgagtagagtttgaatatgaagatgaggatggataagctgttggagatagtctcagcaaattctaacagatcgcagtgtactgcatgtcggcttgtgtaactcgtaggaccactaccatatcaagaaataaatatttaatactggtaaggtaacggcaagacaaatttgccaagcttattaagggggaaattgacaaacacttttagcacatgttcggctgtggtaaaaggcagctgttgctgctgccgtgctgcgggctccagcagcttcccgctctctcacaaaagtactgttgcagcagctgcggcaacagttttttatcatacccaaacagcgtgttaaattaaacagtaaaaatgaaaacatgcctgctggcagcgccaccttgacttggatctttg

SEQ ID NO: 26367 - DNA, 520 bp, Zea Mays
gctggagacaaccttaacgcactgctaaaagagctcgacgactacgttgtatgctgatcgattcgtctccgatctcctccttcgaccgccgccaccttcgtctccgagactccgacgatgtcctccgccgccgatgaggatgcgttgtcgtctgacaaggggaagaagagggaggaggacggcactgacgggaggagccaacgtcaggagggtgtcgaggtggccgacgggaaagtggatctaggagacctgtacggcgcggcggcggggtgggtagaggcgcggaccagctgcccgcacatcggcaccatgccacccgctggtgctgacgacctcgcgcgcgtgccttcgcccgactctccgtgctccagatgtaatcaccctgctgaaaactggttatgcttcatatgcaaagatgtgctttgcagccgttttatcaacaaacatatgttgtgccatcatcaagaaactggtcactgtcttgctttgagcttcagaaagagggcagacccaatgttgg

SEQ ID NO: 26368 - DNA, 2070 bp, Zea Mays
caaaactcaaaacgataagctcgtcggttcgccgtctctgcttggcgaatcatattagttggaccaacatcaattgccggcaataaaaaaaacatcaattgccgaagaagcaatcactgatcactcttcaaggttcgaagctttcccttacttctggagagaaaagcctccacggaccacggcttcagaagctgctttcatggagtcgtcgctggtggaggagcggcggcaaaacctgctggtgcgcgcgacggagcctgaggatcttgccaggtacacaggtgatgggtcagttgactttagaggttttcctattttaaagcataacacagggaactggagagcatgttcattgattcttggaactgaagtttgtgaacgtttggcctactatggaatctcaaaaagtttggtcacttacctttcaacaagactacatgaaggaaacgtttctgctgccaggaacttcacaacctggcaaggaacttgttatcttacaccacttattggagcaaccttagcagattcgtactggggaaagtacaggactattgctgttttctccactatttactttcttgggatgtcggcattgacactttcagcatcagttccttctttccagccccctcaatgtgttgggtctatttgtccacaaccgaccttatcacagtatcttttatactttgttggattatacatgattgctctgggagctggtggtataaagccgtgtgtttcatcctttggggctgaccaatttgatgatactgatccagttgagaaagcaaagaaaggagctttcttcaattggttttatttctgcataaatattggttctttgatctctggcacagttcttatttgggtacaagagaattgtggatacagcattggctttgggatccctacttttttcattgccttggctattggaagcttttttataggttcagatatatataggtttcagataccgggaggaagcccacttacaagagcatgccaggtagttgtggcagccactcacaagcgaaaaacagatttgccggttgacagttctcttctctatgagctagatggtaagacttcagctattgaggggagtcgtaagctggagcacagtagtgaattcagtttccttgacaaagcggcagtcattttgtggaatgaatgtgatggtcctcgcaattcatggagactttgcacagtcacacaagttgaagagcttaaaatactactgaggatgtttccaatctgggcaacaggaattgtgttcttcaccgtatgtgctcaaaactcatcgatgttcatagaacaggggatgaccctcgataaccaaattggtccattcaagattccagcagcaactctgtcgtccctagatgttatcagtgttgtcgtttgggttccaatttatgagaggttagttgtgcccatagccaggagattcagtgggaaagagagaggtttctcagaacttcaacggatggggatcggtctatttgtgtctacagtcgcagtggcagttgcagcgctagtcgagatcaatcgtctacaggtggcagtggcagaggacctggttcatcagaaggtacctgttcctatgagcatcctttggcaagcgcctcagtatttgctggtcggtgtgggcgaggtgttcacatcaattggtcaagctgagtttttctacaatcagtcaccagatgccatgagaagcttatgctcagctttcgctctcgttaccgtgtcacttggaagttatctcagctcattcatcttaagcctggtgtcatatttcacaactcggaatgggcaattggggtggatccctgataacttgaacgaaggccatcttgaccgctttttctggctgatagccggtctcagctcactaaatttccttgtttttatatattacgctcaacaatacaagtgcaagatagcttctgttgcttaaagttccttctccactttgcaatttacttgtacagcaaagctcaatgtacaatttgtttatgctgaaatactacagtgcgtacataatctcatgtgtcgtgtactgtgtac

SEQ ID NO: 26369 - DNA, 1488 bp, Zea Mays
ccggcaaaagtggacgtccaaacggcggacgccaaggagagggagaagatcgacgccgttcgcaagctgctgcgcaagcaggcgccgctctccataaagcaggcgcagtactgcgacgacgcgtgcgtggagcggttcctgcggtggcgcggggagagcgtcaagaaggcggcgaagcacctgaggaccgtcctgtcatggagggagaccgtcggagctgaccacatcatggccgacgagttctccgccgagctcgccgacggcgtggcgttcgtctccggccacgacgacgacggccgcccggtagtggtgtttcgaatcaagcaggaataccccaagttccgctcgccgaaatcgttcgtgcgcctgctggtgttgacactggaggtggccgtggcgtgcatgtcccggtccgtggaccagctcgtcctcctcttcgatgcaagctttttccgatcggcgtcggctttcctcaacctgctcatgggcacgctcaagatcgtcgccgactactaccccggccgcctccaccgcgccttcgtcatcgacgcgccctccctcttctccgtcctctggaagggagtgaggccgttcgtggagctggcgccggcgacggcggtggtgtgctccctggacttcgaggactcactggaggacgcctccttcacggcgtacccgcggaccgcgtccctgcggttcgagccgccgccggcggcggtcacggggaaggccggcgtggggtcagcctcgtcgcggttctccgtcacccccaccgacaaccccgtcaagccgtggtacctctgcaccatccccgcctcggtgggctcccgctccgtggtacccacctccagcagcagcccgtcgctggtcggcgcgtccccgctctccgcgcgctccttctccttcgcctcgcccgccgcgctgcgctcgacgccgttcccgcgcggcgggggcgcccccccgacgccttcctccgccgtcacgggccacaagatcccgccgccgccgcagttcccgcggacgccgcggccgtcgttcctgcagtcgccgtcgacgctgttcgcgttccggaaggacgggcagcagaccagccgcgtggagcgcgagcgcgggtccttcctcccgtacctccgcttctaccgccgcccctacgacgagatttcctaccgcgccatgatgcgcccgccgctcggcggcctgatacccatcgtcgagaagttcaagcacaagccggtgcagcagacgctgcgtcgacacgctgggctccaccagcatcagcagcagcagcaccaccattaccaacagcagcagaggatctgagtctcgtctctcagtcggtactgcatggcgacccgagaattttctccatacagcataaaggcgatgctatattatgctaagttaatcttttgccaagtatgatattcttaaaggcatgtataataacatcccaaaaaaatgtgagtaaaatggactcctttctgcacc

SEQ ID NO: 26370 - DNA, 3216 bp, Zea Mays
gatggtatgtcacaaggaagtgctgaaatggactgttcagatgatgatgttaatactgtttcacgaattccaactacaaataagcctcatgatgagtcattggggaatgtcccaatcagcaaggatggtatcaatactaataataacttaagcatagagctaaagaaagaacacgacagtgatatgcatcaagattgttcatctatgacaaataaggttactattgatgctattgatggtgacaagtgtattaaaacaaaagttggtgttttcagccatgcaggtcagcaggggttccgaaatgaggtttctgctagcgaaaactctaaagacaaacgctctttgaattctgagaagaatactccagtaaataatactgaccatagcatgcaagatgctaagactgctgcaggctccagtaccacagatctccagaagtcatcagctttgccaaaatctgcttctcctaaaatgcaacctactaagcaacctcctaagactttagatagccgtcttgggaagactagaagcccagatataaagtcagagatgtctcaaaatggtatgcaagctgggagctgtagtgagaaccatgcaaaacttgctgctttgaagacagagcatcagaatgaaagtgaagaggtcggtagacactctgatttgcacccaagagactctgtcctgggtgaagactcagaacttgatggtgcttcaagcagtcaacagcatagtgaatatagcaagaagacagcttctgaaaagtcagaacgtgacaaatccaaacctgactcttgtaacatatctgttcagaatgaaaaagatggacaacttggggcaaatttgagagaactggggtatgcttatgtgaacaggaatgaaagatgggagaggttcatggagtctgagagagaaaagagcaatggagaatgccatggtggcagacatgcatctgacgttatgaacaaacgaatgacaaaccaccgtggtggttggcggggtgctggatcccgtggccatctgaggaacttccgaggtccaagaatgcgcaatgagtttgctgatgaatctattggtggcaacaggcactcatttgaagatgaacctgggcacacccgaggtccacatggctgcctcatgagagatacggacattgacgaattctacggaagagagattccagagtataggctgccggcccgtggacaaatagaagatctcccagatagcatgatggacgacaggttttttatgccgtattcccatagacaccgtggtcaaggtgatcatgggttcatccacagagacagagacaggagtcattcgcctgctgcacagagaagggttggccatgtgcatttccatcgtggacgatcacctgaagcgatgcgcagatcaccaccgccggtaatgcgaactgacagaacatacatgcctcaccgccatcacaacggaagccatgacgagaggggtgccatgcaaagaaatgacaggaggtgcgccatggaaggtgatgcctcaggcttcgagccaccgctacatccctcccacctagctgagttccatacagtagaggaacttgtgggcagaaggaagtatagggagcggagaccatatcttcattcaacggtgagtgacgaagacgagatgctcccctaccgcacggaggatgacatggagtttgctgaaggaggtgctggtccacgagagcacaacggcggcttcaggaacaggatggggcacgacagggcacgaggggaacaagaggacgggtacaggcaccgccgtggcggtcatcaagggtggcgagacagtgacacaaatgacagaccaaagaggaggaggtactgacctactgcactcacagcttgaccggctaatgaagacgacgtcgttggcctttgggtggactggactggctgatgcatctgccacagatctcggtctcagacgaacccaacacctttttgccagcgtctcccattccatatattgctttgtttttgctgcattattttctcaggacatggtgctgcagcgtctaaagcatactgctccctccctctctctatagtaaccctgggtcctgctccgtttacaagccgagctgctagtacatgtggatgatgaagggtgggtggagacactgaacattttgaggccaaggtcaaagtgaaataagaacccccccggcatgtgctatttttgccctgggtgctagtgcggcccttgtattaaagaccgacttgtctctataatttggtttcgagttgatgtgagtacagctgctgtgggaccgacattccatggaaaaggtgagccgcgcgtgaaggcgacaaacgccacttgggtgaaatttcacatgatctctcgagtgccctccgtggaactggatggagctgcgaagctgctgctgcgtactcgagggattcgttgtccgtgggggctcgacagctccagcgatttggcatcttcattgttctctttctgtggtccagctccagccatacaggcgttgttgtgccgctgtcgtacgcgacccgaacgcgagcgcgatgagagtcgattggtctgtctgccgtcgctttgaccggcgttgcgcttgatggtcaagtcgtcgcctgcgcatagcaaatccacacgtctgcttggtgcttgctttctcgagattaatctcgctatttctcaacaacagcatcacaaagcatttttgcccaatgtgacttctttcctcgaattcctggaaatttcccagttctcgcaaccacgtatatgtattcatgcgaaggcgcatcaagatgtaaagttttacaagaaatgatgcatcctggtccctaccggaacaaaaaatcgcggcaacaccatttcactttgccggcgggccgggccacctgctgatcagctccttctcatacttaatggtgtacgcctgcaggagcagcgtggccggctggtggtacttcgccagggcctgcccggagcctagctgcactagccgtcttttttgctttttaatcttttttcgaaacatttttgtagtttaaattcaaaaaatagacctttatctcggcggcgtcatcatcattaacgcggatgttacatgtctcggcgccaatataaataacgtcgagatctcactcgctcagatgcgctaatttggcatgtacgtggcaggggttggcacatcattattggcgcgaaaccctttatccatcgccg

SEQ ID NO: 26371 - DNA, 4336 bp, Zea Mays
aatcggtttttccacttctttaactccaaataaaccaacggaaattgaaaaacaaaagccacttcttcgccagtcctccgcctcccctcctctgctcctccagcgaagcgcacgcacggcgcgcaggctgagcaaggcaaccgaagcgagcgaggtcctttgcttctacccgcggcaacgccccaggcgcgcgcgacgcgtcgagctccggaggccgagggcgagcaccagtgcgggagtggaggagaggaggtctccgctggacgactgcacccccacccactcggggtcagggtccaaagccggatctgccttggggctcgcgcccgcggctggtggaacggactgctggctgacgagggctccgataatcgacggcggcggtggaatgccggtggaacacctgtttttcatttttgatgaggtggaatgcggcttcccaagctccattctgttttccatttcaatgaggccatgatatatgttccatctgttctggatggaatttgactgcattctactgtctctaaaagaagggtaccaggcttaagaaaccagaaaaaatgccaccgtcaccctcaccgaggacatcaaggtctcctgcacaggagacttatcaaaagaggacaaacagtttcagaaatgtgcttcctgcaaaatcaaaggatgatgaactcgctttgttctctgatatgcagaaagttgagacggacaacttcttactggaaccgtcagtggattttgatgattcaatgaaaaaattgagatatttcccggaagtaaaacttggtgtcaacattcctgcccatggagaaagccatgaattgcttaacacagacggcgataaaaatgattatgagtggttattaactcctcctgaaactccactttttcgatctttggatgacgaagaaaaccaatccatcactcaggtttctaggggcagagctcagagcaagcctatacaaatttcaagatcatccatggtagataataatcaaagagctagtagaagcagtgcaagctcaagtaggcttagcccatcgccatgctctatgggaaggacaagatcatctagttcagcttctcgctctagtccaccacttgctgaaacacaaacaccatcacgaagattgtcaacccctccgattgctaagacattaacacctcctcgaaggtctccaagtcctgtctcaagaaggatgagtactggttcaagtggcccaactttgaatggaacaagaggagcttcaccagtgaaatctaatcacaggtcttcttcaccaaagctgcatggatggcaatcaaatgttcctggtttctctttcgatgcgcctttgaaccttcgcacatctctaactgatcgtccagtatgccggtcaaggggtggatcgccttcatcttttagtggactagaaaagggttcaagaggtagaagactgtcaatgtctcccactccacctagaagagccagttcatctcacagcattgaacgggaccgaatgagctcttatagcaaagcttctgcaacatcatctggtgaggatgatctggagtctatgcagtctgtaccaattagctactccagtagcccagttgtgaaaaagagcttggttgtgatgaaaaccagaaccattgcatcatcaaagaatctgtccaaaaaattgacacctagttctgtcccaaagcggtcatttgactctgcactttggttaatggatcatcgcaaagctccacaagataggtttcggccacttctatcaggtgcccctgccaacacatttggtgctgggaatggaaatgatgtgcacaaacctatgttctcacacaattcttctttgacaactagcagcactgcaagctcttaccatggtgccacttttggctcttatatgcatggcagccaagaacaacatgattttgctggtgaatgggaagcagatgatatttctcagggtcatgaggatatatttatgtttgataaattggatgagctaaatgaagacattcattacaagagcatggaatctacggataattcactggtaatagtaaaacatctagtaagtggcagacaggacttggaaggaagcagaagacctaatcagtccttatgccattctactgatatttctcatgttagctttaaggctacttgctctagatgtgggaagtttttcgatgcgatggatgttgatgaagagggtgtctattgtgatgcatgtgctacaaaggatgggaatatcctcaccagtcctattgtacaaactataggagaagaaaaccaacaatatggtaaaactgcaaatttgaaaccttgcatcgcatctgattctcctgtacccacagattgtgaaatctatagcaaagaagtatctcttgatcatcaactagtgaacaatgaatcttacgctgattgcctggaccaggcccctccaattcactcaatggggcacacacctcaggaaatgctactggggcaggaggaaaacattgacgctgagcatagaaataaacatgttggggattcgttaggaaatacaaacgataattcctttcatcgatctagtgtggatgaatgtgaacaaacagaaccaacatctgtagggcaggacctttttatcatagaccaaatgaataaccataatcgtggactatcccaatgtaatgaaaatgtctctgaatctgtgacctgtgacaattctcatcaactgggatcaactacatatcagaaccctaagcttgaaactaccgaggatactgggatatcagtattgttagtccctaagcccaacagtaataaatggccaaatatgctctgttcagaaccctattatgcaagagatggtgtcagtatgatgaagcgtagctttggactgggcagctcttcagctgcttcttccagtgatcttgggtcttcaagacagtcaatcatatgttttgagcgccttaggagtggtaagaagggtgactttgagaagtcccagataagcagtactattagttgtcaaagcattgcttctgtgtcagatatgtcaatttgtagctcttcagcttcactttgccctcagagtgatgcagtaggagattcctgtttcccaattgacactttggaaagcggcacttcaggaactctgatctcttctcaagaaaatgatgatgctttttgtaaggatactttgccaagtgctatggaatgtccgtcttcttcacagtttattgctgatgatgacagtcccggtgacatgaaaatccagagctacttaagtgaggtaggatatacaacagttgagaaccatagtgcttgcagaatgactgacatggattgtaccagtacaaatatgtattctttagatactgaaatgccaagtgataccctagaatcatcaggcccagtggaaagtagcatgcctgaaactgaagaggatgcttacactatcagtcagtgtaataaaggtagtgctccagaacattcaagtgatgagaataactttgataatattcaaatgcagtctgaaatagttcagggttcagcggaggaaaacagattggatgattgttgcatgtctgctatctcggaggaggacgtattgatttctggacaagaagatgacataaggaatcttcccaatgatgaagaattatgtgcggaggtagaaggaccaaggaaacaaatccagagatgttttacattggaagaagctgctgatacaattctcttctgtagttccattgtccacgaccttgcatacaaggctgcgactattgcgttggaaaacaagaaggaaccaaagtttgtggactctattcgtccaactgttgcaattgttagaggatcttttgctaaggaagagagtttaccaaagctgcctcacagacgaaccccaaaccgtaaggtcaaaaggaaaagattggaaggcgaaacaactacaacggaaactacagagaaagacgttgtcgcgaatgactccccccctgtatgttctgcatcgggtattacaaggaattccgataatatgaagccgccaaagctggagtccaagtgcaactgtataattatgtaactcggtcacatccaagattgaaattcctacatgcttggttaaccccgtcatcagcagcgatggagttcagcacaatggatcttccgctagattattttgcaaaggtgcatttgctgtgttttaggtgacagaatgcactgccagctgctattcttttgtaaagtcttttcttctcttttctgcttgtaatgaggtccttgcggtttgtccaaagttgtgctgatagcctatttacttgcaacgcacgtggctgcttgtgaaagtgatggtcg

SEQ ID NO: 26372 - DNA, 1788 bp, Zea Mays
cgttgctccagggaggtaccagatatattgaggccctggagcatatcaagaaatgggggccctatactagtgaaatacaaatgatcgatatatatttggattccagtatacaagtaacgagtacatcatgttataggactaaagatatagctgtattatatgctaagaattgccaatattaagactcccaagatggataagctcagtggttctgcacgtcttatgattgtttcagatcttgaccatacaatggttgatcatcatgacgaggagaacctgtccttgcttaggtttggtgccctgtgggaatctgtttactgtgaggattctctactagtcttctcgactggaagatcaccaactctttacaaggaattaaggaaagagaagcctatgctaactccagacatcactatcatgtctgttggcactgagataacatatggggaggcaatggttcctgatgatggctgggaagaatatctgaacaataagtgggacaggaatattgttgtagcagaaactgtgagcttttctgagctgaagcttcagccagagacagaacagcgcccgcacaaggtcagcttttttgttgataagaagaatgcccaggaagtgataaaatctgttgccgagagattggacaaatgtgggctagatgccaaaataatatatagtggtggccaggaccttgatatattacctcaaggagctggaaagggccaagcacttgcatatttgcttaaaaagctaagctcatgtggaaaaccgcccaacaatactcttgtttgtggtgactctggtaatgatgcagaattattcagcatccctggtgtacatggtgtcatggtcagcaatgcccaagaggaactacttcagtggtacacagaaaatgcgaaggataacccaaagataattcattcaaatgagagatgtgcagctggtattatacaagctattggacacttcaagctaggacctaacatttctcctagagacctgcagtttccttatgcaaaggaagcctctttcaaacctacagatgctgtagtgaagttctacgttctctatgagaagtggcgcagggctgaggttccaaagtctgattcagttataaagtacttcaaaaacatcactcatgcaaatggagttaccatccatcctgctgggcttgaactctcactccatgcatccattgatgcgttgggatcatgttatggtgacaaacaagggagaaagtaccgagcatgggtggacagactttttatcacacagactggttcagatagttgggtggggaggtttgacttgtgggaatcagaaggtgatgtgcgtgcgtgttctctgtcaagtcttgctttgattctgaaggctgaatccccagagggctttgtgctaacccacatccaaaagacatggctgaacggatactcgtcaggggttgagcaggcgtttaagctgtagagcagtataccgtctcggctcgtggttggagttttcttgagaatagaatagaataatgtacctgtttataatattaacttcccaaaaccgcactggaggatcaccagggagaggattcggtgccttctcctatttggcgcgtaagataaatgttttgtctcatggctttcatgagaagatgaaattgactcatcttggtatatatttacaaatcttgaataatgcagcgttatctatatccagggatgtcaacggcaatccagggaaattgggtttttacttcattactcattaatgctttatttggttagaagatgattgatg

SEQ ID NO: 26373 - DNA, 231 bp, Zea Mays
agcggaggaaggggacgaggaggtccaggaaacaagtcggatcggctcggcggaggctatagtggatcggaatgcgtctcgcctcggcccagcaaggatgaaaccctagatcatgttccgccggccagaagaagaacgccgggacgcggagctagctttttatggactcgtttcgtgtccagaccaaaagggagagcttcctccacttgccgttgacaggttggcttccgg

SEQ ID NO: 26374 - DNA, 1011 bp, Zea Mays
cgccacgtcgtccgcgtcctagccactcacgaacgcgggccgagtcaccgcccgcccacctcctatccacttccccatctgccagccgtccgagtccgaccacctctcgtatcgattctccaagcgccgcgccgcgccgggcgaagaagctcgtctcgtctccatggcggccgcagcggtggccatctccacctccgtgtgcacgtcctcaaggcgtagcacgggctgtccgaacgtgaggccccaggcccgtccgctcctaggcatgccgtcgctgcgccggaggctgcagacggccttggccgcgacgggcaagacgccgggcgaggcggaggagcaggtccccgcgtgggccaagcccggcgcggacgagccgccaccctgggagcgcgagggcggggccgcgcgtggacaggaggcccggcagatcggctccatcttcgagtacaccaaccagcggccggtgttcgggatcgtcggccccgacagcgccctgtacgcgccgctcctgggcttcttcgtcttcaccggtatcccgacctccgcgtttctgtggttcaaggccgtgcagacggcgaacagagaggccgaggagcaagaccgcagagacggattcctgtgagaggctgtgggtgactccggcgcactcgccggtgccgtcgccgtgcagaagaacgcgcaccgcaccaccgtggtgttcgcagcgacgggtgacgggtcatgtactcaagttatgtatgtcagtgtactgtattctagaattggagagagcagatggatttgcggcacaaatcagagaaaatatcataatcatcattcgtatgagtggaaaatatttgtatttatttggttgaaaatggtatagcgtttttttgcacttgaatagttagatagattgcttattgcttctagcatatttttggcactcgtgcgtattgctctttattttaactagaataggaagtgctctctcaggcgttctaccattcatgtaatataaatgaacacgac

SEQ ID NO: 26375 - DNA, 3792 bp, Zea Mays
ctgggggcagtcacgcacgcaagcacccctcctgttccatttcaccacggccgcggcctttgtgtggctgtggcctccgtctcgtgctatctcttcttcgagttcttccgcctcccctccccttcctccccccctcggcaaagcccgccttctctctcggtctcgacgcgacccgccgctccctgcggctgcgcgcccaattcacgccccactggaggcggcggcgagcgcacgagtgcctcagcgccgccgatgaggctgcgccgcgccatgcagacctcgccgcccaccgtgtccgcgtcgtctctagagtgcgtgagctcgtgcagggccgcctcgtggaaggggggcggaaggccctacgaatgcagcgtactcttgtgcgcgtggaacgcgccgcgcgcgctcacgggcgcgctcgccagcaccgcgcagtgctcgtcgtgcggccacgccgaggccggaggcggctggaggaggcgcgggcggtcgcgtcggagtaacaactcgttaccgcgcatcaccctggatgaggacatcaatagagggaaatttggttatgatccatcgcgtgcctactctacaagttttgtcagatcttggtctactattgttgaccgaacatggagatcttactgctattcatcatctgattctttcatctctccagagactttgtgggaggatctcaaaccagctgtttcatatcttcaacctgaagagttaaaatttgtgcatgatgctttgaagttggcatatgaagcacacagtggacaaaaacggcgaagtggagaaccattcattattcatcctgttgaagttgctcgtattcttggagagcatgaacttgactgggaatccatcgctgctggtttattgcatgacactgttgaagatacgaatgtggttacttttgaaagaatagaaaatgagtttgggccaactgtgcgacgtattgttgaaggggagacaaaggtgtctaagttggggaaacttcagtgtaaaagtgagggtagcacaaaacaagatattaaagcagaagacctaaggcagatgtttcttgccatgacagaagagacaggttgcataacatgcgcactctcacacatatgcctcagcacaagcagtatgccatcgccgtggagacactgcaggtctttgcccctttagcaaaactccttgggatgtaccggataaagtctgagctggaatatctatccttcatgtacgttaaccccactggttttgctgaactaaggaaaagagttgaagacttgtacaagtcccatgaacaagaattggaagaggcaaatagaattttaaggcaaaagattgctgaggatgagtttctcgatcttgttagtgttgaaaccgaagtgcgttcagtttacaaagagctctacagcatttacaaaactacactcaaatccaagagttcaataaatgaggtgaatcaggttgctcagctgagaatcatcataaaaccaaaatcttgcaatggtgttggcccattgtgcactgcacaacagatctgctatcatgttcttggccttgttcatggcatatggacacccattcctcaagctgtggaagattacattgcaactccaaaacctaatgggtaccaaagtctacacacaacagtgataccatttcttaacgagagtatgttccatttggaagttcagataagaacagaagatatggatttaatagcagaaagaggcattgctgcacattacagtggaagaagggtggcttctggacctgttggccttggaatatcaagtggaagaaatgccaaggggaaagtaatctgcttgaacaacacagactttgctctgaggattggttggctcaatgcaatccgcgagtggcaagaagagtttgttggtaatatgagttctagggaatttgttgatactatcacccgagatcttctaggaagccgtgtctttgtgtttactcctaaaggcgagattaaaaacctgcctaagggagccacggtggttgattatgcttatctgattcatactgaaatcggcaacaaaatgattgcagcaaaggtgaatggcaatctggtttcaccaattcatgtacttgcaaatgctgaagtggtggagattataacttatgataaattatctagtaagtatgcattccagcgtcaccagcagtggctacagcacgcaaaaactcgcagtgctagacacaaaattatgagattcttaagggagcaagctgctctttctgctgctgaaattactgctgacgcagttaatagttttgttgctgatcttgaagatgaaagtgatagtgagctttcacttccaagcaccaagaaagaagatagtaaattcaactgggagaagatattaagttctgataaattattctttgtcaacaaaagtagtgatggctttttacctgttaataatgtctatccaaaggtcaatgggaagcaaaacaaaactgttaaggatttgggcatcaaaatcaatggtcattctacaattcgaggtgatagcttcagtgagttaatgcaccctagcaattccacctgcaaggaagttttccctggtttggatgactggaaatctggtaaaatttctggttggcataatacggaaggcaactctgtccaatggctttgcatagcctgtgttgatcgaaaagggatgatggcggaggttacatctgctcttacagcttgtggaattactgtatgttcctgtgtggcagaagtcagtaaaaggaggggaatgggtgctatgctgttccattttgagggaagctatgagaacgtggtcagtgcttgtttgagtgttgacatgatttttggtgttcttggttggtctgtggggtgtagctggtgtccattgggtgctcttgagtgctaatgggtatcaagagacgtatactgcagtagttcaccactaatactatcttcctccaagatgatgataatgttggaagcaccaagacatcggtggctcaaaattttgttggtcagatccttaaaatctgggaacatagagcttgtccatattcctcattttggaaacgttcgtccgttccggagacgtgggaacaatctcgtcccccatctcatccttgtagtgttaaaatcctttttaagcacgttcccgttcctcaacctcatcgatccagaaacttggttgctaaggtcagatcatgattggacaggtgagcgagtggaatcctttacttctctgtcaaatcagaaagtgagggtgagcaaagtagaactagatatatatggttcattctgaaagtgagtgtacatagcagagtgagtagggttgggctatggctaacaaatcgtacatatgatcatgtaaaacactgttttgcattgcgaattacactgtttacattgtgtagtttgaaataagagatagagatgaataagctgccgactatggagagtcagtgcatgctgggattgattggattatacagaaggccttgtaaaagattgttaagggcggttcttctcactttgtggttcgcatatactagtttgcttaaatgtgcagctagaattttgacctggacgctaattccaaattttgtctgtgtttagtttcctacctctgcatgtaaatgttattgtatagcttcagttttgcgagtcaaaatttgagcatacttaactggcagatgcacgcttctggattacttgccatttcctgcagtatgaatggtaacttaattagaggtttggttctgatgatggtgaccctttcatgaacatctccaaataagatg

SEQ ID NO: 26376 - DNA, 1881 bp, Zea Mays
gaattcggcgtttgtcggggctacatgtatcctctgcacccttagctcgcccccagaacgaggccctggtagaactcatcgccaccgtgactaccattaaaaccaatcggagctgtgaaccagcttcgactcgccccacctcaccgaacccagggaaaaacaaggcgtaatcatgtaggcacctacgtggcttcgaccgtctggcgtgcgccaaatcgctcgtcggggtaatcgctgtggcttcaagcaaggtgccgggcggggtcgctggggagtacgcgcgaagttttgccgcacaacaacctggaagcaagagtctcggcgtaattttaccgcggtgcgcctggcggtcgagccgtggacgggtacggtcggcatctcaccgaactgggccttcatcgctaatcgagccgagcgacgggaattctgccagtattacacatctatctttattggcaaccctccaagaccatactttcttgatgttgatactggaagcgacttgacgtggatccagtgtgatgcaccatgtacaaactgcgcaaagggaccacatcctctatataagccagcaaaagaaaagattgtccctcctagagacttgttgtgccaagaattgcaaggcaaccagaactactgcgaaacctgcaagcagtgtgactatgaaattgaatacgcagaccaaagctcctctatgggtgtccttgcaagggatgatatgcatatgatcgcaaccaatggtggaagggaaaaattagattttgtctttgggtgtgcatatgatcagcaaggccagcttttatcttcaccagctaagactgatgggatccttggacttagcagtgcggcgataagctttcccagtcagctggctagtcacgggattattgccaacgtttttggccattgtatcactagagagcaaggtggtggaggatatatgtttctgggagatgattatgtacctagatggggagtaacatggacttctattcgaagtggtccagataacttatatcacacacaagcccaccatgtaaaatatggggatcagcaactccggaggcctgaacaggcaggaagcactgttcaagtaatttttgacagtggaagctcctatacgtacctcccaaatgaaatatatgaaaaccttgttgcagcaatcaaatatgcgtctccgggctttgtccaagacacttcagatcggacattacctttatgctggaaagctgatttccctgtgaggtatctggaagatgtcaagcagttcttcgagcccttgaaccttcacttcgggaagaaatggcttttcatgtctaaaacattcactatttctcctgaggattacttgattattagtgataaaggaaatgtctgtcttgggcttctcaacggaacggagattaatcatgggtcaactatcatagtaggagatgtttctctgcgcggcaagttggttgtgtacgacaatcagcggaagcagattggatgggcagattcagactgcaccaaacctcaatcacaaaagggctttcctttcttcctctgacgaagcatcactctctacataatacatgtgtaaagcgtaaatagtgaacgccattgtattgtagaatacattattaagtggagactgcctttgtgtatgggtatatcgttccattggaactgtcagaaatcctccactgtgttgtacccgtctgtaatgtgtatactatgttgtttacttgtatgatgtatgtacactatctcctctacatggagttgtcccctacacatggattttttgtagattagttacattatgaacattttcgacagaagttgggtactttacacatttgatcatccattcaatactgggtgtgtgtgtgttttatc

SEQ ID NO: 26377 - DNA, 4374 bp, Zea Mays
atgggcaaaccatgcttctctggtctagtggctattgagctgtgctctatgggaggtattgctgaatgtggtgtgagcattgacactaaagcttcaccacgtcgagcagccatagagaaagctcaggacgagctcaggcaggaatatgatgttcgtgaagaacgaaggagagagcttgaatttctggagaagggaggcaatcccttggatttcaaacttggccatgtagcttcccttagtgtacagtccacttctgtgacagaacagatagctgaacaaaatgtgataagtgaggccaaaggtagttctgcatttgctacatcacctcatggggattctgttgaaagtaacgacaagccaggaaattcattgtgccgtgaaggcaatacagccgataatattacgcttttggatggagatgccagcagcatgggtgtggataaaattgtgaaacgtggaacaaagagaactaattcagctcaagctgagcagttcctgcactgtgatggtcagaacaatgcaaaagaagaagattctgggttgtaccgtcttggtccaaagagccaagcgtatgcacgacgtaggtcaaagcctatcagagagaatgcatatagtgtatctgttaggtatccaccaattcctccattaagttctcagcaaaaagatgtgacaggattaatcccagaaaccaagactgaggataatggtgtttcatccattggtgattcaaaaccgactagtcctaactctaaaaatttggtgacaaatgcatcattactgaatgataaggtggaaatggagacagaaaatgttcaagcaattcctgaaggcaatcaagcaccgaaaaatgagttatcaaacagcaacaatggtagtcctgctattgagatttcaccaaacagtgtgccggataattctcgtcttactgtaagtgatcagatggttactgcatttgtttctgtggaatccccagatgctatttcaaaagtagctgcttcaaggatagtttgttctctcccatatatatccaatgaaatattgaaagaagcacaaactcttgagaaggcaggtaataacccatctatggtaagtgtggttgacgttcatgcatatggtatggataacaatggtgcagcaccttactctgctgtgaaaagtgctagtttgaatgaaaatgaagttgatccaattcatgaatatgctgccaaagctgttactgaacatccagaccaaaatgagaatcttgtaccagtgaatgcagatgaaatggctgatgaaggcttgaataagatcctacctgatgacaaggatgacaagaaagattgtcaactggaagttagtagtgggcctgtcattttgaatgacagttctactcctgtctatcctgaatttagcaattccttttatgcaagagatggaacagaagtttctaacaatgcagtagattcaaaaaataacgcagaacagcttgcttcttctaatcagggaaaagggaacatggaggaatgcaaagattctgacggaaacaatgcaagtgaattgagtgttgcccaaaagctagtgtctgttattgtgccccctgcttcagacgcaggcgatgtgagtaattttgtagaaaatgatgttgataaatctagcagagatcaggagaaggtagcaaagaaggaatatgaagattctgtcgtggcaaagaaggatcacgaagatgctatcctcagaagggcacggtatatagaggcaaatattaagagggctggtgaatggtctctctgcaatatttctttagagaagaagcagaagagccactgggattttgttctggaggagatggtctggatggcaaatgacttcacacaggagcgtttgtggaaaaatacagttgcagcacagatgtcccattggatttcttctagaggtcgagcggtatttgaagaagcaagcattcagagaaagcagaaatctgttgctagagttctagccaatggtattatgaacttttggtgttcagtccatactttacgagctagtggtggtattcctaaaccaataaaaatcgagcaaccgaatgagctagaggaaaataagcttggtgggttcaaatccggaaaagcggatgaggagtgtttggagcaagaaaagtcgcgccagtctcctattcagagctttgcacttaggtttcttgagtataacattaatgcatctgaatttctgccattagccgaagcaccatcaactcctgacaggctaaatgattttggcattttgaaagcaaatctcttttatggcgtagcacccggtgcaatgcaggcatacagggagtctatggaccgtctccttatttataataacaagaaaattggtgacactgtactcaaggatgattatgagccatcaacatatgcatctgtcacagatgtccctatggagaatgcatatggagatgacgaaagtgaggcacacacctacttattgcctggagcttataatggtggtttggcatcaaaaaatagtcacaaaaagaagcaccatttgcctcagaggatgaatggcgcaaggtcatatgaaattggtgttgacagtccttacgaaccactgtatttggaaagtaaatcaggaaaccagcaactcttatcgaatggcaaacaaacagacttcctctccattcctataaaacgcatccgcacagcagctaggcagcgggttgtgagtccatttcctgctggtgcttctgggacccctcaattcacaaataaaacggacgcatctagtggagatacaaactcctgtcaagatgatcaaagttcattacatggagggtcattttctaggaagaatgcagatatagagtccactgttgattttgacaggcaattgttgtatgatggtagtgaggtgtcgacaaaatctaaaaagaagaaaaagactaagcacccagggtacaaggcactaccaaatgtgtccgaatcttgttcgttgagggctcctggaaagggcaattatgatcatagatctcagatcgatatgatagctcagtatgagcagaaggattatattaaaaagagacaggagacaaatgggaattttggtgttattgatttatcaacagtggttaatggcctacatgctgctaagaagcctaaattgttgaatcaagcaccagatatttcactggaagctcttaaaccaattggtccaatggcctctcttgctgcatcacaaatgagcaacatggcaaatcctacgagggttataaaaatcagcacccgtggaagaaaaagtaaaggactcaagatgcgagctggtcattcaggtcctggaagtccatggtcaagttttgaggatcaggctcttgttgtccttgtccatgatatgggtgaaaactgggaattggttagtgatgcccttaacagcatcatccaattgaagtgcatatacagaaggcctaatgagtgtaaggaacgccataaacttctcaccgatagaagttgtggcgacggtgctgacagcgctgatgactcaggctcatctcaacactatccttctgcattgcctgggattccaaagggtagtgcaaggcaactgtttcagcgccttcaaggaccgtttgaggaagggactctcaagacacacttcgagaaaataatattgcttggtcaaaaattgcatcaaactcgtagaaaggatgagatccatgagctgaggcaaaaaaatccacttcatacttctcatggttttgcactttctcaagcatgtccagggaacttatctggtgtcattttgacgccacttgacctttgcgatggaccttcgaactcggatgcacttacaggatccaatacaagtgggttaggtctttcaaacaataactgctctgttggtcctactcttcctacatcaaatatgaacttaagattaccaggttctcctggtatggttttgggaagcaattcaccattgcctttgaatgctccctctagggatgttcagaggtatggtgtgcctagaccaacctcgatacagggtgacgagcaatcaagaattcattataaccagatggtaaatggcagaaaccttcagcaacctggagttcctgttcctggtgtgttgccatctggtgttgatcggggtgcccgaatgatgccacctgcccatggtgttggaatcatggctggactaaatcgaggtacacctattactaggccaggttttccaaggcttggttctcttggaaacatgtcacccaccgatggtcaaggcttaaaaaatactgtaaacgttcatcctggtgccatactgggacctggaagtactatgttgaggccacgtgacccaatgcagatgtttagacctatgtttggtaggaagtaacgtgat

SEQ ID NO: 26378 - DNA, 329 bp, Zea Mays
gaggcgacgcactcgagcgcgtagtcggcgctgacggcgtcgaggtcgacgcgggagagatcgagggcccggccgcctccaccgccggcggagagcaggaagctgaggagcctgcgccggtcgcggcgatacagctccagcatcgacgccgcatccatggcccaccgcgcgcaggtgctggtcgaggccgagggtttgggcgcggagctaggacttctggctggctcacgggagacggagagggtgaaaactgaggagactggccctgcgactgcgagtgcggggtgcgcgcaaatcagcggagggacagagacagccggacccggagt

SEQ ID NO: 26379 - DNA, 3072 bp, Zea Mays
cgaccaccctgcgcgcaccacctcggctgccattgccattggccattgccatagccatggccacgccatgacgccccgcccagctgcacgcgctcacacccccaccgctccactccgctccgcctaactctcaccctcacccgccaccgctcgcctccccatgcttccgcgctgctgccgccgccgctcgggtgcctcctgcctcgccgtgctcctcctcctgctgctgcacgcgggcgcggcgtccgcgcagggcgcgcttgcgcggcaggacgtcgcggcgctccacggcctgcgcgcgtcgcttggcgtgcgcgccagcgactggcccgacagggccgacccctgcaccttctggtcgggcgtcgtctgccgcgccggccgcgtcgcggagctccgcctctccgggctccgccgcacccgcgcgggcgcccggagcgcggccttcgccgtcgaccaactcccgcggctcgcagcgctccaggcgttcaacgcctccgggttcccgctccccggccggatcccgtcctggttcggccgcggcctgccgccgtcgctcgccgtcgttgacctccgctccgcacgcgtcaatggcgagctcccggtcgatctcggcatgtccgggaacctcaccacccttgttctctccggtaacaacctgtccggccctatcccgctgtcgctcctctcaatcgctggtctccgcgttctcgacctctccgccaacaatctcaccggcccgctgccgaacgtgtcgttctctggcagtggtggagctggagtcttgttcaacgcctctggtaatgccttgtacggcgccgtcggcgatgccactggctccctcaggaagaggttctgggttgttgatgtctctgacaattacttcgatcaggtgcttggaactgggtttcagaatggaaccgatggtgtagtggatctcaggatgaactgtttgtctggtgcagcaagccagcgtacccgcggggattgtgaggctttctacacgaggaacggggtgaggcttgcgttggaccccaagccaccatcgccattgccagagccacagccaccacaggtgctgatgccgtcaacgaaaaagagagggggcaaatggaagtttgtattgaccggggtccttggtggtgctgcaattctggtaacacttggccttagcgttctggtattttgcttgttgagaagaaaaggaaggaaaccgagagggagaggagtggagcagactgaagagggcattcggtctgggcggagaagtagtagtgtgaatcccgtcacaatgtcacccatggcatcccccagagccagtggttcaccaaagggcgttcctattatcacagatgaattcacctatgagcagttgcaccatgctgcagggggctttggggatgataacctcgtcaagcatgggcactccggtgacatgtactatggtgtcctggagagtggctttcaagttgtcataaaaaagattgatctgaagaccaggaagaagtgccagggcgaattgagcttccttacaaagcatacccatgggaggatcgttccattgctgggccatttggctaaggatgaagaggaattgcttgtctataagtacatggcaaaaggtgacctcacaaccgcactgcacaagaagtcagtggaagttgaacaggggttgcgctcattggattggataacgaggctcaagattgcaataggtgtggctgaggccttgtgcttccttcatgacgaatgcaatcctccgttggtccacagagatatccaagccagcagtgtgcttcttgaggacaaatttgaagtgtgccttgggagtctgagtgaaatatgcactcaacaaagtgcaggaagccaaagtttcttctctcggattctaagatcatcgaagtcccttgacaagaacataccagctagctgctcatacgacatttactgtttcgggaaggttctactagagctaatcactggaaacttcggtgcgagtggctcaaccaacgcagattcagaagagtggttagcaagaacattagattacatcaacgcaaatgacaaggagggtgtctcaggtattgtggatcccacccttgttgtggatgatgaccatctagaggaagtgtgggcagtgtccatcgtcgcgaagacatgcctgaatccaaagccctctaggcgtccactcgctcgatacatcctgaaagcactggagaacccactaagggtggtgcgggagcaggaagagttccaatccagtccatctcacctcagaagtaccccatcccagggctcttggcgtttcgctttccatggaaacaagtaccacagctgggaggccatgccaacgtcggggcaagcacttgctcggaaaaatacagcgaagtctcaggggaccgaggggagtgacgaggacgaagagaactcgttctcgttcaagagggcttctcgggacgattttccggatcccatagagtttgaaggaggtgttgttgtgaaggagtacccgcagactagctagcgatacttgatgtgcatctctttgatgtctctaggtgaaaagctgtgtatacagaatagataaatttttcccctcttttctctttacttgtttatctcagtcgattgaaatggaataaatggcgcactgggtgtgccatccttgaaatgcaagccagtaaagttctcagatagagccatttgccattcaaaaactgttatgaaattttagtggttgatccaaagtgaattgtagtggagagcagtttaagccttacccgggaggtggttctggtcgttggattgaatgggatcatacttctgcagctgaaaacttttgagcatggccactggtgcgtactgagtgtgatagagcattcatctgcagctgcagtttcatccggtgagcttgaacaccgaagacgaaatggagggcacctccatggtctgttgtagcttctgttgagtttgaaaaaacggacaaaagaagcaatctgaacattatggagatcggtgataccagactagtgccatggacggatggcacgcagttatggagatcggcgacag

SEQ ID NO: 26380 - DNA, 3182 bp, Zea Mays
cctgttcccacccatgtagccaccccccacccacccacaccacacacacacccaccgcgcgcagcgcagtccatccatccacgcacacgcgcacccgtccctctcggcgcccctctcccccctcctccactccgctgctgcctgcttgcctcctccttgccgccgcgaccgcgaccgccgttcgctgtcgaggccagaggagaggagtggtcaagtccgaggccacctgcccaggctcagacctcccccgccacaacgcgagccgcatcgcctcgtctcctccacgccatacacgcccgccttcccttccccggcgaccaggacccctcgcccgcggcgccagcgagctcccccggccagtcgtaggcctcccggagctcagcacgcacgcaggtgggtccagtgaggcctggttgtgcgcgttcctgcgggcgtcgtcggggcagatccatggaactcagccgcccgcagcgcggatagtactgcacttgtgcaccagccaccagcggatcgccaggactgcccacctgctgctgcttgtgtcgctagccatttttcgggcgtctggcttggaggatatggccgcggcgatggacgcgcccaaccctggagcggctgctggcccaggaatgcctagtgacgccctgtaccaggagctgtggcatgcgtgtgctggcccgttggtcacagtacctagacaaggcgagcgtgtctattacttccctcagggccatatggagcagctcgaggcgtctgcacaccaccagcagcttgatcagtacttaccgatgttcgatctaccacccaagatcctatgcagagtagtcaacgtggaactacgggccgaagctgattcagatgaagtttatgctcaaattatgttgcagccagaagctgatcaaaatgaactcaccagcctggacgctgaaccacaagaacgtgaaaaatgcactgcccattccttctgcaagacactgacagcttcagatacgagcactcacggcgggttttctgttcttcggaggcatgctgaggaatgtcttcctcagctggacatgtctcaaaatccaccttgccaagaactggttgccaaagatctccatggcactgaatggcattttcggcacatttttcgagggcaacccaagaggcatctccttaccaccggctggagtgtctttgttagctcaaaaagattggtttctggggatgcattcatcttcatgagaggtgaaaatggtgagctacgggttggtgtaaggaggctcatgagacaagtaaatagcatgccgtcatctgtcatatcaagccacagcatgcatcttggagtattggccacagcctcccatgccatctccactggaaccctcttttctgttttctacaaaccaagaactagtcgctctgattttattgtgagtgtgaacaagtaccttgaagctaagaagcagaaaatatctgttggaatgaggtttaagatgagatttgaaggtgatgatgctcctgaaagaaggttcagcggaacaatcattggcatcgggagtttgccggcaatgtcaaaatctctgtgggcagattctgactggagatctctaaagatagaatctcaccatgggaagtggagccactggatgcagctaatccacaatcccctcaacctccactaagggctaagcgtccacgacccccagcttcaccttgtatggtttcggaactgccttcaggttttggactctggaaatccccaattgaatcatcctgtacactctcattttcggaacctcaacgggctcgagagttatttccttcaatccccacgtcaaccttgtcatcttcatcaaatgtcagttttaattcaaagaatgagccgtccatgctaaccagtcagttctactggtcagcaaggcatacaagagctgactcctgcgctgctagcaccaacacagtcgtaattgaaaagaagcaagagccaagttctggtggttgtagattgtttggaattaatatatgctcagctgaggaagaagtattacctgaggttactgctccaggtgttggttatgagcagactgctgcctctgtagagttgaactcggataagctctcacagccatctgatgtcaacaattctgatgccctagcagctagcagtgaacgttcacctcttgaatcccaaagccggcaagtgaggagctgtaccaaggtaattatgcaaggaatggcagtaggaagggctgtagacctgacaaagcttagtggctacagcgatctttgccagaagctggaggagatgtttgacatccagggggagctgggttccacactaaagaaatggcgggtcattttcactgatgatgaggatgacatgatgcttgttggagatgatccttgggatgagttttgcaggatggtgaaaaggatttacatttacacatacgaggaggcaaagaagctgacatccaagtcaaagttaccggttagcagtgacagcagcaagctgagcgctgcgaactcactgtctgaatgactatgaacaaaaactgcagagtgctaacgtccctctaattttgttatttccatcatttgattatgggggtgaatgctcacggttgctccgtgggctgaagttgtggttggcattcaactgccttgagttttggaggcttttggactgccttgccagcatgagcctcctggaagaggcaccctggcatctgcgtgccatttcccatttgttcgtgccgtttggtaggagtatccattggcttatttagcaggtccctggtttgaagaaagaagcggtcagctgcaagatggacggtgccttgcctcttcttcgactacttagctagtaattaggactatgtatgtaatgaatgtatatagtgccattaagacgcccatgccctggtattgaggtcccggcatttgtatgaatcaattgttcggaaattgttacctttagcagcaacgaacctgagggtgtagggtggccaggtgggagaagttgtatgtttctttcagtaacaatctttgtgcaagtgatctgtatatagtctactgttttaataagcaatgttgtgcaacttgcgctcctacaccctacagtacagtggggcttttcttgtgcttactgttcgcttgatgactgtctacatttggctgtgcctttttgttgcccg

SEQ ID NO: 26381 - DNA, 223 bp, Zea Mays
ctggaatcaaaattggcccggtttggagtttatcttctctccacggcccgacaccaatccttgtctcatcccttccggattgaaccctgccacacgcgagacggcgcaacgctggcggcgcggggggcgaagaagcggctgacggcgaccctccccaccgccttctcaccggtaagatgctaccatcttctcctatcctcacgttatgcgttactttctatgt

SEQ ID NO: 26382 - DNA, 1419 bp, Zea Mays
gccgtgtcgtcgcccttcgctagtcgcttcgctgccacatctctcctcgtccaaagactccaagctcctgtgcggcctgtgttctgctgccgcctctggtccacatctccccgccgccgccccgtcgtctgccgacacctttagcgctgggaaggatcacaggggatcggcgcgaggcgggggacctgcggtttttgtcgcccggatggcggcggagcgatgacactggcgtcgggagcggcgcggcgttgggatgcggacgatctgcgatgtgtgcgagagcgcaccggcggtgctcttctgtgcggccgacgaggcagcgctttgccggccctgcgacgagaaggtacacatgtgtaacaagcttgctagtcggcatgtgagagttggacttgcagaccctaataaacttgtccggtgtgatatatgtgaaaattcacccgctttcttctactgtgagatagacggcacctcactttgcctgagctgtgatatgactgttcatgttggtggcaagcgaacccatggaagatacctgctcctaaggcaaagggttgaagagataaaccgggccatatggatgacgtgcctatggaaatccaagatcctgaaaaccagagagaccagaaaaagccacccaaggagcaaacggcaaaccaccataacggcgatgatccggccactgatggcaactgtgatgaccagggtaacattgattcaaaaatgatcgatcttaatatgcgcccggttcgtactcatgggcaagaatcaaattcccagactcagggggtaggtcttagtgtgaacaaccatgactctccaggggtggtgccaacaagcaattccgaaagagacaccagcaagtaaacgttggaagatcggaatatacatttcaactacatatactgttctatacgagttcattttgtggtgtgtgtgtgtgtcactaatttttactcaattctaaattataagtcattctaacttttttgaagaggtaaagtatctcaggtttgactaaaattgtagaggtaatcacagatttatgacatcaactaggtatattttaaaaatataattaattaaaacactaataatacttatttggtatcatgaatgtgattgttttattatataaatttgatcaaacttgagatgctttggctctcttaagaaaattagaatgtactagtaagtatatttttggcagagttgtagctaacagccgcatctcaattggcttgtcatgacctagattggcaaaaccgccaagttactttcacatgtacttgttattgtcttacagacttttgaccattatacatatgattcaggaattccggtaatctgtcgggtgtcccggtgatactaaatgatccactttatttgttcactagctggatgcccgtacgttgcaac

SEQ ID NO: 26383 - DNA, 1280 bp, Zea Mays
gcgatttggtgccgttgccgtactgccgtgagccaagagtgactgctgttggcgctcggcgattgggcccatattgccatacactgtctctatggagctgaagtgttatgtattggcagcgtgactggtacttgacaatactctagattaccgaacaacagtttgagccagggattatagccaaaagggattatacccccaaggggttcaagtgataaagaggggattaactcaatccctcctggattcaatacctctctggaataaaaacctgtaaaccgaacatgcccctagggaagtaatccattgcaaacgaacatgccctcagggtttactattgtgtccgctcccaccgggtctgcgcatcagagaccgacaagactgggaaatccagagatgcatttttctaccgatcagctgatcggctcggcgttcattgcctttgggctcacattgttcgtgtgtttcttctacgttgccgtcgtgtccaagctgcttccgccacatcaaaatggattcctggccgccatccaaaacgactggtattactgtctgcttgtgccgttgacgcttcctgtaataatcgtggctgtctacctgcactggctcagcatgaagatgttcaagcacgcatgaagcagtcatgcagcttccttccggtttcagaatcctggtcaaaatcgaggttggtttggtttagctgaaagtgtcaaggcaatagccaatttgcttatatacagcctgcatttttttgctgtctccaagatgtaatctggctatcgaatcactgtactaacaaaccctgcatcaatacgagctgcaatccattgtttcgctttactccatagctcacggtagcgcgacatatctcgtaggaaggttcaattcggaataattactggcatgtatgcgttttttttcaatgtgcacctttagggatgctattatctatgctatgcagcttcaaaagtcaaaaccatgggttcttcccttctatacatatctggtcatcagtatgtgcttgcccctctttagagacgagggtacaggagtgtagcaccaattagttcgagtgatgtctctctgcccacatcatcattagatctcccagatgttgcagatctctttgctccccctgcagacaatgcatcaaggaagagggaatcaaatgggtctgctcttcatgactcgcgcaataaatttccaaggatgcaatcacaatcccaaggcataggaagtgctgcagggaacgccctaattccaccgcagcttcgtggaag

SEQ ID NO: 26384 - DNA, 829 bp, Zea Mays
ttgaagatcaaggaaccatgcagctgatgatgtaactaatcaatggtggcaatgaaacgatgaactatcaaacctgcaaaagaaaaaccatagcaaatgggatggatttgttaattctcttgccatagcaaaatctggacgttttattgttgctggtgttggccaggagcctcgccttggaagatggggacgagttcgatcggctcaaaatggagtcgcaattcacccaatccgactaaaagatgtgaaagaggacttgtagagtagattgatgtcttgcattacagtggaacgtccatccatccagcctgcacttctgcagccacggcacaaaagaaaatttgttgaggctaactgggatacatgcaagcaatacaaatttggagggcactacagatgatttttgagctccggttatgtgtgacacggggaatttgtgaggcaattttgtaacttctacagccttctggagcggacaatgaggatttgaagatccatattttttgttccccatgtctggttaactgcattcttttttctgatagctagttctcgccattcgcttttgtacggggtttctccttgcttcgtgtcttgagcgcacgaatagtttgatttggctgcatgacctttatagggtagttccaacaatgacttacgagctagttgtaagcattttattttattctatattataattgaagagaagtaatttttgatcaatagttagtctcaaaatcatgtggtgaaggaagagaagcaattttatacagtattatgaggtactgctaaaagtttttttaactgctattgcttcacagcattatgc

SEQ ID NO: 26385 - DNA, 1259 bp, Zea Mays
cccgctcccgttccccaatcccagcaccgatccccgcccctccgacgcgccggcggccatggacatgtcgtcgatcgccgcgaacctcggtctctcggggtcccgccccgtcatccgcaaggccggcgagctccgccgcctctgcgacgtcaacttcgattcttctgtcctcggcatcggcgaggtctgcaaggccatcatctgcctggagatcgccgcgtccaagttacaggtgatatttgaccgggcggaggctgtgcgtatgagcgggatgtctgagaaggcgtacatcagatcattcaattcgctccaaaatggtcttggtgtcaagacgactttggatgtgcgtgaattgggcatccagtttggctgtgtcaggctgatacctttcgttcagaagggattgtcactctataaggagcgcttccttgctgcattgccaccttcacgccgggcaagcactgactttggtcggccagtgtttactgcagcagcattctacttatgtgcgaggaggcacaagctcaaagttgacaaactaaagctgatcgatctatgtggcacatcgagcgccgaatttacaacggtttcaacatcaatgacagacctctgctttgatgtttttgggatagccaaggagaagaaggatccaaagtccatcaaagggaacagagaactgctggatgttttgccaagcaaaaggaaacatgaagatggcgagagaagcatacaaggactggaagtcgtccgttctctcctcgaacaagaaaaccaaaccagaccctgccaagcctaggaggcaagctcaactcaacttcaagaagccggcagaagtacctcctgcagccaactagatgagtacgaaccctcttcgcaacaaatgcagtttgctgagactgaaagtggtgtatttgctccatcctcatctatgttccttctgaacgcatatgggaaaaaaaagcccggacgcctttttgctccttgtttttgtttatctttgtgacgtaagttattcatgaaagtgctgttgtgcggcatacatactagtgtaaatgacgacatgtttatattctagtgttacatagagagagagagagagatgtgttggaggatgactagctggtctgttatctcatctcatatctagtcttcttggtgctgtcagcccaattggcgccacttgcaccctgacgccctggcgcctacgcgtgcccatgtggtcatctggcaggctccaggtattctttaaagaatacgag

SEQ ID NO: 26386 - DNA, 1813 bp, Zea Mays
ctcaaatcacttcttcccggactcccagactcctcccaaaaccctcgcatcctctcccacgcatgtcacaatcgccatgaccgacagaaaccccgccgccgcctcaagcaagcgtcactgtgacctctccctcgacgatcccacgccgtcggccaagctccagcggtgctccgagccgtcagaaccaacgccggcggggaaaccgaacggcggcgcggcgacgggagaggagagcgagatgatggccggcgcacggaaccctagggcgcagaggtacctggtcgccgtggagtacattggcacccgcttctccggctcacagaagcagcccaaccagcgcaccgtcactggggtcctcgaggaggcatttcaccgatttattgggcagccagtttcaataatcttttctagccgaacggatgcaggtgttcatgctttatcaaatgtttgtcatgttgatgttgagcggataagtaaaaggaagcctggcgaagttttaacacctcatgagcctggagttgtaaaacgtgctgtgaaccactttctactgaagagtgaaggtgacataatggtgactgatgtctgctgtgttgcaccagattttcatgctagatacaaatctctagagcgcacgtagatatcactatcgcttgcttgctggacctgaatcaacatctgtttttgagaaaaactctgtttggcatatatctgaagatttggatattcagtcaatgaagaaagcatgcagcatacttgttgggcatcatgatttcagttcatttcgagcggctggatgtcaggcaaactctccagtgcgaactctggatgaacttagtgttacagaagtattccctttcatgttttttccttcaagtgtagaaagatcagagttggaattatcaaatgtctctcttgtttattcaaggaaaccagacatggaatcttctgggaaaggatctgatggttcctgtaccagtagtgtgaaatcagattttgagaatggaaaagattttggaaagcggtcaaggcaccgttgctttgttgttactgcaagggcacggtcttttctttaccaccaggtaaggttgatggtcggtcttctaaaatctgttgggactggagatctaacaactgcagatgttgagagaattctggatgcaaagacggttactgctgcacccagtatggcaccttcttgtggtctgtaccttgctaacgttaaatatgatctgaatacctgaagacaagttttatctagtggcttctgttggtgggcctccagattttgtcagctgttggctatcaaaggtatacctgaatccaatctatgaatagtgcacctcagtgagtgcaactttgaagtatctgtaccaggaattatatgctgccacttgccaaagctttcagttgcctgttttgtccactgaatcttgcatggtgattgaaaacctagaattaagtttatctgtcagcacaagagccggcttcattctcttcttgtacacagagctcttctgcatgttcagaaacaaaataggtagcttcattttagttaagttcaactatccactctttaaatttcagctggatccacccgattttgttgggtgtacgtagatttgacctggtaggggcaaaattttatttcttggttttctcatgactgtacttggttcttgatatataattaattagccaaatgcgttgtgtgcatattgaaaatattcttttctgttccttgataaattacatcgagcaagactgcaagagaactttcttcaagaaaatattcttttctgttccttgataaatt

SEQ ID NO: 26387 - DNA, 5353 bp, Zea Mays
gggagaggagagccgcccgcatccgcgcaccgcaccgcaccgcgccgcgccgttcagagagggagaggaggggacgcgaggaggaagaagaagcaggcaaacagcagcagaaggcagaagccccgtcccatccccggcagccccctccatccaagtgatttcaagtagccaccgagaagcggagaaggtgaccgcacctcacgcaatttgcccctgcccgtcgattccatcgcctcccgccgtcccttccctcctctagggttgtcttgtgggtgcccgtgcttcccaccctaggggcaggtccagggccgggccttctcttcgccccgcctccgctgctcttttctttgctgctagggttaggttagggttcgacgctgtggggaggggcatcctcctccctcgccgccgccgccgccgccaatgcctcccggcggtaggcgcggcgccaagcagcgctccaactggaccagggaaccccagctaggcgaccttgtcctcgccaagatcaagggatacccgtcctggccagctaagcaagcccgaggactggaaacgtaagccaacgccaaaaaagttcttcgtctgcttctacggcaccggggagattgcctttgtacctctggcagatcttgaggaatttactgagaagaaaaagaacgatctgttagatcgagctcttaaagttcaaagaaaatatgttcaacaatttaatgttgctgtggagcagatctgcaaggcttataatgaattgccaaaaacatctgaagccgcaaatgtagcattgcctgatcagagtgaaaagactacagagcacctggtgaggtcacctgatattggtgggactccaggactgggacaaatggaagatgatccccctactgattgctcaagtacttcagggcaagggtcagggaccgaggaggatgtcaaagatggtggtcatgaaataggtgataattctttggcagttcctcaaaagaaagcatctttacaacaggatcctaagcatcccaagacaaagaagtctgctgcatcaaagtctggttttgacatgtacacagaacaggagcattcaccaacatctctgcgggcagaaaggcagattgaagaggtgaaaattgaagaagagagctgtcatctagaaggttttgttttggaacctaacttggaggtggtttgcgcccttgaagtgccaaagaattttaaatccaacaagctgttgaggaatgctgaaagtaaggaaaatgagcatgttggtgttggtagtcctactggaaggattgctgttgaggccgcatctgatgttgtattaaacatgagtgctgaagaagagagcagagaatttaagaagtcaaaaatcatgacaaaacaatcactgactactggttcagagaaaagggataataaaattgtccatggaaagcctgacaagcaattgactggaaaatcatctgcagggttttctctcaatcagaaatctctgacaggtagcgggcagcacaagatggacagtagtgctgatacacgtccggcaaagaaggcaagacttatggacagggctggtgaaacagataagacagttgccaagagtgagacgaagttaaacatcaattatgaaaatcataatgctgtgaaacatgagcaatctactgctgtggaaacatgtaaaaacacaattcttaagactggtatcggtgatgatagggcacggaagtcaggtggtgctgtatcacccatatcaaagcttcattctgagatcatggaaccagcatctggttcttctgtaactcagtctactgttgctgattctcttaaaaagggttccagcaggaaggaggatgtctcacgtgttgataggaaattggttaaacctaagagaagagcgtgtcgttttgatgatgacgaggatgaaggacagcaaacaccacttcatagaacttctgccaaatctctctctacgcatatagtcccaactgagaaaccaggtagtcggggaaattttgcttcgcatgttggcaacgcttctggaaaaaaaccaggccctgccagagaagagaaatcaagaagtgttaggatgtcacctgtgaagcatgagccagttttttcttcaccgagtcaggataaagtgcatgctagacaccagttaatggggagaaatctgatcacagggtcggttgagactcctgtcattggtaacaaaatgagcctggttgatggcaaatcctctgctcaagtaaaaatgccggcatgctctgaggtgaagaaacttcatagtacttctaaaccattgcaagtaacatctgggaaatcccattcccgaaactatcctgcttcagaaaagatcgccttggtgcccaagtcagaagaaacaaaggctaaatctaaaccagctacatctgttgagcataaggtggccaccactttgtcaactgaacggactgggaagcgggaccacctgaaagaggaaagatcaagttctgttgataaagcagcttattctgaacctaaccctgactcggccaagtcaataaaacatcttattgcagctgcccaagcaaggaggaaccttatggcttctgctcttgcaaaatttgatgggtcttcgactgataatagtgctattacctctacatcatatggtttgccaagactaagccctagtcctgtttttcgcattccatccccacctagaattgcttttcctgagagtcctggtcaacgtattctgaaaagcccaatggagcttgataatggtcatggaaagagtcccaaatctaggcaggccagcggttcacctagtggtggttctgatgcagcaattgctcgtgatgctttggagggaatgatagagactttatcaaggacaaaggatagtataggccgtgcaacacgccatgcaattgagtgctctaaatatggcattgctggagaggtcctttctctcacatacgccatctgcatcactgtttcattgttatttcactatccttattgtttctcttccagattgtcgagcttctcatacagaaattggagaacgagcataatttgcatcgcagaattgacctcctttttcttgtggattccataacacaatgttcccattctcatagaggagttgccggggcttcatatgttcccactgttcaagcggcattgcctcgtcttttcggtgctgctgctccacctggagctggtgctcgtgaaaaccggcgccagtgccttaaagttttaagattgtggcttgagagaaagattatgccagaagacatactccgaaagtacatgggtgacattgaggtgccaaatgatgatactagcactagtttaatgttaaagcgaccatcccgttctgaacgttctgtagatgatcctattagggagatggatgacatgcttgttgatgaatatggaagcaatgcaacttttgagctttctggaattttatcatcaaaagtgtttgaagatgatgaagacttccctcaaaacaatgggtcatcatcatttgtttcacggcctgttgaaggtggtgtcatacatgaaactgaagataatattgctccagcatctgttgaggaacacattattagagtagaacatgtagctactgatgctgctatggaagatgctttagagttacttggcaacaaccaacagactcatggagctgtcattattgaacatgactctagtcaaggtccaggttcagagcaggcattgatcgcccagaatgagcttccccctctacctgatggccctccaccacttccatcagattcaccaccacctccacctcctttgcctccttcaccaccacccgctacaccgccaccaccacctccactctctccagcttcaccacttccgccaccacctcccccactaccatctggaccacctcctcagcctgcaccaccacctctgccaacccaggacccacctcttccttctattccgctgcctgtttcttcatctccgttgtcattgggttatcagcctccagcgccagagtacttcatgacgcccaatggtaatcaattggcccagatgacagtaaacacatcaattcaagctattggaaatacaacaaccttcattcctggtggaccagttaatggacaagctgcagttaattttgttacttcaatgccggcagaatttggaaatactagcgtatttatggcgcaagcttctaatggtaattaccagtttcggccaactggtgtaccttttcagcaagggaatttcagtgcctttccatctgcacaaacacctccagttcatccccattctcgtatggcacacatgaatcccatgggccaacaagctgttgcacctccacacaatccttatgctgcacagtcctttccaaacagtcagagccattatccatctgaagaacattggcggatggcatctggtaacttcagtccagatgaccagcataattggatagcaagtggcagatcattaccttgctcagaagggccatttgtgcatgatggatattcaagatcaaacattgacagatcttcaatgaatcctatgaatcatcaacatactgttctgaatcatttgccatctggagcaccactaccaggccatatttctcagatgctaccagccaggtctgatatgcacactcttaattgctggaggccctcttgatagagttgtaaactgaacttcttgtttgtgattttgacatggaaagctcagggcattggaggcaatttgaattgagttcaacaactggtggctgttagtctgagatggagatgcacttgccagggtttaacgatgagatctgtcatagtatgtggaatggacattttacaatgtaactagtcctgacaacagtatccagcagacaatctctcttagtgtgagctcatcttttcacatgacgcaaatgtcctccagttttttagatgttgcttccagtatggatcaggacagcgaactgttcctatgctatggtagtaaatatcttgtgcagatacattaattataaatagaggtctggtagtaaataccaggaactggtatcatcaaggcattttgtcacggtgcctatgctatggttcgcttttttctcttaactgttgtgctcaatttgcgaaattcatttcaaatttcagttagctaatcacatatattctcaacaaccgtattttatgtttggtgtttagactagaattgtgcttagacaacatgtacatcactgagtttagatttaagagcggaagttagttttgattctgttaggacggcgaaatatgtgctgatatttaagagctctagtttattcttgtttccaaagactgctgatagcgttggttttctaagc

SEQ ID NO: 26388 - DNA, 2978 bp, Zea Mays
ggattatctgggctctagtttcgtccctggaggggaaatcaattgaagttagacaggcagctggtctactactgaaaaacaatctgcgaacgactttcatctctatgcaaccttcgtcccagcattatgttaagtctgagctgttaccatgtataggggcaaccaatagggctattagatccacagttggaacagtgatcagtgtacttttccaaattgtacgagtcgctggatggattgagttgtttcaggcactccataagtgtttggagagtaatgacctggatcacatggaaggtgctatggatgcgatatacaagatctgtgaggatgtccctgaagagctcgatgttgatgttcctggtttgtctgaacgaccgatcaatgtgtttatgccaaaaatactgcagttcttccagtcaccacatgcaagtttgagaaaactatcgttgggttgtataaatcagtacatagtagtgatgccatcggcactctacatgtctatggatcagtatattcagggattattcaaccttgcaaaggacccttcagcagatgttcggaaactggtttgttcagcctgggttcagctcattgaagttcgcccatctattttggagtcacatcttaaaaatgttactgaattgattctgcaagctaataaagatccagatgatgaagtcgctctggaagcttgcgagttctggtctgcatactgtgatgtgagcatgcctcctgaaggtttacgggagttcttgccacgcttaatcccgactttgttgtcgaacatggtatatgctgatgatgatgagtcccttgatgatgctgaggaagatgaatcctttccggacagggaccaggatttgaagccccgctttcatgcctctcgattgcatggatcacaaactggagatgatgatgatgatgatgatgctgtaaatgtctggaacctgcggaagtgtagtgctgctgggttggatgttctctctaatgtgtttggtgacagcatccttccaactttaatgccattgattgagcaaaacttggctcgaacagatgacaattcttggaaggagagggaaactgctgttttgtgtctaggcgctatagcagaggggtgcattggtggtctatacccacaccttcctcagattgttgccttcctaatcccacttcttgatgataaatttcctcttatacggagtattacgtgttggacgctctctcgatatagcaaattcattgttcagagccttgatcatccaaatggacgtgaacaatttgataagattctcatgggattgctaagaaggatattggatactaacaaaagagtgcaagaggctgcttgttcagcgtttgcaactcttgaagaggaagcttctgaagaattagtaccccacttggaagtaattttgcagcacctcatgtgtgcctatggaaaataccagagacgaaatcttcggatactctatgatgcccttggtaccctggctgatgctgttggagcagaattaaatcaggcaaaatatctagatatatttatgccgcctttgatcacgaagtggcagcaactttccaattctgacaaagatctatttccactccttgaatgctttacatctattgcacaggcattgggaccaggatttgctcagtttgcggaaccagtgtttcaaaggtgcatcaatcttatccaatcgcaacagttggcaaagattgatcctactgcagctggtgcggtgtatgatagagaattcattgtttgttcgttggacctactgtctggacttgcagaaggtcttggcgctggtattgaaagtcttgtttgcccaatacatttgcatccacgtcttcaagaatttcttactgttgcagcaaagcaactgaaccctcagtctgtgaaggatgcggtatcagtagctaacaatgcctgttgggctattggagaattagcaatcaagattggcaaagaaatagcacctgtggtgatcaccgttgtttcgtgcttgattaccatcctaaaatccccagagggtttgaacaagtcacttgttgaaaatagtgcgatcactcttgggaggcttagctgggtctgtccagacatcgtggcccctcatatggagcatttcatgcaagcatggtgcagtgccttgtgcacgatcagagatgattttgagaaagaggacgcgtttcatggactgtgtgcaatggtggcagcaaaccctacaggagccgctggttcattagcttacatctgccaggcctgtgcaagttggactgagataaaaagcgaaggtcttcacaatgaggtgtgccagattctgaatggctacaagcagctgcttggaaacaacggtgggtgggaacaatgcatggccgccctgaaaccagacgttgtgcagaaattagctagatacggagtatgatgagaagcaagctcgtgtggtttattcacctcatacaccgaccatcatctttatggcggagacaagagaggagcagaaaggggtgggggtcgtcgagagtgtctctgctgctgatgcatcatctttacatgtgtggcacttgagagtcgattcggttcgttggtacgccattgtccgttcgttcattgttatactggttggtgcacagcatttccagagcgagagtaggatgtcttggtaaaccccccatgtgtattggttggttgggccagtggacttggttttggtttttttgtcattcctactggcaaacacaacaaggccaccaccctcttgctcgccccaccccggcaacattgagaaaacagaaaggttttgtagcgtgtaattctctctcttttcttggtttcttattattattaggtgtaggattgttttcgagtcttgtttggcaggaagggtttgtacgagaaatcaattgattgctcactcaccacaaaataataaaaaagatcgatcgatggggcttgtatctcctgcgactcttcc

SEQ ID NO: 26389 - DNA, 1853 bp, Zea Mays
ctgatgtccttattcaatcccctctagaaagtagaaacattgcttaattggcttggctattgctgttagctccacacaaaagagagaaccggcggcgagctaggagctagccatggacggacacggcgcggtctcgccgtggagcgtgctaggcggggcggcggctgtgctgttcctgtggttggcgtcgcaggtgctggagtgggcctggtgggcgccccggcgcgtgaaccgtgcgctgagggcgcagggcctgaggggcacccggtaccgcctcctctgcggcgacctcatcgaggagcagcgtctccgcgcggcggccctggcaaggcccgtccccgtggatcggccacacgacttcctccctcgcgtcgcgcctttccttcaccgcgtcctccaagagcacggcaagctctcgtttacatggtttgggccgaccccaagagttctaatcaccgatcccgagcttgcccgggaagtgctgtcgaataagtgtggcgacttcgtgaagtcgctgctctctcccctgtcaacgctgctggttgctgggctcgtcgtccttgacggtgaaaagtgggtcaaacatcgaaggattctgaatccggcattccacgcggagaagctgaagggaatgctgccggcgttcttagcatgttgcaacgaactggttgacagatgggagaaacagatctctgcttccgctgaaccaactgagctggatgtctggccagagttccaaaacttatcgggagatgtgatttcaagagctgcgttcggtgttagctatgaagaaggcagaagaattttcctacttcaggcggagcaagctgaacgccttgttcaatctttcaagacaaattacatccctggcttctcggaggtgaagacgatcctgaggggcataatagagaagagacagaaggcagccaagaacggtgaagcaaccaaggacgacgacctgctgggcttgctactggagtcgaacatgaattacagcgactcggacggcaaatccagcaaggggattacggtggaggaggtgatcggcgagtgcaaggtgttctacttcgcagggatggagaccaccgccgtgctgctcacttggacagtggccgtgctaagcatgcacccggagtggcaggaccgtgccagggaggaggtcctgcaggtctttggtgaaaacaagccggacttcaatggtgtggcacgcctaaaagtggtcaccatggtgctctacgaggtgctgcgcctgtaccctccggtggcggccatcaaccgccggacacgccagccgacaaagctcggaggcgtcacgtacccggcgggggtcatgcttacgacgcccgtcatgttcatccaccgggaccctgccctgtgggggtccgacgccgacgagttcaacccggggaggttcgccgacggcgtgtccaaggcgtgcagggaccccggcgccttcgcccccttcagctggggcccgcgcgtctgcatcggccagaacttcgctctcctggaggccaagctggccgtcagcatgatcctgcagcgcttcgcgttcgaggtgtcgccggcgtacgtccacgcgccctacaccgtgctgacgctgcacccgcagcacggcgctccggtcaggctgcgcaggctatgaatacacgatcggtgcttccgttaagcaatctctctccaatacccgaagactctgtttattcatttcaaagttacgactacaaaacataatgcaaaatctcaaacctatatataccagagcatgtaaaagctagcaaaagctatattgtgataacgaaccaacaatatattactcctatatataacaacaagtcaaatcttgctttcaa

SEQ ID NO: 26390 - DNA, 2347 bp, Zea Mays
gagcgccctggaggcctggatctggttgatcacacgtggacggcggtacggagtggagcctcaactcgactcgggtccggcgctgagccgctgaccgtcgacccgaccttgccctggctcgcctcctccgctgcggcggtctggaagggatcactggatcgtagatcccactcggcaaacccaaacggccaaacctttgcttgcattcagcacccccggcgagacgccactccaactgccgggatccagccgctgcacgcggcggccaccccgccctgccggccgaccaggggggttgagagcgggcgaggcggagatgcagagcgccacgcggctgacgctgctactgtgcgcggcgtgggcggccgcgctgctgtacggcgagatgggcgcctactgggtctcctacctcgcatgctcgtggccctcgtcgtcctcctcgccgccgaataaccatgtcaaggttgctgttgttgctgacccacagcttatggatagcacctcccttggtcttccatcaagctcagttgctctccaagctgctgagttttacacggatttgaacatgagaaggtccttccagtccaccatactgccattcaaacctgatgtggtcttatttcttggtgatcactttgatggaggcccttacatgcccgatgaagagtggcaggaatcattgtttcgatttaaacatatattcggcctgaatgatcaaagaacaaagcaacagatccctatctactaccttccaggaaatcatgatattggttactcagcatttcattcagtccatcctgaggtgctcagtcggtatgaaaaagaatttggatcaagaaattatcaattttctgctgggaaggtggacttcgttgttgttgatgcccaaacacttgatggagctaaacaaagcaaagaaaggtcctcctcttgggagttcattaaaactctatctccaggtaacacatcaaacccaaaggttctgctaacacatattccactataccgacctgataactctccttgtggcccgcatcgttcttcacctgttataaatcagagggtatcttatgccgccttagaccaaggaatcacctaccaaaattatctaactaaagagacttctgaccttttgctaagcttgttgaagccgatccttgtgctctcaggccatgatcatgaccaatgcacagttgtccactccactccttttgggccagttacagagcataccctggggacaataagttggcagcaaggaaatctctatccatcttttatgctgctatctgctggacccaagttatcacaaaattcaactgatctggaacatgaggttgcaatgaacctttgctttttgcctaaacaaacccatatttatatctggtatatctgccagtttgtagtgaccatccttctcctagtcttttggccaacaaatggtctcggttctcttccttgcatgaacacattcatgagcttcatgaggtcggtgggcgccgaactgctttcaaggaccaaggaaaaagatgacgaggacgatggtgattatgatatggtttttgatgcggaaggatccatgcacctcgttaaaaaggcagtggcaaagaccccaagtgctagctcagactccagacctactggacgcggaagtgttgttgcaagggcaacagcaggaagacaccgattggagcctgattcatcgattcgtgtcgacatgggttctgagatgacatcagaagatgggggaaagttggcccgcgctggcaaatcgggagcaaggaaggtgctccaacggctgttccgtgtcattcagtctgttcttgtcattgccgctctgaatgcccccttgtacatgatgcttctcttcaaggattggattgatcgttgaaggtaatgatgataaggatctctggatttgcttcacatgaatcattccctggagatcaaaaatggtgcaataggggtccgtttgggagggcttcggctcctctgaaaatggctatggctctagctcttgtaaaggagcagtttcctcagtaattcctctgcaggagccagtgtgttttgtttttgcaagcaaaacggctccgcagttgctgctacttgttgaagccactacttgctgctaaacatggagatctgcattcaacctgctacttgctgtctgaaattgctaactgaaacctgctacttgttactatagaaactgaactgctacttgctactttgtgcaagtgcaatgcagcaaccaggtcccaacctcctaggctagctgtctatcaaggcaatgttgctgactgttgtatgattggtcaggtagccagtcattcacgcttgaaatttg

SEQ ID NO: 26391 - DNA, 2281 bp, Zea Mays
tgaactactgtgttaaacttatgtgatcataaccttgtctgtggagtgtggacatatatttctgcagggaaaggatgtgaggaggttctgaacttggaatgcaaccttccaagctccccagaatggcctgtaggtcaatggatagtttccatctgtgcagctcactgtgataaaacaagggcaatgtgcttttgtgggcctgggacaaaatacccagatcgtcctgtggcagaagcttgtggttttaaaacaattttacctgcaaaacctgatggtccaaagcttactgattggaaaacacctgacctggaaaacatacttacaacaaacagcagtaagttaggatggtgtaatgtggtccctgaggacgcatattcatccaaagtgaagtttaaagaagaatgtgattgcaaatatgatggtctctgggggcagttctgtgagacacgtgctgaatgcagctgcatcaaccagtgctctggacatgggcattgccgtggtggtttctgtaaatgtgacagtggatattttgggattgattgcagtatcccatcagcatattcgcttgcatatgactggccctcgtggctccagacaccagtgaatttaccagatctgaaaactttgaacagtaccaccattggtgttaaggccgttgttcagaaaaaaaggccactgatatatgtatatgatttgccagctgagtttgacagtcatcttcttgaaggacgacattacagattccagtgtgtaaacagaatatatgatgacatgaatagaactatatggacccagcaattgtatggtgctcagatagcacttcatgagagcattcttgctagccctcaccgcactcttaatggggacgaagctgattatttctatgtgccagtgcttgactcatgtctaataactagatccgatgatgctccacatcttctattgccgagggacctgcgccgaaggagctaccatgcacttgagtactatagaatggcacatggtcacatagctcagcagtatccttactggaaccgcacttcgggaagagaccatatctggttcttttcatgggatgaaggtgcctgctatgcaccaaaagagatttggaagagcatgatgcttgtccactgggggaacactaacacaaaacataagaattcaacgacagcttattgggcagataactgggatgatattcctttggataagagaggcaaccatccatgttttgatccaagaaaggatctagtgcttccggcatggaaggaacctaacccaggggccatatggttaaaactgtgggcaaggccaaggaacaaccgtacaacacttttttatttcaacggtaatctaggttcagcatacgaaggaggccgtccagaagacacgtatagcatggggattcggcaaaagctagcagctgaatttggttccacaccaaacaagcagggaaggcttggacggcagcatgcggccgatgtgacagttacctatctacgaactgaaaaatattatgaagaattagcaagctctgttttttgtggtgtcctgccaggggatggctggagtggccgtatggaagatagcatgcttcaaggatgcattcctgtaataattcaggatggaatttttctgccatatgagaacgtgctcaactacaatagttttgcagtccgcatacaggaagatgacatcccaggcctcataagcacactccgaggaataaacgatacgcaagtagagtttatgctgggaaatgtccgccagatgtggcagaggtttttctatcgagactctatattgttagaggcgcaaagacagaaaaaactcttctctgaagaggcaccctggtctgttgaggtatcgaaacttcctgatgacgacgatgtctttgcaacgtttatacaggtattgcattataaactgtacaatgacccttggcgtcaagatttcctgcaaacaaaggatactcggctgccgaacatctgttcaagaacttcctgaagcatttagtcaggcagcattgcaactgtaaagaataagcatatattcttaggaacaaaagtacaaaactgtagatatttcttgcattctggacaattgttcttttgactgatagcccaatttaattagaccatttcctgaaaaaaaagaaaagaaaaatgcactgttttcatctatcaaaacatggatagcatacatcgcatttacagctctggtgtttgcaatcccaagctacatcgatttttaccgagaaagaattggattttgtcgtcca

SEQ ID NO: 26392 - DNA, 2125 bp, Zea Mays
gcgacctcgccggaaagctctcgcagcgcttctccccggctcggatctcgcccagcggccctggccctcggccatggagcctgcactgctccagttcggccgctcgtctccctgtaccccagctccctctgccggccgtcgtcgagccctctgcacacgtacgctgcgcccagctccagcgcttgttccctgctcctatggcggccgagctctccgatgccgcgcgttgagctccctgccgtcgctcaactcgccggcgtgcatcctactccttacgcgccgtgcgccgggaagtccctgcgcgcaagctatctgttggccgcgcgcgaagctctctgttcgtcgtcatcgctaagctatctgttggccgcgcgcgaagctctctgttcgtcgtcatcgcgaggtcgcacgacagactgattgcgtgtcgtgtgtcgcacatcctaggtcctcgtcgtcgggtttcgtgcgtgctcgcgtttaccgtcgagtcgtcgaacctgtcatcctctgctcaaaccccacctcgccagctcgctctaaacacgatctcgtcgtccgcaagtcaccaagaaaccccaaaaatcgggtaaagacggagcaagcagcgtgatgttcaccaagtgcgcgacaaaaagctcgaacatcctgcgcgactcaagttcgattcatcaaaattattcagtcgaggaaaagatcttcagcaattgattaccgaagaaaagaaggcccctgggtgacgtcaatcggaacccgtagtcatgcttctgactatctcgtcaaattagtcagtgaccaagtcttcataaccgcgaaggatcactcttcggatgacaaagtcgacgatgaaccccatggagtaaacgacgacgttgttgtatccaccacatggagacgaatgacgacaacggcacaacggcacgagcagaaaggcttggccagggcagagtccgagcgggttgacggcgagccggaccgtgatagatcaaggctgaggctgagggagagtgaccgggccacaagcaagctgcgcgagctgagggcgtggccatggaagagcaggggatgggcgagctcggaccaaggcgacaacgcgatggagcttgctgggaagcccgtccaaggagcaacgttcggcgagctccggcgagaggagggaagcgacggcaaatacgtcgagcagggagtgctgggcgagttccacatcgaactagaggagaaagacagagggaggtcgagcgctgagagcaaaacgcccaggcgttgtgctggggaagatcactcttcggatgacaaagtcgacgatgaaccccatggagtaaacaacgacgttgttgtatccaccatatggagacgaatgacgacaacggcacaacggcacgagcaaaaaggcttggccagggcagagtccgagcgggttgacggcgagccggaccgtgatagttcaaggctgaggctgagggagagtgaccgggccacaagcaagctgcgcgagctgagggcgtggccatggaagagcaggggatgggcgagctcggaccaaggcgacaacgcgatggagcttgctgggaagcccgtccaaggagcaacgttcggcgagctccggcgagaggagggaagcgacggcaaatacgtcgagcagggagtgctgggcgagttccacatcgaactagaggagaaagacagagggaggtcgagcgctgagagcaaaacgcccaggcgttgtgctggggaagtaagagggagaaggcacgacctgttgaacgcggaggaaaatatccaggggagagcggtggttggatgagaacaaagtccaggaaatgataattagcaagagacgtatgcacaccagctttcccaaggagctagatattttcttttctgttgttttttttttgatttttcccccctgtgcgcggatgagaacgatgactgcagatgagaaaaaaaaaagaatctggacaggggacggcgtgataggataggatctctgggatattttccattttccattttccatttttttataacggaaatagtaaatatttcggattcggataaattcatctgtttttgtcccgaatatttgatgtggtgaatattttgtagtagatgaacttttgcc

SEQ ID NO: 26393 - DNA, 4535 bp, Zea Mays
aaaaaacgagaggagagcggagagacagacaggagccaaatctacgtctcctgccaattcgcctttctccaaccagcttccccgcgccgcccgcccgtcgccgctcctccccgccctctctgcccgcatcagatcgtcttccccacgccgtgtgaccgaggtcccgtgatccctcccacttctgcgccggcgaggacccgggaggcgggatgagcggctgagcacgacgatggcacgcagagccacgccgcaggaggccgccgtcgctgccgcggaggccgccatacgatccgtaggcctggggttcgacgtcgtcagcgacgtccgcctcaagttctgtaagcagcggggcgcgcccgacccctggctcatcgaacttgaccatggggaggtccaggatatcgtgctgcccggcggcgtcaccgtcgctggcgtcaccgcttcggttaagtgtgacaaaggggagcggatgaggttccgctccgatgtcctgtcgttccagcagatgtctgagcaattcaaccaggagctatcattgtctgggaaaattccatctggcttcttcaatactatgtttgagttttctggcagctggcagaaagatgctgctaataccaaagcacttgcttttgatggttggtatgtcacactatacagtgttgcgctctcaaaagggcaaattgtactccgggatcatgttaaacagtctgttccatcaacctgggatcctgccgctttggcaaggtttattaaaaaatttggcactcatatagttgttggcctaaagatgggtgggaaagatgtaatttatttgaagcaacaacattcatcaaccttgcaagctgtcgacgttcaaaaacgattgaaggagatgtcagatagtagatttcttgatgcaaatgtgcaatatgacatgagtaggaacaatcaggtgctttccgagccttcgtttcttcttctatccccaggatttcttccatttaacaccattgattactgttaaagtggtattggaacagtataacttattaacatttaattattgttttattgaacacccccacaacatgcaaagtttacttctgtgagctttaaaactgcatcttttgaccagtggaatttgtgtttatcaccacaattactaggccaacaaacataaaaataatagactgcctcaaatttatttcattgaatttgtggggaagttgggacaaccagctggcctatattgtcttttccaataggtgttttccctttctatggtatgatacatacacactggttctatgggcatgtgaccatagcctcaaactgtgtctagtatggctgttttggttgagaaacatttagatggataagagaagtattcattgacaaaaatatttgatatatcatgcccatagatctaaactgcttacatgctccaaattctgaatttcaaccttaggttttactttcgtcgggtactgtgactactgtcatgtatatttgtcatcgcataacgataccagggtattgcatgtacccgagaggattgatgagtggaagatagagcgatgggcgtaggctgaagtcatattgatcctaggtactacttagctactagcacacaagatatttatagacgcccaggctgtaaatatgcaataccctacgtcctcgttgtgtatggtggattgatggatgttgaatgcaaatgtgaagaagataacatgctcaagtatcaactgagccccaagacagtctagctctcccttcccttttggtcatggtgagagttctagacaactgatccctagttcactctgtctatcctgcttggaatcgagagatcgatcccaaggcgaaagcccgaactctggaagaagcaccttatatgtttccctacctctcccttttatatctcaagcgaggagactgatacatgtctgctgagcagtgggccatgtccagtagaagctcaatcatcccaatattgtctctggcgtgaagtcgcacatggtgcatgccttggacatgtcatagtgttgagctcatcgtgttgcaggggttgatacttagtgttgtaggtaggactgaagaccaacgtcgggtacgacatagttggtaaacggtttagctgctcgtactttatcatgcatgcaggtatgttagtacattcaggcgtggcaatagggacggtggcacacattgcacaacagcctcgggtacactagctgcacattgttgtggctacagggacggtggcacggactacacggtggcctcggatatgcccgcggtctctggcgtgaccatagtgcaccttcttgatcgcataaacctccttgaccgcaatgtcgtccatcacatttatgcgatggacaaaagtcttatcctgattgcctgatatcaggcggccgtcctgaatagggttgcacatggcactagtactgccttggggaggggcatctactttcgagggcgcttcgtctcgagagcatcttgaaggatgatcgtgatgtctagttacactcttaagtctgtaggtcgatcaatgagcttggttcccagcctagaggaccttgggagaccgtgatcgcttgccccagaggtccaaaaggccacaggagtgccctggaggtccggagggccttaggaccttgtcctctggcgtggaggctataagaggccggaagagcccaggaggtccggagggccttaggaccttgtcccctggcctggagggccttgggaacatgcggttggcatcaaccgggcactcgttgagttttgttttgctgatgggatcttcggaaggcgttttgtgagtatcatcttcggaaggcgtattgtcagtacctagacgtatgacttttcccagatgccgataatattgtatcatgaaaggattctggctggacataatatatgttcccagtttacgtttttcttccacaatttctgatgtaacatactgtacagagtgatatcagagagcaatagctaagatttgtacagtacagtccattgaattcttactcgtcaattgagggacagagctttgtgttcataatatttcattactcaagcaaagaatcatttatattagcttagctggatcttttagcatgatacacatttttgttggccctaactcaggatttggtgatgatgcttaagcgaagaggtgggagggataaagaatctatatctcatagtgagtggcttaatactgttcaagcagagcctgatgttacctcaatgtcctttataccaatcacttcgctgttgaatggagttcctggaagtggatttttgatccatgcaattaatctgtatctccgacataaacctccaatcgaggaattacatcagtttttggagttccagcttccaaggcagtgggcacctgtttacagtgatctcgctctgggtcctcagaggaaaagacaaggcagtacatcgttgccagtaaatttaatcggtccaaagctttatgtttgcactaacatggttgatgtgggtaaaagaccagttacaggactccggttgttccttgaaggaaggaagagcaacaaattagctgtacatcttcaacatctctgctctcttcctcagattattcagcttgaagacgacccttacaatcaccaaaccccggaatatgaccgcaaatactacgaaccaattggaccgtggaaacatttctctcatgtttgcacagcaccagtcgagtcagatgacctgtgcatcgtcacaggggcacaattagacgtggtccaccaaggcctcaagaaaattttgttccttcgcctacatttctccaaagcctgcaatgccgttgtgaggaactcggaatgggagaattctcccaacatagctcagaaatcaggccttatctcaacactcattagcacacatttctcctcggtagctcagacgcctccgccgcggccagccgatgtgaacataaactcggcggtgtaccctgggggaccacctgttccagtgcagaccccaaagctgctgaaatttgttgatccaacagagatgatgcgtgggccgcaggactcaccgggctattgggtggtttcaggcgcaaagttgaaccttgagaggagtaagatctcattgcgggtgaaatactcactgctgacagctatgatgccagatgatgagtttccacttgatgatgatgaattttagaacctggaacgaaagaaacctgtgtagcaaaggttgaggatccaagatttccgtcatttgggcatttgtttgatgttgtatactttgtggtttctttaaacattatagcataaacgagttctctgccctgaatggagcgagaagaattgttgtaacatttctttgtagcgtgggcgtggcacatagcgatcagcattagatgatagatcaaattatctgtatatatgggatgaataaaaaatattgtttcaaatgttttcttgtcttggtactgttgtgatgtattctgggagttttggctcccttgccaattgctatgttgctgtgtattctttccctgaaggctc

SEQ ID NO: 26394 - DNA, 1826 bp, Zea Mays
aagccagacatctcatgccacgcctctctatcatcattattcaagacaccggaaatgttaccgcataattttacttaaataaatattgtgtgcctttggaaataaaggaatggttattataagaagaccgaaaacccggtccatctctgtgtggccggtatgcttttaaaaaagaactgctacaaagaattgagtgagaggaaacaatcaggcctgatttgataaacaacccccacacgtattggtgaaatgcggcagaggagagatcaggacaccgggcgtgcaaccatgcagggagcaaagacggaaggcagggcggggcgctgtagctgaaggcgacgacgacgacgatgaaggttttgctgctccgcacaccgcgcgcagtggcgacgcgaccacagccggtcgccgcctcggatcgaggaggaggagccgatggaggtgcttgtggtggctacggtggcgaggtgaggaagtggatgcagttggtgctgcgccggagagccccattctccgacgtcgactgcgtagcttcgccgtctacagccgcaggattttcggcttcgaccccggtcgggcccgcacggcgaccacagtgcggtaccggaatagggttctcggcggcggggacgggtggtgatggggagatttttcatgtccgttcggattcgtctgggaccctcgcgcaacggccgttgtgcgaggccttttctggccgtccagatgagatcgaacggttggggaaaaaagcggagtttagtttctttgcgccgctgagcgctggcagtcgcggcccaagcctgaggtcacagccccacagtcgccccttcggacttccctttattccccttcctatataatcccatcgccactgccttcttcttccgcttccaacttccgttccgcaaatcgaaagctcggcgttgccctgcctcgagctcgaaggactttgtccctttacgtcgttgtccagctcctcgcatattgtggcctggtgcagattggagatccgcccggacttggatcgagtcctcctgtctttggacattcattggagtgctccattcattgaggcagcatgcctaagataaagacaagccgtgtcaagtatcctgaaggatgggagcttattgaaccaacaatccgtgagttggatgccaaaatgagagaagctgaaaatgatccacatgatgggaagagaaagtgtgaagctctctggcctattttccgcatttctcatcaaaggagccgctacatatacgatctttactacagaaggaaggagatatcacaggagctttatgagttctgcctagaccagggttatgcagaccgtaacctgattgcaaagtggaaaaagccaggttacgagcgcctttgttgcctccggtgcatacaaacacgtgaccacaacttcgcaacgacatgcgtctgccgcgtccccaagcatctgagggaggaacaggtgatagaatgtgtccactgcggctgcaggggttgtgccagcggtgactaatcttgtcatcatgttgttgggctcacggctcatcatcgcaacgttaaccagatgaggtgccctgctgtgagcatggatccgctgcggtgattagcatgagtttattgggtaactagtggggagtactaaatttcctcacgtttggacgtttcaactgttatgtactacgctttctcgtgtctcagatgcttgcgttaaattagtggcgcttttgcattttatatgagtctgttaattggttattgttatgggttctaacaaaaaaatttctacgatttactacgtttttttttcaaaaaatcagaaaaaa

SEQ ID NO: 26395 - DNA, 1976 bp, Zea Mays
acttccttccctaagtggtggagggaggtggtcaagttagtaccaaaagaaaggagaggaggggaagtggatgctggaactgagacaaacatcaatcttaatcatcagatatattaccatgttttgggatctgatcagtcagaggatatattgtgctggaaagatcccgaacacccaaagtattcctttggtgcctcagtcactgaagatggaaagtacatcatattgggcatctatgaaggttgtgaccctgtcaacaaattatactattgtgaaatttcttctcttcctcaaggaatagagggctttagagggacacaggatttgcttccgtttgtcaagcttattgacaattttgatgctcaatatcaagttgtggccaatgatggtgatgaatttacatttttgaccaataaaagtgcccctaagaataagctggtaagggtaaatatcaaaaatccagagctgtggactgatgttctctcagagcatgaaaaagatgtgctcgaatcagccgacgccgttaacaataaccaacttttggtgaattatatgtcagatgttaagcatattctgcagataagagaccttagaactggaaactttattcatcagttgcctttggagatcggttctgtttcagagatctcgtgcagacgagaagacaaggaagtatttattggcttcacaagctttctttctccaggcattattttcaggtgtaacttagcatctacaatccctgaaatgaagatgtttcgagaaatttcagttcctggatttgatcgcacaagttttcaagttaagcaggtttttgttcctagcaaggatggaaccaaaattcccatgttcataatgtcgaagaaagatatcgatcttaatggatcgcatccaactttgctatatggttatggaggattcaacataagcataacaccttcatttagtgttggtcgcgttgtgctatgcaagaacatgggctttgttgtctgtgtagcaaacattcggggtggtggagagtacggggaggagtggcacaaagctggagcacttgcaatgaaacaaaattgttttgatgactttgctgcctgtgctgaattcctcatttctaatggttacaccagttccagacgtttatgtattgaaggcggaagcaatggtggtcttctggttgctgcttccattaatcagaggcctgatctctttggatgtgctctcgctcatgttggcgtcatggacatgctccgttttcacaagtttacaattggtcatgcatggactacagactatggttgttcagataaggaagaagagttccagtggctcattaaatattctccccttcataatgtacggagaccttgggagcaaagctctggtaataactgccagtatccagcaaccatgttgttgacagctgatcatgacgatcgtgttgtgccattgcattcactgaagttattagcaactttgcagcatgtcctgtgtaccagcactgaggacagtccgcagacgaatccaataattggtcgcattgatcggaagtcagggcatggagctggcaggccaactcaaaaaatgattgacgaagctgcagacagatatagctttatggcaaaaatgttaggggcttcgtggactgaatagtgaattttgtccagcttagtgtggagatggtgagcaagattactctatgcagtcaaagtaaagtggctgtaaaagttatattgcttatgttttgctcttgcttggatgatcatccaccaaatagtatagtgtttatgcttcggtttgagataagggttcagggagcattgtcatgcttggcgttggtgcaccatttctttcatatatatcttttgattgttaaattttatacgttactacttcattgattctaaattataagatgttttggttttttcagatatattgtttttgttatgctatattgctatgtatactatatgtctaaa

SEQ ID NO: 26396 - DNA, 4100 bp, Zea Mays
gcgcttttgtggacgacgccgtcgtcgccaggcagcttgcatgtggctctgcgctgcgcccttgtcttcctcttcctccccactccgcatctccagaaaattccgttattttactcccagtatttagcctcgacgattgctcgggactctctttacaggtcctatttcgcggtttcctcatcctcctaatcctaacctccttccctgttttattcttcctcgtcgagcctgattcccctgccgccaccgcggccagcgccgccctcgccgccggtcgccaccgccgccgccaccgtccactcctcgccctcacctaatctcactcggagggagaaaaaaaaaacctcgccctcgccgccgggttgagttgaatctgtggtcgctgggttgaattgaatcgatttagatccgtttatccctagttcgggtgcccgtgttctggaaggtggaagctttggttgggttttctcttccagagcattaatgtttctgagggcctaagatgctctatttgaagcagcccacgaggagctgagtctttgtgttttttttatcgttctctctcgtcgtctgttgatctgatcggatggaggctatgacgggtggcaaattccttcaaaagtttcgactctacgaaaccagatcgaaattttatcttattggaagagacaagagcaggattcactggagggtgctaaaaattgatcggttggagtccactgagctgggtgtcgatgaggatccaactatttacacggaaagtgaatgtcaagaactgctttggcggatccatgaggggaacatgttgactggtggactgaaatttgtcacaaaatgttacggaatagttggttttgtaaagtttcttggtccttattacatggttataataaccagtagaaggaaaatcggcacaatatgcggccatgaaatttattccgtcggcaagagtgaaatgattgcaatttcaagtgttacagtctggcccaacgtggcttattctagggacgagaacaggtctttttttttcaacatgtaaatattgtgtattgcctgttgtaatttaatcagtggttcttaacattatcaataattccagcttgctatctagtgtacgttttatagctttgctattcatctacctcattgttggttgctctctttccacatatttgatctcattttggttgctatgttgtgttgagaactcttggtgttgctgtgccccctccctctcctttgtccgtattgttttgcataatgacattccagttttttttcatttgttcatgtcctagtagaacatggacaattccattttatgattttgttcgattgtacaataatacagtaacattttgtcgttgtgttcatttagctccatttctcctatgtgtataaatttgtttgttcagaaacaacgtacatccaactcatatagccaatatacataatggaacaatggaaattcttgcagttctgagccttgtgtacttgctcatatggttggagatataagcgccttctttgctcagttgacctttcgaaggatttcttcttcagctactcttacaacatcatgcgcagccttcagaagaacataacccagaagaatactgggcaggctgtttatgaaccaatgtgtgtatggaatgaatttctgacacgagcaattcggaatcatctcaagaatacatgttggactgttgccttagtccatggattttttaaacagtcgaagctctccgtatctgggaaggatttttggttgacccttatagctaggcgctcacgacactttgcgggaaccagattcttgaaacgtggcgttaatgaaaagggcagggtagcgaatgatgttgagactgagcagattgtttttgaagacacatctgatggaatcccaactcagatggcttctgctgtacagcatagaggatcgatacctcttgtctggtttcaggaaacttcaagacttaatattagaccagatattatattgaaacctgatgtggactacaaggcgactcgccttcattttgagaaccttgcacttagatatgggaatccagtaatcatcttgaacttaataaagacccgtgagaagaagccccgtgaatctctgctccgtgcagaatttgcaaaggctatccattacattaacaagagcctgcctgatgacaagcgtctaaaatttttacacatggatctgagtaagctttctcgaaggaaaggcaccaatgtgcttgcactgttgaccaaggtggcatcagatgtgttggatctaactgaattcctccactgtgaaataagtacatcaacaaaacctgatgacacctcaagtggagaaagaactgctgccaaaccacatgatgacagaagtagcagtgatcaaactgaatgtgcagctaagttggcacctcttttattacagaagggtgtcctcaggacaaattgcatagactgcttagatcgcacaaatgttgcacaatttgcatatggtttagctgctttagggcgtcaacttcatgcattggggcttactgaagcacagaaaattgaattgcacgatcctctggctgatgatctgatggacttctatgaatggatgggtgatacattagctattcagtatggtggttctgctgctcacaacaagatcttctgcgagcaaaggggtcaatggaaggcagcaacccaatctcaggagttccttcggaccattcaacgctactataataacgcctacactgatcacgacaagcaggatgctataaacatgttcttaggtcatttccaacctcagcaagggaaacctgcactgtggaagctggactcagatcagcattacaacattgggaggcaagggactttaaaagaagagattggaagatcgttcataaagaggtcactatcagatggtaacatactgttggagaacaacttgcctgtaactagctgtaacaatgaaacaaacaacacagaattgcttccaatgcaacagctggatgatattagagaacctaccgactctgcgccagagatctccatatgtgaacctaacccgtgctccagtgtgaactacggcagagtgcctggaagacactctatttcagaagagcggcagagttatttgaaaagattaggttaccctgaattgcattcttcaaatttcctcgaccttgatttgttgtcgtcttctgggaattcctgtgacgaggaagtttttgagaggtcatcactgatcaattcacctatggatgtggtcagcgttgaatcatctacgtcgtacagtgaacaaggacacactgatgagggaagggatgacatggatctttcccgttcaagcagccaggtctcagacgttcgggactattctgaccggtttgcgcactgggtcgcggatggaggcatgctttggtaaaaggccatggacttttgtcttgcttgacaactcggtagaatctgtgaccgcaggaaatggatgcgagcagatgacatggctagatgcagagatggtgggcgtggaaaaagtctcgcatcggtatggttgtgaccactggaaggcttgaacgctgatattcatcggatggggatggagatttcggtggttgggttgagtacaagattcaatttgctgtggtgaaaaattttaccatagtttgtttagacaataaataggcaaaatatatatgattcttttattttagcttacagtgcgtcccccttctccatagaaaattctgaaaagcaaaaaaaaaaaggaaaatctagaaaaaggaggaaaaaaaacttagataaagaacacttttgctgtaaatagttagtatgttacggaagtataaatattgtgaaattttgctgacgacacgacttcgctcaaacgtgtaatatactgttggacagtgttaacaaaatatatcccgtatcagtacgaaaactgtgtaaatttactgtaacgcacagtatgcattatttatttatttgtttctcagattatggaagagataaaattgcaaaaatatcttaacctctgacttctcacggtgcggccagcctcggtcaagctccccggcggcgggacgaggccggtgtccgct

SEQ ID NO: 26397 - DNA, 1927 bp, Zea Mays
atcgcaccaagccccagcgcattaactgatcccccccgctttaactgatccccgtagcgccccaaccgcaaccggcaaccgcccctcgccgactgcacggacggggaagcctcctggagagtggactccctttccttctataaatccggctcctcccaatccaggatcttcccagcctcgccgccccaccaccccagcattgccttaccttgccttgccttgccctgccctccattccacctccacctcgccgcccaaatccccccacccaacaatcccccatggggtcgcaggccatcgaggcgcaccgcgcgggcgcggaggtgtaccgcggcgcggcgctgtgcgcggagaagtcgacggagctgctggcagaggcgcacctcccgctgggcctgctgccgctggccgacatggaggaggtcggctacaaccgcgccacgggcttcgtgtggctgcgccagaggaagtcgctcacgcacacgttccgcccgatcgcgcgccaggtctcgtacgccgccgaggtcaccgccttcgtggaggaccggcggatgaggcgcatgaccggggtcaagaccaaggagctcctcatctgggtcaccctctccgacatgttcgtcgacagggacgacccctccaagatcaccttcaagacgcccaccgggctcggcaggacctaccccgtctccgccttcgctaaggaaggcgccggtgacgacggcgcggcggccaagcacaaggatgatgcccccgccccgaccgccgccgctaacctcacgccggcggactctagcaagagcacgaacgagggccaagcgctcgaaacccagcgacgtggaagcgcctgcgccgcgagcatccttccagagcgcggggccaaggccaagcagaggtatttatcatcgcagccgatccccagccgcacgaacggaggtcgagcaccagacctcatctcactccgctaccccctcatcctgccatccaccagaagcagtgcaagcatatggcgcgccgtgccagcctgctcctcgccgcggcgctgctcgtcgccgtcgctgccgcggcggtgccgccgacgtgcgagcgcatcgagtgcccggcgtacgaggtggtggacagcgccaacgggttcgagatccggcggtacacggacgccatgtggatcaccacggcgcccatcgaggacatctccttcgtcgccgccacgcgcaccggcttcctacagctgttcgactacatccagggcaagaacgcgtacaaccagacgatcgagatgacggcgccggtgctgacgcgggtgtcgcccagcgacgggcccttctgcgcctccgccttcgccgtgagcttctacgtgccggccaagaaccaggcggacccgccgccggccgagggcctgcgcgtggaccgctgggccggggccaggtacgcggccgtgcgccgcttcgggggcttcgtggcggacgccgacgtcggggagcaggcggcgcggctcgaggccagcctccagggcacccggtgggccgccgccgtcaacgacgcgcgcagggccgacccggcctcgccctacaccgtcgcgcagtacaactcgcccttcgagttcaccggcagggtcaacgagatctggatgctcttcgacgcggacgacgacgccagtatgtgatgcgattccaagcgtgctctcggggcactgaggcgtttagggaaggacgcgcatgcacctgtgcagtgcagctgtgctaccatgaagtatttcgtgctcttgtgcgctagcttcgtttactttcgacttttcgagtaaggaataaggtgcctcttgttgcaataatgataaagctaatcctgcttgtaattacatttcgtggcatggccattccggcaacatgtccagtaaaaaaaaactttttagtttcatctctcctggtttcat

SEQ ID NO: 26398 - DNA, 3585 bp, Zea Mays
cgtcgttgggctaagtgggctgttacacgcgggcaaagacaagaaagagaaaaagcccatgttgggagggggtaacgtgcgacccactccaccgatgcagcgcaatagcgcaagctctcgccgccttcctcctctccttatcctcctgacctcctctgacctctgcccccccctccattcccatttcccacgcggcaggcagctagccctacctctggtctcctctgccacctcctcccctgccacctcctcccctgcctagggtgcgccttcctcgccggacgccggcgcagggtcgggacgcttccgctgccgcgcgttccacgacccctctctgggagacgaaactcggcgccggcttggtagatacagacctgggattgccttttcctagttcagcatggagggcactctagttcagtctgcggttgttccaaccgtttacagaagcagctcaggtcggttccgtgtgcgtgcaagggccagaaccaatgctacaatggtgcgaaatatgccaacaaggactcttactcttggtggtttccaaggattgcgtcagacaaactttttagacacgaggtccgtgatcaagcgtgactttggatcgatcgtggcaagtcagattgcaagaccgcgtggatcagcctcaagaggggtggttcgtgccatgtttgagcgcttcactgagaaagcaatcaaggtgattatgcttgcacaggaggaggcaaggcgcctgggacataactttgttgggacagagcagattttgctggggcttattggtgagggcacgggtattgcggcgaaggttctgaagtctatgggaatcaatcttaaggatgcccgagttgaagtcgagaagataattggacgtggcagtgggtttgtggctgttgaaatcccattcacacctcgtgcaaaacgtgtattggaattgtcccttgaagaagctcgtcaacttgggcataactatgtaggatctgaacacttgctccttgggctacttcgtgagggtgaaggtgttgctgctcgtgtgcttgaaagccttggcgctgatccaaacaacatccgcacccaggtcataagaatggttggggaaagcacagaagctgttggggctggagttggtggaggaagcagtggccagaagatgcccacacttgaagaatacggtactaatttgacaaaattagcagaagagggcaaattggacccagtcgtttggtagacaagatcagattgagcgtgttactcagattttgggcaggcggacaaagaaacaacccctgcctaattggagagcctggtgttggaaaagactgctattgctgaggggcttgctcagcgtattgccaatggggatgttcctgaaacaatttgaaggaaagaaggttattactcttgacatggggctccttgttgctggaactaaataccgaggagagtttgaagagagactaaagaaacttatggaggaaattaagcaaaatgaagacattattctctttattgatgaagtgcacacactgattggagcaggtgcagcagaaggtgcgattgatgctgctaatattttgaagccagctcttgctagaggtgaacttcagtgcattggtgccacaacactggatgagtataggaagcatatagagaaagatcctgccttggaaagaaggtttcaaccagttaaggttccagagcctactgtggatgaaacaatacagatcttaagaggacttcgtgagagatatgaacttcatcacaaactgagatacacagatgatgctttaattgctgctgcacagctgtcttatcagtatatcagcgatcgtttcctgcctgacaaagccattgacttgattgatgaagctggatctcgtgttaggctgaggcatgcgcagctccctgatgaagccaaagagctggacaaagagctgcggcagataaccaagcagaaaaatgaggctgtacgtggccaagatttcgagaaggctggcgaattaagggaccgagaaatggagcttaaggctcaaattacagccattattgacaagagcaaggaaatgattaaagcagagactgaatctggtgaagtcggtccgcttgttactgaggcagacattcaacatattgtctcctcttggactggaattcctgtggagaaagtgtcatcggatgagtctgaccgcctcctaaagatggaagagacgctgcatacacgtatcattggacaggatgaggctgtcaaagctattagccgtgctatccgccgtgctcgtgttggcctcaagaatccaaataggccaattgccagcttcatattctctggaccgactggagttggcaaatcagagcttgcaaaggccctggcggcctactactttggctcggaggaggctatgatcaggcttgacatgagtgagttcatggagcggcatactgtctccaaactcattggatcacctccaggttatgttgggtacactgagggaggccaactaactgaagcagtccgtcgccgcccgtacacagttgttctctttgatgagattgagaaggcacatccagatgttttcaacatgatgcttcagatcttagaagatgggcggttaactgatagcaaggggcgcactgttgatttcaagaacacactattgatcatgacatctaatgtcgggagcagtgtcattgagaagggaggtcgcaagattgggttcgaccttgattatgatgagaaagacacaagctataacaggatcaagagccttgtgactgaggagttgaagcagtacttccggccagagttcttgaacagattggatgagatgattgtattccggcagctgactaaattggaggtgaaagagattgcagacattatgctgaaagaagtgtttgacaggctgaaggccaaggacattaatctccaggtgacggagaagttccgagatagagttgttgacgaaggttataacccgagctatggtgccagacctttgcggcgtgctatcatgaggcttctggaggatagtctggcagagaagatgctggctggtgaggtgaaagaaggtgactctgccatcgttgatgtggattcagatggcaaggtaatagtcctgaatggtggtagcggtgttgctgagccactggaacctgctctcagtacctaaccgaggttaaaatctttgggccgaaatggccttctttacaagtcagctgggctcttcgtgatggtaaagtagactgttattacttggccgctccattagttgctttatctttcattgatttttttttgttggaagtgaggcagtagggtcactatggaaacgaatagacggagaggcattagccgaaatgaatgtttttcagtttgatgcacttgtattattaggccttgctagcaacaaggtgcagatgcctctccgtttgctgttgtactttagtgtaacttaccttccgaatgtattattaggcgttgctagcaacaagatacggaggttatacatttgattttcagtaaaaaggtagactctttgttgcgccgcagctgttttattgtctgcgcactgcagtgttcgttca

SEQ ID NO: 26399 - DNA, 2013 bp, Zea Mays
ggctcctttcccgaaaaagaagcgagcccaccaccacggtcactgacgttcacaaaaaaaatcgcacacaaaattcctagaccacgttttttttagtcgcacaaatcctacaaaccaaacagcaagagcggaagaagaaacgaaaaaggttcactggaatcgaccaagaaatccgccttgccatctccgtttcgtatatgccctgagaatttccaaacgaaatttccgagcttttccctcgccgcgcgaccttcgatctcgcttgaaagagatggcccagatcacgggaccggtgtgaggactgagacgccgacctccgacctcaccgaggcattcgattcgtcgcaatcctcgccctcactcgcgtgttcaggtttgtcgggctgccccgggataggaatgcttctgtcgacatgctaagccgcggagccgtgcggttgctgttgtatcgtctccggcctccgcctctgcgtttgagttggaatccgagcggtgctatgccatccgccgccgccaaccgctcgagccgggaggaggttcacgccgagcggcgcgcttagcttgaggggttgcttgggttggcgggatggtggcggcgacggcgagttcaggaggagggtggacggagaggcggcggggatgaaggcgcaggtgctcaccacgcagcggcagctgatgcgcgatccggaggtgctgccgctcgaggaggccgccacaggcaagagcatgaacgtgaatggtgcctgtcggcgagggaagcggctagggtttccggagcaggcagcggctaagatggtggttgctgttgatgtagatgaagttcttggtagcttccttgcggctctgaacaaatttattgctgatcgttattcttggaatcactcagtatcagaatatcatgtatacgagttctttaagatatggaactgttctcgagaaagagctaattttcttgtccacgagttcttcacaacccattacttccaagatggcattcatcctattccgggggctcgagatgctctccaaactctttcttctttctgtagcttgtctgtagtaacatctcggcaggatgtaattaagaatcacacattggaatggattgagaagtattatccaggcttatttgagcagatccatttcgggaatcatttcgctttggaaggtcaatcaaggccaaaatcagagatttgcaggtctttcggcgctcaggttctaattgatgacaaccccagatatgctctagagtgtgctaatgatggcatgagggtccttctgttcgattacgaaagctcgtatccttggtgcaaaactggagccgatgaactgcatccgctggtgacaaaggttcacaactgggaagaagtcgaggagaaacttctctcttgggtagtacctgatagctgacactcttctgtcttgtgagaagcactgcttgagaccagcaaatgattccttttgcctggtttctaaaggaacctgatagggtgaaagactgcaatgttcctagagcttgattttcaatacagatgtcgatagcctctccaagagtcattctaaaacccactctaaatcatcatccgaagagtcatttgcataaatttgactccaactccaacagtttttctatatcctgggatatttttcattaaactctctattcacaataattagttaggatatggagagtcttggggatgttgtcaacgtaagctaggatattcagcttcattaccgcagcctggttgaggcatattcgactgtacttggtcagtctgagctgtaggcgcttctgctctcacacatcagaatcttgttttatccttttgccgcagccgggtgtactatgtatatatcgacgctgccatatggctaagatggtatttgaattgttctaatacagaaaactcgtgtgtgtgtgggtccttggaccaactgatttggagcattttcattattgaggttaagcacaaactcgatgagagttcagtctttatatttgcatttccg

SEQ ID NO: 26400 - DNA, 3433 bp, Zea Mays
ccgctgttttcatcctcctgttgtcatccgtcttctgcagcttcttgagtccattgtcgctctcaagaaaggcgcacatctcctgaaatgtgggaagagagggaagcccaaattctgcactgtcaggctgtcttatgatgagagagcactaatatggtactccaaagagaggggaaaacgtttgagcttgaattcagtgtccagtgtagttctcggacagaagactacaaaacttttgcgtctacattggccagaaaaggaatctcactccttgtcaattatatacaagaacggtgaatcctcacttgacttggtctgcaaagatagggatcaagctgaatgctggtacttaggccttacagccgtaatatcagcaccatgcacccctttacttctgattgattcaacaaacagccgtcggataaacagctgcacgaatagccctcctagctatattcagcaaaggagtaggctttttgctgtgcatgatggaagaaatttcccaaaggtaaattcgctatatggcagtcctaggttgatacagaacaagtatctgcgtaacaatttggattgctccgaaccattcttttctccaagacagagagcatggtcagaactagatttctacttggaaaagattagtcccgaattggtagatcgagtaaaaaataatttgagagacataaaatctgcagaaataattaacgaccaaagaattatgcaaatacctaagctcaaacaatctgagggatccaatgcagcagcagattctctgaaggacatttttgtctggggtgatgctctgggtcgtatgtcagatcatggacatgtatcagcaagcaatatatcacttccaaggttattgaaatcgtcagagattcttgatgtgcagagcattgcctgtggagagaaacacgcagcaatagttactaagcagggtcaggtattctcttggggtgaggaaaatggagggagactgggacacaagacaagtgacagtgtctctgaccctaaaatcatcgactcactttcctccacgcctgtgaagactattgcatttggggcaaagttcacctgtgcagtttcagtttcaggagaactttatgagtggggtgaagggattgacagcctagggttcgggaccaatcagtgtcaaagaagcccatggttcccgcataaattgatcagaacttcagatggcatatctgtggcgaagattgcatgtggtcagtggcacacagctatagtatcctccacaggtaagctgttcacatatggacatggagcatttggtgttcttggacatggtgacacacgtagttttgttcagccgaaagaagtggagtccttgagagggttaagagtcaagtccgtcgcatgtggaccatggcacaccgctgctattgtggaaacatcaggaacactcaagagcaatgctcctggtgggaagctgttcacatggggtgacgcaggcggagagaagctgggccatactgacaaaaagtcaaagcttgtaccaactcgtgtcgaatcgctcgttgattgtgattttactcaggtgtcatgtggtatttcattaacagctgtgctaaccataacgggtgttgtatttaccattggaagcaaggaccatgggcaattagggaatcctcgatctgacactgacagcgcatgtatttgtatggttgaagggccacttaagactgagtttgtcaaagatatatcctgcggaagttcccatgtcgcagtcttggcaatgaatggaaaagtgtttacctggggcaaaggcacagaagggcaacttggtttaggggattacgttgacaggagctccccaactctagtggaggccctggaagataaacaagtggacagtatagtttgttcttccaattccactgctgcaatttgcgtgcacggggaaatctcaagcaaggatcaatctgtgtgcagcagttgcaggttggcatttcggtttacaaggaagaagcacaactgctacaactgtggttccatggtctgcaattcttgcagcagcaacaaggttcatagggctgcccttgcaccagacaagagcaaaagatgccgcgtctgtgatgcttgtttcaacgagctgaataaaacagccgagcacggtaaaatgagctgtggatcaaagatccaaaaagaaccgtcttatttagcagaaacaaggacatacacaccaaagttatcacggatgctgaaggaagcaaatttcatcatggagaaaatgggttcctccgcacaaagtcccggccagagaaatcaggaacccgccactccgaatcaaatgcaaaaggaaaggtggggacaggtagaatgccccgatcgattcaaatgcgcaagagacaacattccacatcgtttgacaccaaagaagcagacaattgatgattatcctatgaggagaatggctgatccagtctcacaaaagactgctgcccctttaacacaaactactagtgataggaggaaagaacaagatttgatagaaaagatactgctggaggaggtgaaacagcttcaagcacaggtaaccacgctagcagaagaatgccggcacaggagcctgaaagttcggttgtacaaacggaaacttgaggaaacctggttgatagtgagggacgaggccacgaagtgcgaagctgcagaagagattataaaggttttaacgaatcagaggaacgctttgtcaaacaaacttttagatggtctggaactagatggttccagtatcgtgcctaacccacccgacaaagctcttgccacctgcaaaaccccaccgctaaacagcatcagggatcaacacaacgcagaggcagaggaagttttggatacgcgatccacagcgtcttccaacaccgtcgcggtggatgactcagctgcgcatcagaacggcagatctagagcctccagtagcagcagaggctactacgacgatgggggaacagatagcacagctgctcctactgactccaacggggtcatcgagcaaattgagcgtggtgtgtacattacagtcgttacgtcccccagcggtaagaagggaatcaagcgcatccggttcagccggaagcatttcggggaggccgaggcacagaaatggtgggagcggaatgagagcagggtattcgcgaagtacgacagcgtggaatacctggcagcgtaatctcgataaggaagatgtacaggagtagccagtagttcttttgtctcagtgtctgcctgcatattgttcagtaaagtcgtaggatagatgagatagaagggaccatgatagcttccttttcctagcgaggagataaactgcataataccatgtcctcgttgtggattaacttagggccatagttgactcgataacgattcaattctacacgactgggggtttgtgttcgatgggaacaacaat

SEQ ID NO: 26401 - DNA, 1963 bp, Zea Mays
ctcacccacgcgcttctctctctcaccagcaggccacgccgccgctgcaccaccgctctccggatcatcggctgtccccctcctcctcctcctcgcccactcaccggccatccctgctgcggtgccgcgcgttcaagcaggaggccgacgacggcgacggcgacccgactgaggccgacgcgcggaagcgcaggaagggcccgatgtacaagctcaaggcggcgatccagggcctcgcgggatctcgctccgccgccgcggaggtgtatgggggagagtaccagttccagcgcgccgtcgagaatttgtgcgagccaaggttccccaatccactcacgcgcgcgcatcgctgtggtttcctgtgttgctttccaccctcgcgcgctcttcttcttcatggagccatggcaggaagcggcaacaggagatttggccgggatatggtgtctagcagcacacatttctcccaatggcagatggtctgggttggagaccacgttcctggcggcagagtcgatctgcaatgtggaggtccaatctggccaccgatgtcagctcgctccggagccaattccgattccctagcagtgacgacgttcagatgcagcttcagatgcagcgacgacctctctctccatccatggatctctaggcaactgcgaacaagggaaccaggcatcaaaatgaagggaaccaggaatcgaaacggccccgagaatcccaaagcacgagaaggggaacaagggaactaggcatcgtgaagagagcccggggtgatgaattgttacggttcatggacggagcaagcaaggagcctctccgcaagcactgtcggtccagtcactattcccttatctatacttcatgggacttgaaagtggcgaaagaggagcaagacattgggttttatgctggttttgttggggctacctatttccttggaagggccatcagcgccatgccatggggcatgttcgctgacaagtatggaaggaagccatgcatcgtgatcagcatcctctcagtgattgtgttcaacacactgtttggacttagcacaacttactggatggcaattgtgactaggggattacttgggttgctatgtggtatacttggacccatcaaggcttatgcttcagaagtctgcaggaaagagcaccaagctctgggaatctctcttgttacatcttcacgagccatagctcttgttattgggcctgctattggaggcttccttgcacagggatagtggtcgacaaaaatatttctagcatcaggaaggtttccataattccttccttgctttgtaatatcgttgctagcagcaggatcatgtattgcatgcatttggcttccgatagaattggcaatatacctattttcctacacatccaatggggccttggggacgccctccatggcaaacacagccacttccatcaccagcggtatgttcctgattcatgctgcttgctacttttatttgctacaaattggacttttttgggactactccactactgcttatacatctggtgtttgatcaagctcgtagtggacatacttgcaagtctggatattgtacaacatattacagcgtgagctacagcgtgctgaaaattttagattgtgaataatgactgaatctggaattttgtgttgtgagagctgttttggagttcttttgtggctgatctaggaagttttaagctgaggtgttggtagagtaactctctgtctggttagtttggtgctcagttcaacactaaattctgaattctgtcaggtaaactaacctgaacatgctttagtgaatctggaatttagtgttgtgagagctgttttattgtgacatgctttgggctgttaggtggctgaattctgaatttttagatttggaataacgtctaagtctgaatttccaaatagtttcttggacatttaacatcgcggatccttt

SEQ ID NO: 26402 - DNA, 1828 bp, Zea Mays
gggatcagcccgtgctcagtgctgacgtcgtcactcaaatgctgtttcgtccccgtccgcccatgtccatctagaattcgatccagtccaaactacctttcccggcttggtcaatcctgtcgccttcggtccatctcacacagactccggccggcggctccactccactgccccgccgctcggtgccggacgggctggctggcggactccatggagctcatgctgctctccttcgtcggaccgctggttcggcagcagtggaacgtctctgcccagcacgagagcctgctctccagcgtcgtcttcactggcatgctcctgggagcctgttcctggggctatatttccgacaaatacggaaggaggaccgctctattgttctccgttactcttaccgctggagcagggttgacaagtgctctatctcctaactacatatccctgctggcacttcggtttcttgtgggtgtaggagttggtggcacgcatgtattttcgtcttggtttctggaatttgtccctaccaagaaccgtggtgcctggatgcttgtgttctctgctttctggaccatcggaaccatcttcgaggcttcgcttgcgtgggtcgtgttgtcaagactgagctggcggtggctgctggcgttcacctccctcccatgcttcgccttgctcgtgtttttcgtcgtcgcaccggagtcgccacggtacctctgcgcgcagaacagaatatccgacgcgacccttgttcttgagaggatgtccaggacgaacaaggccgctcttcctcccggagctctggcataccaccacacggaaacgcagctgggactgggagagagtacaacagacgacgcctccaaatccggttccggtggcatggctgccctgcgcaggctgttctcgcgcaaactgctgagatccacgcttctcatctggttcgtttggtttgcaaactcctttgcctattacggcctagtgttgctgacgtcgcagctgagtgacgcgaaccggaggtgcgcatcgtcgtctgctcacaaatctcaagcgcacgaaggaaacccgaatctctataaagatgtcttcataactagcttagcagagtttccggggctggttatttctgccattatcgttgattggcttggccggaaagctacaatgtggatcttgctgtttggatgctgtggcttcctcggacctctggctgttcatcagaaggagtcggtgacaaccgctcttctgttcggtgctcgcgcctgtggcatggggagctctacggtcttgtgcttatacgcaccagaggtgtacccaacatcagcgcgctccacaggtgttggcattgccaccgccatcggaaaaattggcggcatcgtttgccccctcatcgctgtcggcatgctgcggagctgccaccaaatgcaagccgtcctggtctttgagcttgtcctaggcctcgcgggagtagcctgcatcctcttccctgtggagaccaagggccgcgagatgaaatgacagacccttcacagcacccaaagcgaccactactttcagcggcgtacgttcgaacataaagtatttttgttgaagacgcgtactcagaaaattgctcaagctatatctttaatgaaatattctgagtatcctttttatcaattagttttttctaccctatgtctttttagttttcactattttgattagattttgttttctaattaaaatcttaatacaacctgcgtggagttagtttgctaacgcatgtgccatgatatggttacaggataatgaaaaacagttttgagctcttttaggctcaaaccacgagttc

SEQ ID NO: 26403 - DNA, 189 bp, Zea Mays
ctgggagggtgagagcccccgtccggcccggacccctgtcgcaccacgaggcgccttcaacgagtctggttgtttgggaatgcagcccaaatcgggcggtaaacttccttcaatggctaaatactggctatagacctatagctttctattaccgcgagggaaagatgaaaaaggactttgaaatgagag

SEQ ID NO: 26404 - DNA, 1430 bp, Zea Mays
tcttggctagagttctttactcacgagcgaggagttgtacctctaggttttggccagggcttaagttgtttcgtacctctctgcctttgtatcatagttttgttagacttgggtcgaggacatgtattgttctagaaaaggtgtgtatattgtttaagtccttggtgtgagtgggtgtttgtgttataggccattcccagtgctagatttcattacagttttgaataacttgtaggtgatgaaatgaaacaagacccacaatgcatagttttgtttcatagtttcataggcatacacatttaaatgttgcatattgttatgaattaatgatgtgcaacttcatgcattccttgtcaggctagcgaataaggaccttgatttcccatttctggctcttctaatttccggaggacacaaccttcttgttctcgctcatggtcttgggcattacattcaactggggactactatagatgatgcgattggtgaggcatatgacaaatcagcaagatggttgggccttgatatgcggaaaggtggtggtcctgctcttgaagagcttgctctagaaggtgatccaaatgctgttaagttcagagttccaatgcgacagcataaagattgcaatttttcttatgctggactgaagactcaagttcgattggcaattgaatctaagaacttatgtacagaggatattcccgtttcggctgcatcggaggaggacagacaatcaagggcgaacattgctgcctcttttcagcgagttgctgtgttacatttggaagaaaggtgtgagcgagcagttgaatgggcattgaatatggaaccttccatcaaatactttgttgtttcaggaggtgtcgcatcaaacaagtatgttacgactcgcttgaatcatgttgctgggaataatggcctacaacttgtatctcctcctccaagcctttgtactgacaatggtgtcatgattgcttggactgggattgagcattttgttgccgggaggtttgaggacccacctgctgctgatgagtctgatgatatgcaggggataggtcataaatgggcaaattgagttaggtcacaaataactcacgggtttgagagttggcagatctcttggggtggtctggtctgtacgttgaggcatggatctgagagttctacgcctcctttggatgcagctgaaccacaatttctttagttctttagagcatctataatagttatgtaaacaacttcctaaatatgaatttaggaagttttcggaaaaactcttcttcaacaattatgtaaagtagatccttaaatttacaaactccctacaaaacccaatttcactcctacatttaagaacctcgttggaactatctaaatcaatgttggttctaaatccatcgctgaaaccatatttcggccaccgtttt

SEQ ID NO: 26405 - DNA, 2109 bp, Zea Mays
gccttgccctccctacccagtacccacccccccaccgacccaccccctccgtgttccgccgcctccgccgaaatcaccaaatccccgcctccgatccgccgccgacctcgatccgccgcagccgttgacccgcccagaatggcctctgggactccctcgccgtccggcaaaccctactcccgcaaatctcacgccagctccaaggctcccagcgtcccctccttcgacgcccacaacggccggctcctccccaccgtcaccttcccgctgccctccactaccgcctcccgccgggagctgcggcgccgcctctcctccgagctctcccaggtgcgcgccgcggccaagcgcctgagctccctcccggctcccgcaccttcctcggcgctctccgccaccgacccctccacgccgctcccgccgcacccgccggggtccaagcacaagtccaggaagcccgggggagccccgtacccgcagccgcacctctcggcggaggcgcggcgcaagctctacgcgcccgtgttcaagacctgctccgcgctgctccagaggctgatgaagcacaagcacagctgggtgttcaacactccggtagacgcgagcgcgcttggactgcacgactaccatacgatcatcaccaagcccatggacctcggcacggtcaagtcaaagctagcggctggacagtacaggtcgccacgggagtttgcaggcgatgtgcgtctcacgttccggaacgccatgacgtacaaccccaaggggcaggacgtgcacttcatggccgagcagctgctgaacatgttcgaggagaagtggttggagattgaggctgagctagctcagctatcgccacagcctccgacaccatcctcagcagcacccaggaagcccaaggagatagataattctagggcattagagaggtcggattcgacagttcatgctgccgggatggaggctaccccaaagacgcacaatggcagacccccggtttcaaagaagcccaaggcaagggagcccaataagagggatatgacattctgggagaagcagcggcttagcaataacctccaggatttgccaccggagaagctagacaatgttgtccagatcataaagaagaggaactcgtcgctcaaccagcatgacgatgagattgaggttgatatcgatagctttgatgttgagacgttatgggagcttgatagattcgtgacaaactataggaagagtataactaagaataagcggaaggctgagctttctgcggtaaggccagatgaagctgatcctgatcaggagccagagaaggtagaacgtgtgaggcaggacgaggcagatcaggatcgaatccctgcagtacaagagccgattccagaaccagaatcagttgatgtcgagccacctaaggaaattgcagcagatgacaatgggagatatgtgggtgaatcatcacctggtcatttggaagatcaggagggagagaatcctggtagatcaagtagttctggaagctctagcagtgactcagggtcgtcctctagtgatacagacacagatagttcatcagcagatggttctgatgctgcacaatcgcccagaacgtagcatctataggccagaaggcttcgtctgacttacagagaggatgctaatgtttctggttgttaagtttacatgagcaggccaaattcatcttcttgctcaaatattgatgggggcactggaaaggacatagcaacttagttcaactaaggaaggattctagcgtgaaattgtcgggcggcgactgttgtaaattttggtcatataggaactctaacccagtgccatgctgtttgtcgttttgtccacacaagtggttgtccgatatagcacatgctccgatttcatttgtacaactacccgcagttgtgtagggtgccgtgtttgcctagtcgtcgagctgcaagttacctcacattggaattggataggaggagacctgaaacctggggcagtgaaacaagtggcgaggtgaagaccaggaacctggcgagcctcgccctgttgtaagatggtacgattgctatagccgtgtaatttttttttaagagcatgattatc

SEQ ID NO: 26406 - DNA, 2562 bp, Zea Mays
cgcttctccaacctcgtattgggagagatccgctcgccgcctcccccgcggcttcctcttcctccgcgcaaactcgccgtggcagagttatctcgcgccggtaccgcacgcatcgggggaaaaacaaggtttttgggatgccgggggccggtgtggagccgccgtcgccgccagccgaggccgcggcatggctaccgccgcgcaggttgagacctgggagggtctccgccaagcggtgctggccgcccgggtgcggtcggttcccttcgcccccgccagcgccggcctctgcggccgaggcaggtcctgaggtgaagggcgtggatggcgcctccaccatcgtcgtcggcagagccgatgagaagcccgcccccgccgtcatttcgccttcggctcagaatggatgcccagataaggtggaggcccccgcccccgtttcacctgcgcctgagagcggcgccccgcctgctgataaggtggaggaggtggctgaccccgccgccgtttcacctgcgtgtcagaactgcgccccgcctcagcaagaggaaaataaggtggaagttgtcgctgctattttgcctgcagcgcacagcagcgccctcccacatgccctgactgagaaggatcagcagaatgtagtcatccgggagaatggagaggcacaattgctgggcgatgcaggcaagctgtcattggatggtcagcaagggaacaatgtggtgcaggtagcagtactgggtagttcgagcaccgttggtgctagttatttgcagaacggtgacaaggggggtggattgttggtggctgaggagaagggacgtggtggcagcagtgatgtggggcaggaggttgctgttaatggggatgtctcagagattgcaaacaaaacgggcactggtgagttacagagaaaggaaaatggaactgcaggaagcagaacaaaacggtggtttgtatcctctctgaatcctccacccaagaggagggaagtctcagccgtacgtagatttccacctggctgtgggaggactgctgttaccaccacagacagcggtgttttggaggtctcacctataagcacatttgctcctggtcatgggagatctggtgttaataccacaggcagtggaaatgaggggttgccttcagaagccacccctgtcaacaataatgatgccttggtggcaagttcggttttaggagagttggcttctccaacttcagcactagaggcctccaataagaaattggaaagcaagagaatagtgggtgaaggacatagcaaggctcacaataaggtccaagttcaagatgattttgccggtaccaaacaagatggtggccagcgaaatgttgttccaaaagctacgccgaggagtgtttctgatgggaagatgaaggggaaactcccagcacataaagcgaatcaggtagcacaagaagtgatggttggtaagatgaaaaataaacttgatggaagctttcaaagaagtaatcttaggacgcctttgagcaatcccattgatgcaaagacaaaagtaaagaggtcggatagtgacaagatgaatgctggagtgcatggtaatgcaggggcctctgcaggtgggaagatggaaaataagactttgagtgctaaaaaggaagtggggttcccaaatatgaacacaaagcaaaagaaggttgctcctaagttgaagggtgatgtcataggcaaggataatatgcatttgtccgccagggagctcaagcttggaaaatatgttgcaactgatcatactgaagagcctaagaagcaaataattgttcaagcattgatggctcctgacaattgcccttgggcacgaggaagaaagtcaattgctagtgctttcaagtctcttggtcctatgaacaaggcaaaggggaaggatgctagtgcttccaaacaatgttcaagaaaatgttaggcgctagccaggtgttaggctactgaccagcgtctaggaagtttaaacgtagattaagcatgcttaatcattcttttgtagattttgtgctgctgagagcaagctgatcatctatgagggatatctcaatattgtacatgcacagccaagcttccaaacaacagggcagcatcacaaggcaaaggatcacaagaaaatatacacaaaaaaacactcacagttcatcacatgccttaatgatttaagttattccaaagaataggtctatagatccttgtcccttgtattggagaagagttatttgatgattggtgggagaagattatttttgtttaactacaggaaggcctcaactcgcttgtgattcttaggatctggaccattttagatcaccgcaatatatttgtttttgatagtatacatccctgtttggctagaaccttgttattgcttgttagcaaggaaattcagttgtgggtttgttgggactaaatgtatcttttacctttttgcccagtcgcctgagtatgtttgttcttaggttacatacccttctgtttcttgtcgcgaaagtgatttgtagctttttttttgtatatgtggtgttgtgtaagga

SEQ ID NO: 26407 - DNA, 1747 bp, Zea Mays
gattatgcctttctagcacctcctggccaccaaagaagcaaaaatcttccaggttcccacccacacggccacacccactgttctacatgctcatgcatcctcctaatgtaacctgaagctttaagaaaacaaagtgctcccggaagactccaagctgcagctaccggccttcctctcccccattccaattccgagaacaggggcggcggagtcaaccaggtacgatgtgctcggtagcgaggctggcgtttgtgcttgcactggccatagccgcctcgtcaattgaggttgcggagagcagagattttaatatctttgctcagggcagcttgcctgatgcaaccaagggatcgtctggtctagctgcaaccagtggaaagttgtgtcagttatgcgagcagtactcatccgaggcgctcctctatctcacacaaaacgagacccagactgagattcttagcattctacaccatgaatgtgccagccttgcccctctcaaacagcagtgcatcacgctggttgactactacgtaccccttttcttcttggaggtctccatggttacccctgagaagttctgcgagtcgatgcatctctgcaagaaggggatgaagattagcctacccacccgggagggtacttgtggtttgtgccaccatgttgttgttgaaattcttatcatgcttaaagaccccaacatgcagctggaagtaatcgacctactcaccaaaacatgcagcaaggcgcagaactatgaacagtaggtgagctaagttcaagaaagggaacctcagatgtgctatgagtgcacggggctatattcaatggtatctgagaacaaaaaaaaacagcgagaattgagaaaccttgaactgattgagcacttcagaaagtgaatacttacaaactagaccaacctaggtgacattttattttatttaaatacaaaataggcatctaaatatttacatcaaagagaacttgaacctagattgtctaggcacgcatccatgcctcgaccaactgagctagttcggctttctaattttagctgtttattccaatctgcctaaagatatatgaagttaggctgttgctgatgcctgcaccctgcagaactgtatcttaagttaggttgttgctgatgcctgcaccctgcaggtttgtgcaaaatactccatatacagaacagggggtctctttctttgaaatctgatgtttgctacctctgttatcttctgttcataacattcttcttttcatccctcagtgcaagcggctggtcctcaagtatattccacttattctggtgaagggccagaaattccttgagacaacggatgtctgctctgtgatacatgcatgcaaagcaggcacacaagcatcaatggaagccatgcctctgtctgccatgttgtgaaggtgatgcgaatcagaataaggcttatttgcctaggagatcaaattggggagaaacgatgaaaagtcagatgactgttttaagctctcttcctctattgctgaaacactattgatcggtgaaaattcggctgtgtaaaaatcttgtgtaaatttgggggtatatccattgtttctctgaagtatacagcaactgcagctacatcaatctcttcggcattgggttgagaagttctaagcagtaattgcattttactgtaaaagaagtgatcaagggcacaacttgccttcaacgagctcctgctcagctatctctacttgttgaagc

SEQ ID NO: 26408 - DNA, 1914 bp, Zea Mays
cgagagcccgagaccgcccaggtgcccaccactccaccagccaaccctagagcctctccagtctccactgctcggccgccgcctgccgcagcccgccgtccactggtcccgcctcccggcgtccgctccacgcctccactgctcccggcgtccgctccattgctaccatcgtccggcgttctgctcctgcgccctccctttgattcgttgccagttgtagtgtccgggcagatttgagctgtggcagcaagcaaggattgacgaagcgtgcgttcccatcgcaccaccatgggctacacagagatcgacatccacccctctgggagcggcaagaacacacctctccatctttcggtgcttggtggatcaccgtctaaacgatccaccaccagaaccgcccaaccccaagatagtctcctccatccaacctttcctacgtaggcagctccatctcagtcgttgtacccgttcaatggcgagctggtggcagcgatgtaggagatgatccatgccgaggtgcacaagtacatgttagtggacggcacctgccaaagatacaccgtttctactggtacacattttattttttatggtgagaattaattttgtagcttgcgcaaaaccaaaggttgagtgatttgtcaaggcagaaatcagtataatgataggtgtgcttgagcttttaatagctggtttatttgaacttttatctttttatgatcatgatatattgagacataaatatattacatgtacctttgcagtttttcagttggagaaaacatttaagacaacattttcatcgtttgttctccatatggggcttgtttcacgccacttgaaggaagaagggaatggtggtgttaagttcggacaatacatctacacatcttggagcatcggcatcaatgttctcaatcttctcaaatttcaaattatactggtcattactttgaccattagaataaaatccctataaaacgtggccatgcaatcactggttgtaaactgatgggcagaatgttgtaggatggattggctcaagaactaatatagcttacttatgacaatgtagtaattcatgaagttattgttccttatgttcatggagtttgttctgctaggtttttatgcttttaatttctatttccttaacgaaacctcaggcaccttaaagacagcttggatgattggtttcatgaacagctagagaacttggatgatgattatcttgtgtttgattgccctaatatattctcaaatcatcttttcatgctttagttgtttcttaatagttgcacagtttcatctcactcatattcttgccacttacatgtatgtgacaaaacagacaatccgtcttttttattgcttatggcgttgtgcattatacatgtccaccaattatatacaaataccatttgtgggttacctctggtgtgtttaggtgcgagctgcaatcaaagttaaggcattagtcatcatttgcttcacctcttctggacaggctgcaagggtgttctggacaaagaaagcttgtaccttaaaacaagaggatacaagaagctggagtggttgtctaaaggcttttgaactgcttgaagcattagtgtagctttggtgattttgtgactgatcagctctggagcagctagagtgatgtagttgtgggcttttgaacaatagctggagtgatatgaaacattagtgatgtggttgtgggcttttgaactgcttcaagctggagtgatgtcgctgtgttgcttttgtgactgatcatctctggagcttttgtgaatgatctaactagctatatgtaaatgatctagttgtgaatggtattataattgtgatgattttgtgaatatataattgtggtgcttttgtgtttatgtgatggatctatgactggta

SEQ ID NO: 26409 - DNA, 1147 bp, Zea Mays
aaaccgttggataaagacgctgcaaactgaatagggagcaagacggttccggagtccggactcaagtcccccaaaaatcccaatcgaacccgtccgcctatcgccccaaaccctcgcccagctcgaggtcctcgccgccggccgccggccgccgtctccgtccgaccgccgccatggctcgcaacgaggagaaggcgcagtcaatgctgaaccgcttcatcacgatgaagcaggaggagaagcgcaagccccgagagcgccggccctacctcgcctccgagtgccgggacctcgccgacgccgagcgctggcgctctgagatcctccgcgagatcggcgccaaggtcgccgagatccagaacgagggtctcggcgagcaccgcctccgcgacctcaacgacgagatcaacaaactcctccgcgagcgcggccactgggagcgccgcatcgtcgagctcggcggccgcgactactcccgcagctccaacgcgccgctcatgaccgacctcgacggcaacatagtcgccgtccccaacccctcgggtcgcggaccggggtaccgctactttggcgcggccaggaagctccctggcgtgcgggagctcttcgacaagccgcctgagatgcggaagcgacgcacccgctacgagatccacaagcgcatcaacgccgggtactacggatactatgacgatgaggacggcgtgctagagcgccttgagggccctgccgagaagcgcatgcgggaggagattgtttcagagtggcaccgtgtggaacgggtgcggcgggaggccatgaagggggtgatgagcggtgaggtggctgcggctggagggcgcagcggggaggctgctagagaggttctgtttgagggggtggaggaggaggtcgaagaggagaggaagcgcgaggaagagaagagagagagggagaaaggcgaggaagttgggagggaattcgttgcacatgtgccgctacctgatgaaaaggagattgagcgcatggtattagagaggaagaagaaggagctgcttagcaagtatgccagcgattccctgctggttgagcaggaggaggccaaggagatgctcaatgtccgacgctagaagacgagtcactaccttgcctcaagtttcaacatttg

SEQ ID NO: 26410 - DNA, 3441 bp, Zea Mays
acacgcataagcaaaaaaatgttttcattacaacatgtacccctgcactaggaaaataaggcactcggcactcgtgagccgtcgcatttccccccgtgtgaccaattcctctccgggccgagcagccgttccaatccgctcacgccgcctctctcgctgccccgcttgaccgcctgctagcgctgcagtttgatgctgatgacctgatccctccgttgggtaggttcttgggcgcggaaagaacaaagaactcgtggtgggtccgggtccgcaagaccctaggtgttcgtcagcagcgaggatgcccggcctgcctctgcctcaatcgttaaatcagaatattggatgtgaatatgcctatcctgggtctacaggccaggccttccgtcagcagctaagaactgcattgtctccagatgagaaacttaccgctgaaaaagatttggctctgtattgcaagccagtcgagctctacaatattattcaacggcgagccatgaaaaatcccctttttattcaaagatgccttctttataatatacatgcgaggaggaaaaagaggattcagataaccatatcactttctggaagtacaaatactgagttgcaaacacattatgtctttcctctttatgttctgttagctagacccactagtaacctttcacttgaagggcattctccaatttatcgattcagtcgggtttgcttgcttacttcctttagtgaacatggaaataaggacaacagtgaagctacattcatcattcctgacgtgaagagtttgtcaacctcccgtgcttgcaaccatgatattatctttattagctgtgggcaagttggacaaagtaatggtgaagataactgctctgggaaccatgtggaagattcttctctccaaatgcttgaagggaaatgctcctggggtaaaataccaactaatttacttgcttcatctttggagagttgtgtcaatttaagtttgggacatattgtggagttggcatctaaagttacaatgagaccaagcttcttagagccaaaatttctggagcaagacagttgcttgacattttgctctcataaggttgatgctgtggtaaggtctcctctatttttacattcatgtttaatatgattttgtccagggatctccatgtttctcttattactaatgctactaatacattctttgagtccaagattagtgtggttaacaggtatgcatcacttgcaactgccagtccattggatgacatgtcactgcatcacaagtttataaattcagctttgggcatacattgccaccgaatgcgctatatccacttttccatggaattgctggaaaatgactttagctttcaatttaaatgccccaaacttttggcaaaagtatttcaatttttatgaggggtaataaacttgtgaaggggggaatctacaagcttttagttgttgctattctgcagtataagagcatcagatctatcgggtcccactttggaaacctgtgttgagcacttgagttgcttctttctttttgtggtgctggtggttggagggggaagaggggttggcagtcaaaatcattaacctttattcttgcagggttcatataaactacaactatgcatgtccgcacaagaggctggtgcaagagatatgtctttgtctccatatagtagttactcatataatgatgtcccaccttcgtcattatcagatatcataaggttaagatctggcaatgtactttttaattacaagtactacaataatacaatgcaagagactgaagtcactgaagatttctcttgtccattttgctatgtacgatgtggaagcttcaagggtctaggatgccatttaaactcatcacatgatctattccactatgagttttggatatctgaagagtaccaggttgttaatgttagtctgaaggctgatgcttggagaacagaggtaaatttatgacagacataaagtttaagctgttttttttttcagattcaatttctgtttggtatatggagctgtagttgatgagtttcgtactttatatatgtgtttaacactttaacttaatatgtccctcagtgttcttccaaaggttcgtttaaatggaggctccacttagttgggcaaaccgaaggcattgcatgttccttagtccaggacgactccctgctttgtgatttccttcctttcttgagtgcagaagccaaggatgaaagagcattggctattctatatctccaatcaaattccttacatagtgtattgtgtacctcaatgattttttggtggataatgttttacatgcttaacaatgcatggttactatttctttaaatggaagcactcttaactgtatttggtaactaatgatcctaactggcagctttttgcggagggcgttgatccaaggcatcaaacattttcttatcgctcaaggtttaagaagcgtagacgatcaaagaacacaatggagaaaatcaggcatgtacactcacatattatggaatcaggttcacctgaagatgaggcaggatctgaggacaactttgtgcaaggggagaatgggacttctgtagcaaatgcttcgattgatcctgctcaatctttacatggcagcaatctttcaccaccaacagtactacagtttgggaagacaaggaagctatctgagagatctgaccctagaaatcggcaactcctgcaaaaacgacagttcttccattctcacagggcgcagccaatgcaactggagcaagtgttctcggaccgtgatagtgaagatgaagttgatgatgatattgctgacttcgaggatagaagaatgcttgatgattttgttgatgttacgaaagatgaaaaacttattatgcatatgtggaattcatttgttcgaaaacaaagagtgttagctgatggtcatataccttgggcctgcgaggcattctcccagttgcatggacgacaacttatacaaaatcctgctctgctgtggggttggcgtttcttcatgattaaactttggaaccataacattttagatgcccgcactatgaacacatgcaatacagtccttcaaattttacaagaagaaagcacaggactaaagtaattttgatgcttctgatgaaaattcaagggaagaagatttctttaccatttccaagaagaaagcatagaattggagtaactttttattgataatttcattcatatctattgtcaattgtattaatggtttttaaaagagacaaatcatgtctaactctcacgctgtaatattctaagtcgtacgtgaatttgatgaatattcattgttgttttacttaagagttatcgtattgagatccttaacatattattttatttttcatctaggttcttaaattataaaataatggattgagattagaaaatatttca

SEQ ID NO: 26411 - DNA, 3670 bp, Zea Mays
caaagggactgcaacatgatcaaagaggaaaaagtggaagccgccatcatctccatcaggtcgttctcgcttccgtcggtccatccaaggccatgctatcgacacctccgcagtcttcccatcctccagtacattttttcaactgcccgcgcggtagggaaggcaaagggtgggcatgtcgtcctctcctctgcaccacgtcatccacgacgatggtggaggagactgcttcagtcgccattcgttagtctccgttgctcctccacacgcttggtcgtcgtctctacggttggcccaggaatggaggtcgtcaattcaggtcgagtaggagcactctacggctccgcattgctactggtggtccaataatcacaccttcatgatttagtggatttccctcatccatatctccactaacattagaatattccttatcccatcgtcatgaggtcttcctacttttggtctctaaattgtgtatgccttttggagtaatttgctttgtttcgatgcctacatgttagctttgaataaagctaatttccctgcagcttttgaaaaagagttgctgaaaaaaaatcaggtgatccattatacactcatctttgttgtattattacactactattttgcttccaccatgaaattttaatatcttattggagtttgaataaaattttatatttgaatgtctttattttagctatctcacatgtggtggtcctgtaaattgtccattttttttaaaataaaaacaaaatggaaccctaaattaggatggttagcttccttctatgtatacccttttcactttttctttttcttttggaaaaagtaactaagtgttcgagctgcttgctttgtactgatgtcagtttccattaggcaatcacaacaattccacaaggaagcaggtcataagctggagtctaccttgctcctctttttatttgttttctttgcacccatgtccttcctctctgttttcaaaattcttttgttagaagagccatttaacagatgcaatattgtttatttgcggaatgtcaagtgatgggaaatactaagattataacattgtagatattatcatttggtaggttaccatagcccattacctatcttgaaaggattgaatactcaataatcacggcgaaacaggcggtgtcgatatactcaatttttatattctcataaacaagataaactttatcctccctgtatagcttaacatgatgtccctccatacgtacttatgtatcaatgcattgttggtttactattgttcacattcttaatcagcttataggttacgaatctcatttgttttcccttgcattttcccatgtttactgttgttcacattcttgaacaatttatagatcacgaatctcatttgttttctgttgcattttcgcatgttgaacaactaatttgaatcgtcaacaactcatttgaacaacctacgacttacgttgggaacatgtatgtttttcccaacaagcaatatgttatctatttattttccacactcatgacaaccacatatatcattttacttgctattttcggcatggtcacctgctattttctaatcggagcaaggtgaatcgcacattctgtaagttctattcgaaagaggtattttctatacaataaacaccatgaccacaccctgtgtatccacttatgtatctaagcaaattacatatatgtatatatgtacttcgaataagtgctcaattacataggattgataacgatgttatacatgaataaatatatgcatagagatcctacaatataaatgcacatgtatacacatatgttattgagtactcggatggtatttgatcttttcaaaaacaaaaacgggtgaaggttgttgtgctttaatagtctagatgtgcttttaaccctctttttatacaattgtggcattgctgatctaagtttgttacttcatccttatggcttagattctaattatccaacaatatcaatttatatgatctgaattccatactgatgtttgccataaataaactacttacattccaaaatataggttgtttttagttttttttagaaatgtatatcgtgtataataaaggattaacatgtatcaagatgcatatagcagccaacagacttctacatctgatactgaagaacatagatccaaatgtaatgctaaagaagaaatcacaaaggaccaaacaactagcactaggcaactcaaagcaaaagataatatgccttcgtttgaatctcctccaaaaagagtctttcatgtgatttgaacgctgcgccaacagaaacttggcttctaaatggagctggttgttgaaatgagaggacaaatgaggaatggactgaagtggttgcaacgtaggaaatcaggttgctttatgttacacatgttgtttggtggcaaaaatcagtggtccatcagtgcttcctatggccttcgtttcaaggaccgattcttcttcagtggatgctgacagctagacatcccgaaagtcatctggagagtatagctcggcacatgtagcctcctggagtcgttgacaactcagtgccatctgaatcataggacaactgaagcaaagcgagatagtaatggaagaagaattgaaaagatcaggctgcttgccatcatatatatatacatgggaggaggaggaatagtaagtacatcactccgcttttctgttttttggtgctctgctggatgaacaagaactgagctggaacaggagaagctggctacgtgagagcactggctgcctcgtccgaatccctcgtctgttgtttttttagtcgtatacacagacagaaacagactagacttgcttgaggttacactaggcacaacagccatggtggcggcccgccatgagcaagttgcttctagtgaggctggtggatgacgcggcgcgcggcgcccctggcgtagtgcgtcggcctatccgcgtgcctctactgctgggcgcgcgacgacaacgacggcgtggcggcggcccggggggagctgaagctcagcgccctgagcatctcgagccgatgcctacatgcctccggtgtgagcccgatgacgagtctgggcagtagtgtagtcattcaaccttgcgttttgtaggtcttccctcaagtggagaaggagagaaaagtgcttcccttgctgtgaggacttgcggctcgacatcattctcactttcttcccacaatctcatggggtggatgatcgccatagccttctctccgacttccaggttctgtactcctaccaaggggcaacgtgaggtgtccacaggggcgaggccgtgcctccgtcccgccgcccccgacaatgatccccaccggcactttgtacgaaagcacaatattaggacttttttatgatcttttatcttttttatttgaaggcacaataggatccaaagaggtaggttcctttttgtcactgatttcatatacttgaataacatgtgttcggtttgaaagagcacataattgcattcctatttttagtccttacatgattactacatagttgtttaccggtttgaggtctgcagatctcaagctcgctcgcactgcagataccttgtagtttatttttttactgcattgcgactaggccttccaatttgacaaacacaat

SEQ ID NO: 26412 - DNA, 3667 bp, Zea Mays
gcccagcccagggttgttgcggtgcgggaaggagcaagtttggcttgacaagttgggcgcagttggcttttgcctcgtcccctccgccgccccgttgccgaaacaaaactcgctcttcggacaaaacgccaacgccagggcgagcgagcgaggtgaggtcacctaccagctcccacagtcgcactcccccctcgcgccgtcccgtcgtaggaatggaatgaggccgaggcccctcctcctcctcctcgtcgtcgtcgtcgtcgtcggtgcttctcccgtgacaggcctcccttcctccggtccggtcgccctctgacccaatccgcatacatccaccaaccagctttgatttgcgctgtttccgattgtactcgtgctccgcccgctacgatacaggacaggggaggatggatttgtccaggctcgcctccgtcgccgggcccagccgcgcggccccgcgggcgggcctgcagatcggcgccgccgggaatggcttccgcgtctgctccctgcggcaccgcggcgccgggaacgggcgcctcacgtccgccgccgccctcctccgcggcagcagcgggctcttctacctggctcccgcgcgcgggggccctccccgtctccgcgccagagggcggccgcggtgccagggcagcgactcgttggcctacgtcgacggccccttggaggccgccaagggctccggcgaggtctacgacgacgatgccaccagctcggggcccgacgacgacgacaatgacaagggccccgccgacgtggacggtctccgggagatgctgcagaggtgcaggaacgagctcgaggtggccaggctcaacagcaccatgttcgaggagaaggctcagcggatatccgagtcggccatcgcgctcaaggaccgcgccgaaggcgcccagagggacgtgtccgcggccgtcgccaccgtgcaggaggtcatcgtcaaggaggcggacgccaaggaggccgtccagaaggctaccatggcgctgtcgatggccgaggccaggctgcagctggcgtccgaggcgctggatgccaagcgggggtcggtcgggcccatggaggttagcatcgaaggcgtggaggaggaggcccttgtgtctgctcaggaagagatcaaggattgccgggcagccttgttgcggtgtgaggaggagctggaacgcatccaggaacagaaaatgaacctgcagaaggaggttgataggctcaccgagctcgctgagaaggcccagttggatgcatccaaggccgaagaagatgtcaccaatataatggtgttggctgagcaggcggtggctcttgagatgaaagccacgcagcgtgtcaacgacgcggaggcggtgctgctgaaagcggagaaggtcatatcctcggttgacaccgtggtggagctaacatcacttgctgaagagcagaaaagcgctgaagaggatagcgtttctgaagggtatgagtatagcagcaatggcactgatgatgttcctgtgagggatgaggtgtcaagtatcgagcgtctaatggtaggtgacttgactgttgagggcattgagcagcttgaaccatcccgtgaaatatatgatgaagcaagcagcgataagatgtccgttgagcctcagaaagaagctgagcctgattcagacaagttgaagcaagggaagaagcaggaaatggaacgaaaggagttcaccaaggaaccactgagtgctcaaaaatcactgaagaagagatcatcccgcttcttcccggcatctttcttctcctccaaagctgatggagagtttacacctacatctgtctttcgggggttaatgaaatcagtgcaaaaacaggctcccaagcttgttgttgggatattgcttcttggtgcaggggccttcttcttaaatagagctgagaagagtcaactatttcagcagcaagaaattgccacaagtattggaaaggtaacctccacgacaaagcccatagttcgtgagatacggcaaattccacagagagtaaagaagctaatagagctcttacctcatcaagaggtaaatgaggaagaagcttcacttttcgacatactgtatttgcttcttgccagtgttatttttgtaccattatttcagaaaatccctggagtcctgttcttggatatcttgctgctggtgtcctcattggtccatatgggctctccatcatccgtaatgtgcatgggacaaaggcaattgcggaattcggagtcgtgttcttactgtttaacattggacttgagctttctgtggaaaggctaagttcgatgaagaagtatgtcttcggcttgggatctgctcaggtgctagctactactgcagctgttggtgtgatagctcatcgttttgctgtgctaccaggaccagcagcaattgttgttgggagtggcttggctctgtcatccacggctgttgtcttgcaagtattgcaagagcgtggtgaaagtacgtcgcgtcatggacgtgccacattttctgtgttattgttccaggatttggctgtggtggtcctgttgatattaatacctctcatatcacctaattcttcaaaaggaggggttggtttccaagcaatagcagaagccatgggaatggctgcagtcaaagcagtagctgctataactgccataattgctggaggtcgtctgttgcttcggcctatttacaagcaaattgctgaaaatcagaatgctgagatattttcagcaaatacactccttgttatttttggcacaagtcttcttacagcccgggctgggttatcgatggcacttggagcttttttggctggtctgttactagcagaaacagagttctccttacaggttgagtcagatatagctccttatcgtggtcttctgttaggacttttctttatgacggttggaatgtctattgacccaaagctgcttctgtcaaacttcccaatgatctctatgatattgggtctcttgataattggaaagacattgttggttacatttgtgggcagggtatttggggtttctactatagctgccattcgtgttggtctcttgcttgcgcctggtggtgagtttgcttttgttgcctttggagaagctgtcaaccagggtcttctatcacctcaattatcatcgttactgtttttagtcgttggcatttcaatggctctgacaccatggttagctgctggagggcagtttctggcatcaaaatttgagcagcatgatgtgaggagtttattgcctgtggaaagtgagactgacgatttgcacgaccatattattatattaggctttggacgtgttgggcagatcgttgcgcaactcctgtcagagcggttaattccttttgttgcccttgatgttagaagtgatcgggttgcagttgggcgtgcacttgaccttccggtatattttggggatgctggaagcagagaggtactgcacaaagttggagctgaaagagcttgtgctgctgcaattactttggatacccctggtgcaaactatagagctgtctgggcattgaacaaatatttcccaaatgtgaagacatttgttagagcacatgatgttgatcatggtgttaatttggagaaagctggtgcaacagcgtacttacaacatatcttctaatggaactgtgcg

SEQ ID NO: 26413 - DNA, 2371 bp, Zea Mays
cgcgcgcgcccgccgctacctgccagtcgcgcgcctgccgccagcgccccgccgccaccccacgcgcgccccaccgcccccgcgcgccggctcgtgtactccgctgtccgctcccattccactatggcctagctgcgtgctgctctggcatcggtcggtggataagcccagcaggcaagcaggcaggagactaggagagctcagcactgcacgcacgctcccctccccttactggccaaatcgatcgtccccttcaggttccaggctccggagcttgctttacttcaggttgtctagctgcatgttgaagtataattccggatagattcacagtttttatccgctaggaagggtggtaaaaggctaagtttttttttatgaattctctgcgttcttcactaatccccaccctaatcagtaaacacgcttacgaatcgtttcctaatcgtgtgacagggacaacaatgacctcagggacaacaatgacctccaagacgagcggcagcataaccaccaacctgagcaccacggggaagctctcctccgtgggcagcagcttcatggcgtctgccggcagccgcagcaccagcggcggggtttgacaagggggccaagtactccgacgaccagatcctcgaggcgcccaacctccgcaccttcacattcatagagctcaagacggccaccaagaacttccgtccagacagcgtcctcggcgaaggagggttcgggagagtctacaaagggtgggtggatgagaagaccatggcgccgaccaagaacgacaccggcatggttgttgcggtcaagaagctcaactcggagagcatgcatgggtttgaggaatggcagggttgcaattttcagagatcgtgagtcagagcgcaaggatcctgattatgacagaagctatgacagatcaatcgagttgagtttgttcattccaagtcattattgcatagagatatcaagcctgataattttctcatgggtctcgggaaaagagaaaaccaggtttatgttatcgattttggacttgcaaagaagtacagagatacatcaacacaccagcacattccatacagaacaaagccggagggatgacatggaataaaaaacaaaagtattcgggaaggttggtttaatacactgtcagccttccatggtagggcctgaaagctgggaacaaaaaacaaaagtatgaaaagatcagcgaaaggaaaattgctacttcaactgaggctctctgccgtggatatcctaccaaatttgcttcttacttccattactgtcgctcacagcgtttcgaagatgcaccggactatcagtacctgaagaatttgttcagagacctttttattcgggaaggttttcagtttgattatgtttttgactggaccattctaaagtaccaacaggcatagatgaccactgcaccacctcgtgcaattgtctgtacaaggaataaacttaccctcctaccttaagtagtagtagagattgtattgggtatagaaatgtacttcttttgttatgttatatttcattgccccctctctattttggttcctggccttggtttttgtttcttgtattttttttccatgtcgtctagctactgtagttgcccatcgtcaaagttttgtagagtggttagtgtttttggttgacagacattggtgctagatttgggatcagccttcctaaacagtaccatttactttagctcaatgatatgaataatgcttgtttgcaggacatattgctaagaatctgccacattatgtttgcttgaggtattaatttatccaggtgtttaatgctggagtacagttagaagatccctaatcaattgcttctcatttcagtcgtgtaactttattcatgctacaacaacgactttgagcgaacatgagaccactgagctctagagtgaatgaaggacgtcgtctttggaagtcagacatcacctagagctagggtgtccattcttgacatgtttctcttagtgataggtggatactgtctagttaggaacagagtcttgagggattgatggacgcatgcatcttcaattcctgtgtgttgtattactactggtacaatctccaattcttgtgaacttatgtatttggacttgtgtgaatttgtgatatgaacatatatccatgtgtttgaaatctatattgtatgtgatattttgtgttgcatgtgatattatgtttgtctaaattttcatttctgtattttttattttttctagaaaagggttaagaacgtgggtacccacgttcttaacgttaagaacgtgggtaccgtcgaacttattgtgcattcctcgcagacccacgtaggacacataaggtcgacg

SEQ ID NO: 26414 - DNA, 4388 bp, Zea Mays
gttacttttaaccccttccatatgaaaccgttggatctggattagatgctctggatagtttgattgcacgcttgcaccaaaatgagtgattgcacagaatatgtcctccttataaggccttgttcggttattcctattatacatagatttgatgggactgaaaaaaatttaaaagaacttttacttatttgggatttaaacccatcaaatctcactcaatccacatggattgagccagagaccttatgccaatgccatgcgcgcactgccatgcccactgaagcaacgagcctctctaactcccagcccgtcgccggcgctgccttcctctaccgtctctctcatccatccctctctgccctcctcctatgcccccctccccaatgcctccgcggcggagctccgccaagcgacaagatttgtcccccctcccctgccaacgcctccgttgagcatcggacgcgaatctcctcaccgtccgcagcttgttcggccgtcgactacgtcccctcccgggactcatactagtggggaaatcatgatgtccgaactactagtcggtggctaaatgttgtgtgatcatcttgttttgtattgatcagaaattgctatcctggcttacagttctgttttgaaaatgaaatgagaatgtgatctgaatgttaatagtttgctgtgggacactcctttttttgcggaattttctcaagaacactgttatagtgtaaattggccatcaaacacagtacattcgatcagtgtcatacaacaaataaaatagatttttggaagttttactataggacaccaataatattctgaaccataacagtgtctttaagtaacagccattgtttatataagtgtcccactgtaaattttgccttgttaaaataattatattggtgggctgtggttaccacaatttgtttgcgacataactgagatcactatttgttctctaacttttctccagcttcactagcctgtttggaaaaatgttattattctggttgtggtctaaattttatgcatcatattccataacttaccaatttgtgatcaaggaacaacttcaacaatatattgggacagttgttaaatattattgtccactccataaaatattacattgaaactgtgaacatcagtttaataacactgaaaagaactctttcttctgagttctgattgtatagtctttggataattatgcccctgggtattcttacctacaccctcgtctctccacatcaccttacccatggaaggagggaagtagagactttaagctcaagaggggatgcttatgttctctattaacctgtttttcatatctaatgtaattgtgtgttagtattttttgtggatgatgacagggtgtctgacgatgtatttgaagcacctcaacaaaagctggagtgaatttgaaccactaaataattagaaaggtcaccctgctgcttgatgtctccctcatgtaacaccttaacgtttcttctttgcccctcccctgttttcttttgcttcccctgcaacctgtcagacaccgatcaagcaggtagcatgtagcctatgtaatccctggtcttttaggtctggcaccattcataccctttcccaaacgtaaaataaggtgggattgcacttgcacctaggagtggtaatgacctctaaattttatactataaaatttaagaatcggatcgggctctatttctattcatttttgaactaaaactaattaagggctcaaacaaattgtgaaggaacatgtggatcattcatttgagggctcaaacaaaaaatcatttgggatccaagtttttatttctctgggtcattcatttgacacaaatacctgtattttggagcaagaaaacgtggaacaaaaatgataacctactagaattacctaatgtgtacccacattcacctctactatcatatcgtcagtggagtgcaacatggttgtgtgttccgttctgcggtttaaacatagattgagtttcacttaatggttcatgattctagttgtcatgtggaattcggcgcctaagcagttcatgtcttgctcttctctactatgtactctagtacttgtcatggaacataactaatcaatctttattaaaatgttgtgaccaatatatattttaattaagttgggtttgctactttatattttgattgacaccttattcgtggttggatggctgatatgagggcgcctttacagtgcaatggagaccttaaagtttgggattagtagatggtttggtccttaagcaagatgtcctcggtcaataccgatggaaactctggttcctacagcagcaaatcagcctaccaaactttttcttggggactatcaaatttgcccccaggagaagaacttgatcgcatgtttggacaggaccccctggttcttccggctattgagggaagacagtgtgggatggatcctggatgactagcattacatctatcatacatttgtccagttctctggagttttttatcctttgttttgtaccttcctatgtttctccatttgtcaaggcctaaattccatctttagttacttctggaaatttttctcccatttatttgattccgatttctggataaaagttgctccttggtaatcatgaggagggctctgaaaagatccttgctcagatggtcgccaaggattgtacaatctcaagaattttgtcagtgcttatggttgatttgggctcttctaccagggggtagttgcagcagtcgctagccaagaagatcattatagtttgctgctttataaggtgacacaagggttcctgggtttctcagtctttgactgagagcttctttgtgcaataccatggtgcggtttttcctcaccggccgagtatctgtttttgaaggtagggtttgtacttttcttcttttttaacaaagagataaattgctcgcctttgtgttccagaagaaaaatctcagcaattgtcaaacttcagtttttagttaaggttaatagataccaaacaaaggatactatactattgtttaatacatcgtatattatttggctagtgccagcctttgggctatagaatcctctaccaaataagtagcagatttatttggatggaaggagtgtatctcttattaaatacatacgacaaacatttaaggaacgaacgtcacaaggttatcaatagtaagcttgactgaccttgagttgaacaaaaactttcatgaagacgtatctttggcaatgaattggacaggtaaggttcaagaacacttcagctaaataaatgagtagagttaacatatatctttctcaagggatgggggactaggggagtcactagcattgattgtgcaccttgaatccctttcttttcttatataaggaggtatcctctacactaaactacgaacaagtatcagagacactctctgtcaggtgtctgcaatggacaacctcaaaacccattctgaatatgccgatcaacctcaggggccacaagcaaatgccgtttctttcgctttaccaacaggtcaggtcttagacttagatagtcatatgattggccaacagcacacgaatctgtcatcattctggttctcccttgagcagcacaggctgcagttggatcaggcccttcaactccataaccaacagttgcaggtgtcactgcagcagcaaatatctatgcagaactcaactctactgaaccttgtggaatctatgacaagagatgtgctgatgcaaaagaatgatgagatagccagcctgcgagtagagttgcagaggaaccaagaggatctagaaacaacactgcatgacagagatgagtggatgaaggtcgctatggccgcttatgaaattaatcagacacttatccgcatgcttcgtaccgtgcagctggaagcgaattctcatgtttcatctaatgatctagatgctccaagttatagtgaagcatcgagcatggcgaggacagcattggagacagcacagcccaatctgatctgcaaggtctgcaactctggtaatgccggcgtacttatgttgccatgccaacacctctgtgcatgtaagccgtgcgtagcctggcttgcgacatgtcctatctgtggtgctgtgaagactgatgctatcgaggctcgatttgtttataagaagtaaaaacgccaaagcagcaatccgaattcgtttataagagcatgtcagctttcctttttttcgtgttaggtgttataggctgtagccttgttctgttatgcattctggtataatgttctggtagtcttcatgccgatgccatgtttctggattctcaaaatgttttgatatagttgccatgttgtcttcggttactatatttttc

SEQ ID NO: 26415 - DNA, 3260 bp, Zea Mays
cacagctgttcgctgttgctctctccagtagtcccgttgagtgacctcccctgcgcgacaactagggcgaccgccgccgccccacgcctgctggccaggtcttcggcggaccctttgccgtcgacgggcatccaccacaccagggttttgcacattaatgaagacttaaaagttccagaacaaagcactaagggtgctcgaaggaaaaatgctttagatcccagaaacattgctatgtctcgtccgcttgattttgctgtgcttaattacaaaaatcaaaggcttgcggaacaactggaagtccacaaatttgagttccgtgctcttgagagtagatttaatgatttaaaagagaaacagaggacacataatgagacacttatcctagtagaaaattattgggagcgagtgtttgtagttctctgctcctttcgaaattatatttatgatgacaagagatttacatgcatatctccagaactagctgtttaccaattgatgattgttaaagggcaggctttgtgccggatgctcccacacaagtgggatggtatatgctttcgcctaggagcaggctttttaaatggacttttagaggctggtgccagtgccacagaaagttcaggtttttccaattgtcaactaggaaatgacgtctcttcagaagaatcaacaacaattgatattctgcagaagatgttccttccatcaagtggtccatggcatgcgaataacgagttagcagggaactatcaaaaacaaagagattcgagtgcctggaacagagctgaacagaaacgtctgaaagaggagttgactagtgttgttgccaagttggaagaaagcaaacaaaaactggcagtactgaaagcacagggagacaataagcaagcaacaccgatccttgttcctatgctgggaaagaaaactgcagaaaaggtgggagataaacaaacagaactgcaagatcttgaagctacccacaaggagttaatggaatcgatttcaaagcgtctggaggaaattagaagactgcatacagagagaattggaattttgaacaatttagcgacttttcagaatatactgacggatttcaaaagcattcactcttccaaagcttttcaacttgtcaatgaccaacttcagaagtcacaagcagaactggatggtcaccaaacattgttagagaaattacaggttgacatggatacctttgtttggagagaaaggcaatttaatcaaaaagttgatttggctgaaatctcccagaaggtttctgcatactatgtatctagaattgctgatcttgaaaaggatgtccagaaactatgtaatgaaaagaatatgcttgtgctgaaacttgaaggggctttgagagaacctggtcggaatcaggttatctcagaatttaaagctctggtgtcatcgctaccgagggaaatgggtgctgtgcaaactgaactgtccaaacacaaggatgcttccttacagttgcattctttgcgagcagaagttcattcactttctagtatccgaaccagaaaggaacaagaaattgaagaaacatcaagatctgctcatgctggatctgatataagccaacttcaatctctggtccatgagctgagggaaaatacacaggagcttaaactatttgtggagttgtataagcatgactccgctgattccagacagctgatggaatcgagagacagggaacttgctgaattggctggagtccatgttctcagatattctcttaatgaaagtaaattagagcagcgtgtaattgcagccaatgaagctgaagcaatctctcagcagagactggcaactgccgaagctgaggttgctgaattagggcagaagctagaaacttctaggagaaatctagtgaaacaatctgatatactgaagtctaaacatgaagaatgtgaagcgtacatggtggagatcgagagcattggccatgcctatgaagacataatgtcacaaaatcaacaattgctacagcagattattgaaagagatgatcataataccaaggtatggcgacatggcgttgagattttcagtgggcttttaaaacttttcatggagggtgttaaagcaaaacagtcacacgatgctttgcatttggaagtgtgctcgttgcaaagaaatttgcagcatgcaagcactttgatggatctgtgcaaccagaaacttatccacctggaggacaagctaagaggttggtcagagcggttgaggagactgtcagaggatggaatgcagcaatctatttcattgggcatttctcaaacaaagcttaccggtatgcatggggaagctccaaagctcgggcaggcattgaatgttctacaagcgaaggttgggagcaatcggctggaagttgctgagctgcttatagaactagagacggagaggtggttcatacacacatttgctttttattctggcaactggtttcttaacacttggtctaacaagttcagtttttcctccaggtttagtaaaaagagattagacgatgatttggatctaatgtcaagcaaagctagttctctaagagagaaggcggataattctcaagtccttcaaaaacttctccatgaggctaaggagtacaggggaatactgaagtgtggtatttgtcatgacaggcagaaagaggttgtgattgccaaatgctaccatctcttctgcaaccagtgcatacagaagtcgcttggtagccgtcagaagagaaggttggcgcctgtgtcgcacacaccagaactgcctggtgctctactgattcccggtatatggtaggccgccatggcggcggttcagttggtgatgtagcataagcttctctaggtacattgcacaccccccaaaaaaaaagtaagacgctgcatgtgattgctggtacccgctggcatatatgatgctggtgttacctcaagcgtctctcgcaaagtatgccttgcctttgcccagtctggtagaatagcctgacctcttcaaccattgcttattttttattcattgggagaaaaagacccaacaagtgaggatattgatgcttcccgcaatagtgagcaatgtttatatttgtagctttagttagttccattggtgtagccgacagtaaggatatagtttcatttcattttttatttttcctttttgaaatatactggttagccagtttgtatgtttcaggagattgacaatagtgagattccgttaataaaaaagaagtgaga

SEQ ID NO: 26416 - DNA, 3243 bp, Zea Mays
tcggccacttcccgccatcgactcttcgcgtctccgccgccgccaggctaccgctgcgccggcgggtcggcgatggacatggacatggagatgccagatcccgacgagctcgagtggatggagagccacggcctagtccctgaggaagaggacgcctacttcgacgaccccgacgagggcttcgtcctggcccccggcgattcggatcaaccgtgcaattccccgcagccgcaggagtccgccgcgccaagagcaaatgaagcgccgggcggtttgaagcggcctccgccaccgccaccgccggagcaggatgaggaagaggagaggagcaagcggagaaacgttgagcaggaggacgaggattggctgcgctactcgccgcctcccgcccctgagattgtcgtcgccgagaagacaatctcgcggttcgcgtcggagatccatggagactctgtgcccgtaactgctcccaatggtgagagagtttatgccaagcttgcaatggaggggttggtcggtcgaggaattagcggaactaggcaaggggttcagttctccaacccaaacagcaatcacaagggcctgctctcagaatcctttgactcactaacaaggcgtgctgagcaggaggctttagcaaaggcattgcaagaaagtacagactcaatagaccgtgtggcttgttcagcgactccactagtcacagaaaaactttgggtggaaaagtatgcaccgaattctttcacagagctattgagtgatgagcacacaaaccgagaggtacttctatggctaaaacaatgggactccattgtttttggatcccatattcgggctacaggtgatgatgtcttgtctgccttacgtcgacactcttcaaccatccaaaagaatgcaagtaacagaaatttcttttccaagagtaaggggggtcctgttgcaagtcaagatggcacacctctgaatgcacaaagcagcaatccagaaggtttaggtggctccttcagcaaaaagtcatcagttgataatgcaccagaacaaaaggtgttgctattatgcggtccacctgggctcggaaagaccacactcgctcatgttgcagtcagacattgtggctaccatgttgtggagattaatgccagtgacgatcgttccgcttcatccattgaaacaaaaattcttgatgtagttcagatgaactcgatcatgtcggattcaaagcccaagtgtctggtaattgatgaaattgatggagcactcggtgatggaaaaggtgcagtggaggtcatcttgaagatgatcaatgctgaaaagagtaataattccgacaagagcactaatggtgaggaaactcaagcccgaaagacatctaggaaaagtcatagaacagcaaaactactgaggcctgtaatttgtatatgcaatgacatttatgctccagccctgagacaactgcgccaagtagccaaggttcatgtgtttgtgcagccgacaattagccgtgtggtgaacaggctcaagtatatatgcaaaaatgaaggtttcaaggctagttcaatcgcgctttctgcattagcggagtacactgaatgtgacatccgttcatgcctaaacacacttcagtttttgaacaagaaaagagtggccctaaacattacagcgattgattcacaagtaattggacagaaagataagtcaaaaagcatcctcgatgtttggaagcaggttttgcaaaagaaaagactcaagcgggctggaaaggctgaaagccttttcaatgaagacaaggacatagactttcttttcacgctcatatctaaccgtggcgattatgaagttactatggacgggatccatgaaaatttcttgagattatcgtatcatgacccgatgttgcaaaaaactgtaaaatgtctcgatatacttggagtttcagattccttgacccaatatgtttaccggactcagcagatgccacttcatgcatatcaacctccaattgctatcactataagccgcatggttgctcaagttgagaagcctaatattaattggccaaaagctttgcagaggtctcgagcattgcttttagaaaagaaagacatgttgaaaacctggcaaaaccaaatgtcaccatttgtttcaaggcacctctcagtagaatcattcgttgaagacactgcttctccccttttacatattctctctccactgagtttgagacctgtagcactgaatttgctgtcagagagagaaaaggatgaacttgtgcaattagttgatactatggtctcctattcagttacatacagaaacacaaagtttgtccctcaagaaaaggcaaacctatctgtagtgccgcatgaagtttcatcactctctctttatcctccaattaatgatgtcataaattttgagggctatcaatcagagcacattggactgtctttagccatgaaacaggttttggtgcatgaggtggagaagcaaaagatcattaaagatagcgctggcaaattgttgaaccaatctaatgatggaaatatgaagagcgaagctttatcaactataaggaagaaaacagtagctaattccatccgtccagctttacattcttccaaggatagttccaagtgcaattcatctacacttgaaatgcagtcaaactcagcctctattgtgaatgataacgattctatatctgccaaaaaacactccagccgtgcagcaaatttctttgacagatttaggaaggaaagaccagtagacgcaaaaactcatagtgatgtggggctgcaaagagcaacacttcagagggattcacgccctctgatcttcaaatataatgagggtttcacaaatgctgtgaaaagaccagtgagagttagggatcttctgctcagctaggcccgcttggtcgaactcagcaacccgccctgctgtttgattgtctgtatcttccgttgccgttgagctaggacgacctcatgcaaatagtggtctggagccaggctcaggagggaagactattttggccgtatgaactcagcctggctggacacagaaaccaagatatagttttaattagttttcttgttacatctcttgattaatgcatcaaattaagaaactgattttacttttgtgtttctgatatttgtatgaacaaaactagatctcacttctctacagcaacaacagctgctctggatcaagaaatcgtctgtggacagcagataggcc

SEQ ID NO: 26417 - DNA, 2548 bp, Zea Mays
attgttgacagttagccatatgaaaaatctgcactgcaatggcacccaattttttctccaaggcgaataattaatatttccctcaaagtaagtttcatatgtcgattcactgctatagatctcatcttgagaaaacttccaacgatgctgatctggtaccccatgctgaaggacaatgccacatacttggtcccgaatgaggatattccgtcaggacctgtactataatgctcccctgatgtcatccacccatctcctatagacaagggcctcagccaccgtcctattttttgtagctctttttaggattgttttcagcgggctaggcttgcctcggtttatcccttcccaaggcctcactcatgtgagagcctccggcactgggtctgtcaccttcagcaggttaggcgtcatttcagcaatggtcttcccattcagccacctgtcagtccgaattccaaaattgagttgattcaccatttcctacagaggtgacaacagcctaatcaaacaatacccgggtgttttgaggtacttcaattgttaaaccggccggcccaaggccttgtaggatcagtttatgtgcccaaagccatctagtttgcagggcccatccgaaaatttccagatcatgaatggccagacactacattttagtgggcgctgcacctttgcccaggacactaggcacttgcccccattggcttgcttccgccccttccaaaggaagcctcggtgcaatttgtccaattccttgttggcccattttggtagattggcaatcctgagatgaattggagaggctgccaagactaggggtggtaatggatcgtgatccaaatgattcttcataaaatggtagagctctaaataattttttagttaaaaaatgaatagaaatatggcccgatcctaatccgatctgatccttaaatcttatagtgcaaaatttagagcccattgtcacccctagtcaagaccacctcaacgagaattagacgcccaactttattcattagagaagctttccagcctgaaagatgatctgccactttatcaatcatgaactcagcaccttctttataggctttcggaatccaagatattatgacacttggtgtacaaatctgttgctttctccccatagagataaaccttgtcgttatcctgctcctttagaaataagactacataagttcagatcctggtataaagttaaagttatcaagctaaacagtgtgatccttatatgatctattttatatttatatatcttgacataaactagttagatatatatgtcagggttgatctcatctgactcggtcaaggggatcgagctagactcttatctcgcgtcctgatcgcaggcgcaacaaccttatggttacgaccctttcacgtcgcatatataaatacagggagagagaatcggcacgataaccaacgtttgtcgtagcctcctcttcccaacataccatgagatccgatcttctcctaagcacagttagtgaagtaaaggccgctgccgctacctcaccgttttgagttgagagtcatcaacctaatgatgtcgtcctccgatcccaaaggttcactatttttggcctgccacttctgatgctcgcagcatgtatgaggctatgtggcatgacataactgaccaatcaggagaaaatattgtttctgtcaccattcctgtaatgtttgggaggtctattgagattcctcaaagctgtaatggtgtcgcaaggtttgacttcgagtatctatgtggtcgcccagtcggagcagcagattatatagcaatagctaggaactaccatacaattttcatatcagaaattccagcgatgagtatgaagatccgtgacaaggcaagaaggtttatcactcttatcgatgagttgtacaaccaccactgccgccttatatgcctagctgcctcatccattgatgatctttttcaaggaactgaggaaggacctctttttgatttagagagttttcagtttgaaaccgagtccgaagggacaaagctgaggagggatgttttggcggaaggcaatgctggctcaggaccatctactaccggccttgtggcgatattgtctggtcaagaagagatgtttgcgttccgcagggcgatatcacggcttatcgagatgcagaccccgctgtatctggagcgtgtgctggctgtacatccctcgttccgtcgtcctggtcttgcaagaaataacaggcctgcagttcctcagcctgctccggcggtttgaggtttgacagcctcgcgctgtaccattgctttatttcgagtttcgtgtgacaaggcaataaaaccaaccagagatggtaacagtgagacattgtaaatgattgtagaaaggttgtgattattaataagttaaaatttactattttaaacttcaacaggttacacatactatctgtcatttcatcttatattttaaactttactctacgaacggtacagtctaccatttaaaactatgttttggatgactatatggataacctggtggac

SEQ ID NO: 26418 - DNA, 1375 bp, Zea Mays
  misc_feature (1374)..(1375): n is a, c, g, or t
gttccccatcgcgacccttgcaccgggtccacgctgaccctcttcacgggggcggcgaaagatctcagccgcgacgggttcgagcgccggcgagcgctcgcccacctgggcctataaactggccccggctcctcttctcgcgtcgcagagcccagcctcgggatgacgtggcgtatcgcgacaccgccacagctcactcaaccgcgcgggtctccaacgaaccccttgtagaagcttccaaaccctagcgcaggaggaagaggagcgtggaggagctccaggaatggcgaaggcgaggaagcagaagggtgacggtagcggtacgggcggaggcgccaccgttctccaccagaaactctgcctctccatcgacatggagaaccagctgatctacgggtacactgagataaaagctcttctagctgaaaacgacacatttgctctacatgctgacaatatgacgatcaggagcattctggtggatggtgaaactgttgagttcgactattcccctcattggaaaaatgaaactgatcaacctaattggtcttcaatatcatgtttgaacactgttgctgatgctgcatgttcaacatatacttcgtctctaaatcgagaagctacaccaaatcttattgtgtcatctgagagatcaatcaagtcaatgattgagcagcagttagatgaaaacagtgaaaaatatgaagaaaatagtggaaggcttgaaaaacatggtggaaagaccatccaaacttcctatgatcaaattgttaatggctgcaatggttctgcagtggaagagggaatagaaaattctgcagtggaagaagggaaaaaaaaggaaaaggaaaaagagaaggaagagaaaaatggaaatgagaagagcaaggaaaatggaaatgagactgaaaatgaaaaggtgaagaacataaaactggttcacatagattatattttggagaaggctgaaactggcattcactttgttggcaatgtcatgcatagcagtaatcagataaggcgggcacactgttggtttccttgtgttgatactgccacacaacgctgtccatttgacttagaatttacagtcagcacagatttcatcgctgtcagcaacggtgacttgctttaccagttagtgcacagtggatatccttggttgttggtccacttgaaattctccttgacagaaatgacataaatgtgtcacacatctgtttatctcctgccttgtcaaagcttcagaacactattgcatttttccacgatgcatacagctgttatgaagactatcttgctgcaccgtttcccttaggtttatacaagcagatttttcttccatctgaaatgacagtattaccggcaagcttnn

SEQ ID NO: 26419 - DNA, 1559 bp, Zea Mays
ccggtcttcgattgcacgtgttacaaaagattatctcggcgttcttaatgaagattcattgcggaagaactttattttggtgtatgaattgcttgatgaagtcattgactttggatacccacagacaacctctactgaagttctcaagtcgtacatattcaatgaacccattatggttgatgctggaaggctgccaccgcttggtcctgctgctatgttcatgcaaggcacgaagcgtatgcctggtacagctgttacaaaatctgttgttgctactgagcctggggggaagaagagggaggaaatttttgttgatatcattgagagaattagtgtaacattcagctcgagtggctatatacttacatctgagattgatggaacaattcaaatgaaaagttacctcactggcaatccggaaatccgtcttgctctcaatgaggatttgagcatcggaagaactggatcttcttcatacgattacagaagttcttctggaggaggaacagtcattcttgatgattgcaatttccatgagtcagtacatctggacagttttgatattgacagaactttgactttaataccgcccgatggagaatttcctgtaatgaactaccgtatgacccaagaatttaagccaccattccgtgtaaccgcactaattgaagaagctggaccagcgagggctgaagttctactgaaaataagagctgacttctccgcgagtgccactgctaacacaatcgtagtacaaatgccagtgcctgcatacacaatgagagcgagttttgagttggaagctggagcagttggacagacaaccgattttaaggaaggatccaggagacttgagtggaatctaaagaagattgttggtggttctgagcacaccctccgtgcaaagctgacattttctcaggagtcacatgggaatatcacaaaggaagctggcccagtgaacatgaatttcactataccgatgtacaatgcatcaaagttgcaggtcaggtatcttcagatcgcaaagaaatcgaaggcatacaacccttatagatgggtgcgatacgttacacaagccaactcctacgtagctcgtctatgaggaatcagcatctgtactcttgtttccagtccattttttttgggtgtaatatttgagcgttatcatggacatagtggcgtgtattgtgtaactgtatattgaggttcgcataccgctcagctcctgtagtaacaattgtttttcgtcgtgcaatgtgcagatgaataattcatgttctaatgctgcaaaactgattgaggcgagtacctattgtcttgcataattcctgcgaggttttagaaactgtgaactgacctcgcctgtgggacattgggtcctattgtttcgcataatttctgcaaggttctagaaactatgaactgagctttggccagtaaagctctttgtattaaagtaataatgtattttcagttgagttcaggtactcatgtattcccgttttttttccccaaaaggatatttggtatgagtttttctttctgcagtttggtag

SEQ ID NO: 26420 - DNA, 2047 bp, Zea Mays
gactgcagaactgaacatcccaacccaagtcccgaaccctccctcaccactcccccgatctccgccactccaaaatgtggcgccgccaccacctcctccggctacttccgcctccggccaccgccgctaccgccgcggccccttcccacttcctgcgctacctctctacctcaagcaccccgaccccggccgcctccctggcctcgtccctcgcgtcggcgctcactgcgctctccacgaccccgccccccgccaccaccccggacgcttacttctccctccacttctccgacgtgcggcctaccaacgcgctcctcgccgaggcgctcgcgctctccccgcccgccacctcccgcgccgctgccgatctcttccgcttcctcgtccgccgccgctcgctccacccctccgacggcgcgctcgcgcccatcgttcgccacctcgcccgccgccgcgacttccccgccgtgcgcgcgctcatccaggagtttccaaccgctctcgggcccaccacgctcgacgcctatctccagcagctcaccagagccgggcgcccaacggacgctgtcaaggtgttcgacgaattgccggagcagctccgtaaccgcgaggctctcactttgctggtctcctcgctttcttccgagggattcccctcgcacgcagagcgagctgccaagaaggtcgccagtgagatcttcccagatgataatatctgcactttgcttgtatctggttatgccaatgctggtaagctcgaccatgcgctaaggttgattggtgagacacgtagaggtgggttccatccaggattggatgcgtataatgctgttcttgattgtgtctgccggctctgtcgcaagaaggatccactgaggatgccaatagaagcggagaagttcttagttgacatggaagcaaatgggattcctcgtgatgcaggcacatttcgggttctgatcacaaatttttgcaagatccgcaagacaggggatgccatgaatctgttccagcgtatgggtgagtggggctgctcaccggatgctgacacgtacttggtgctcattaggagcttgtaccaagctgcccgaacttcagagggggatgaaatgataacgtggatgcggtctgcaggatttggagataaacttgataggaaggcatattatggattcatcaagattttatgtgggattgagagggttgagcatgctgtcaaggtattccgtatgatgaaaggttatgggcatgctcctggagtaaaatcatataccttgctcattgagaagctggccagacacaatttaggggatcgttctaatgcacttttcagggaggcagttgcacgtggtgtacctgtggcacaaggagagtacaatgttgacaaaaggtatgtcaagacaaagaaggagaagacggtgaagaagaggctgactttgccagagaagatgagattgaagagcaagaggttatacaagctcagaatgagctttgtcaagaagcccaagcgtcgaatgctccgggtttaagcataattttggtttggttggagcggatgatcatgggagcggacaccaccagatccagttatactccctccgtttctttttattagtcgctggatagtgtaattttacactatccagcgactaataaaaagaaacggagggagtatctcggaagatcagaaaattatagtcccttaactgtgcctgcccttctgagtgactatgcaacatcatttttcgaaggcgagagctcttttctactttcacacgtcatcagcacttgcttttacaaaagagagcaaagaccaaaacaagaagaccgaaggcaagaagttcttcatcaaagaaaaaaacagtcggattatgcgaaagtcaatccaatagaggaagaattatgccttgtagacagtggtaccaccaactctattcttctggaaacaaaatatttctaaactctcacaaagaggtcaggaaatattttgacaatcgccgggcgcgatgcgaaaatagttggctctggacgagcgactattacgctc

SEQ ID NO: 26421 - DNA, 1045 bp, Zea Mays
tttctttccaccgccgtctgattttttccccgtcgtagcttctctcgtgcagtacaaaaaaaatcttgccacgcgcttatctcctccgctcgctcggccgccttcgctcatctccctcttcttcctcgtggtgctctcctggccacagcacagctcgtccctgcgcgcccgtgtttcctgctccctggatgctcgccgagctctccttctccctgtcttggtcctgctcgtcgcgcccagccgctctcctttcttcaccagcgtcgcgacccccagctccctctgctcggatctctagctctgttccgagcgcgcgcgtctctggctcaacttagagctcattctgccgcgatctcatcccggctctgcgctggtccggcgtcctgctccctgctgcgttcacctcggcatcgtcccgtcgtcgtcttccaatttcagcagctcggcctctacttgtgcatctccctccgctacctcgccagcgagcctggtctcagctccgccgttcgactatggatgcgtgaatccgcacctcaaactccctgtgtcgcgttctgttcgcctaaaccacagttcgctagtcgtctctgatcgcccgtgcgccctctcggctcgctcgactttaatccccaatcgcgtcgctgatcttgtcgttcgtcgtcgttcgtcgtcacgtcgttcgccatcatgcctcactgccattcctgctgtgcgtcgcttccgatgtgttcgattaaatgtcggacgaagaatccaagatgtcgctcctcctcgttgtgaaatcctcacgctcaccattctctattcgatctcgtcgtccagctgaaggccgtcgtcgttcaggcaactaccaaatcgagttgtgatgtggtacgcttattaatcacgcgatgcggaagacaagccaagtcgaccccaagcgcgggctaacccgcaggatgatgttgatggacggaaccgaagatggataatctggcgaatgtcaagacagaagatgatcgccaagtggacatcatctaacaacactaacctagtgttacccagg

SEQ ID NO: 26422 - DNA, 1467 bp, Zea Mays
tctcctccctccgcgtccggctcccggttccgttccgcttccgcgatggggcagcaagagggccacagcaacccccaccccgacgaggcggcgctcccgacgaccaccgccgcaccgtcgccgtcgccgtcgccgtcgccgtcgccgtcctcgtccaggctctacacggcgtggctggtggcgtcgtgcacgcctcgccccgcccccgcagcagctcctccccgcgctcccaccgccagctcgctcgcgtcgcgctcctcggcgccgtcttctgcgcgtccgtcgtcgccgggaacgtctcgctccgccacctccccgtctccttcaaccaggccgtcggcgccaccacgcctttcttcaccgcgctcctcgcctacgccgtcgccgcccgccgcgaggcctgcgccacctacgccgcgctcgtccccgtcgtcgccggcgtcgccatcgccaccgggggcgagccgagcttccacctcttcggattcgtcatgtgcgtggccgccacggtggggcgcgcgctcaagaccgtgctgcagggcatcctgctatcgtccgaggaggagaagatggactccatggacctcctccgctacatggcgccggtggccgtgctgctgctggtaccggcgacgctggccatggagcgggacgcgttcggcgtggtggcgggcctcgcgcgggaggaccccagcttcctctggctcctgctctgcaactcctgcctcgcctacttcgtcaacctcaccaacttcctcgtcacaaagcacaccagcccgctcactctccaggtcctcgggaacgccaaaggcgccgtcgccgtcgtcgtctccatcctcatcttcaggaaccccgtcacggtcgtgggcatgctgggctacggggtcacggtcgctggcgtcgtcttgtacggcgaggccaagaagaggagcaagtgaagcgacggacaggctcctgtacctgtacatttgctgtccggccttggaatgcaacgccggcggtgatagctagggagaagacaagcaagcaaagcgacagctggggtggtttgttcgtcgcatcgtttcagaaggaggtgaaccatacaatacaagaactcgtgtcgtagcacagagagagagagtgtgtgtcgtttagcatttgaacgagcttgccgtccaaagcctacgattttaatccggcctggagaagaagaaaaaaaacgaagctagctaattatcaaaccaacacctagcatctgaacatatgtgcagcaatccaactgggtttccatattttaatgttgtcgatgaattggtccttcctaaacaacatttccgtttgaacatttacgaagagccaaagccaacggactgcattgttcactgaaatgttttttatagtgtacactttcatccacctttttccttaattactaaattaacggcgtcaccacaagttaagagtgagatgctaaaagagatgcca

SEQ ID NO: 26423 - DNA, 2936 bp, Zea Mays
gccaagccgaggccgaccgactgcaaggattctcctgtgttcaatttcatcaacaatctctcgcctataccaccacctaaacctttagactcagcacataatgtgcagctattcaagtcatcagatttggcacctgtttcttcgatctttgcctcaccacatgttaatccaacaaagggaactaaagttctgatcagggacgaatctgttcagcttcctcatgaattgcactcacctagcagtgtcagaactcggataggcacctcaggctcttttagaatgatcagatgcaaagacattgtgccagagaattgtaatatcacttgtcaactaaacgaggcatctattgattcttcagatcatacatcaagctctacaggccaattgactcaatccataaaagatgctgctggcagtatggaaagcgataaggatcaatgcgctggtggtaaaatagaccttaccatgtcccaggagtgcacaggcctagaaggtatgaaccttgatgagagtagcccagacagaatggattcatcacattctgggatagttgttcatgaaaaccagctatctgaacaaaacaatgatgaacctgcggcatataatggggtttacatgattacacaccaatcaagtagtgatatgctgactttagccgtaccatctggaacagaagcacaaccaatgaatgatacacaaaaggctgataatccctacccttgtgaatccttgttggatgttcagtcaagtggaaattgcacccaaaattctgtgcatgaaccccatctgtactggaacggggcagttgaaggggctgcagtagcttatactccccaagcacttcctggtgctttgcaaagtcagttgatgccatgtaacaagctcaatgagccaaaagattacatgcctactgagcaaaatgctttgtcacagcatttacgtggcatgcgtaggcgcagccttttcaatgaaaaggctgggcttagtaataaaggtgtagacaaagcttcagatcatcatcctgtaaattcaactacccccaaatgcaaaaccatttctggtgacaactcaaagactctaagaacccccccatgtgcattgcctggtattggcttgcacttgaatgcccttgccgcaactgcaacacctaaagagaaaatagtccctcaagacattcagtctactataaatgaatcaagtaacttgataggccctgctggatcttctccggcaccttctgagcaaaacattataaatgatgatttcactcaaacaactgatgttgcaaccgctgaagcttctagtcagggtagtcccaagaagaaaaggcataagtttgatagtggtgatggcacttcatgcaagcgttgtagttgtaagaagtccaaatgcctgaaactttactgtgagtgttttgctgctggagtctattgttctgagccttgttcgtgtatcggctgtatgaacaaccagagtcatacggaaactgttctatctacgcggcaacagattgaatctcgcaatccattagcatttgctcctaaagtaattcatacatctgagcctggtctggaactaagggacttctccaataaaactcctgcttcagctcgtcacaaaaggggatgcaattgcaagaagtcgtcatgtctaaaaaaatactgtgaatgttttcagggtggtgtgggatgctccataagttgcagatgcgagggctgtaagaatgcttttggaaaacgggagggggctgccgtgttaagcatagaggaacctaagcagggattggaagaaaaggatgtttgtgtgaaagaagagaaaagtgaaatcgagaaacagcttgttgtctaccaaactcctgatgatgctcctgctgaaaatgtactgaccacaccttccatggtgcagtgcagacccttggcttgtcgtccacccccaagctccaagaaaagctccaaaaaaccacgatcttcaacaaaactcactggacatccttcgcggttgtgcaacttacaagctcctccgaagaccgacactatgctctccccattcgaaaactacgcggaaatggtccttggtgatagcacatcggatatcctcaagggaaattcatctcctcaaacttctgttaaagtggtgtcaccaaacaagaagcgaatctctcccctgcgaatgggtaccgggctatctccaatctgtaggagtggcaggaagctgattttaaagtccattccttctttcccttcccttggcggtgatgtaaacaatgaggatccagaaaccaagttgccagccccttgaatttaccatattttgtcactggtttatttctaccataccatctgatagtggacagccaagcgactttcctttcatcatttctatctctctcgatcaatgattatttatgtactgctataataatctgccgcgtgctggcaaaattctgcctccctagaacaaccaatggcatttggtttgctggtaaattatctcttggctccgtgtgttccctgtggctgtctgtctataatttatgttcattattttgttccggagaccgaagaatctgaggacttgtatgtatctgggatcaagatgtgaatctcgcatgtaccagatgacagaactgttaagacttatatttgtctgaggttaaactgcaagacttttatttaagctagaactttgatcactataggatatggcatgatatagcagggctcttgagatgcattctcttgtgcgtgcttggtaactgtagtcgtgcaactgttgacggcgtttgttcagaacaagtggttgatgaatttgaagatggtttagggagtgggaatgattttgtttgtgtgcgtgcgaacttgtaaaatctccgtgtatgaactggcaatgcttttatggtattgatcatctgcggtgtgttaactgagtgcaaaata

SEQ ID NO: 26424 - DNA, 4391 bp, Zea Mays
ctccccaccccaacccaaaccaaccaagccgaaagaactctcgctcgaggggtggaaaagaagcggaaggagagacgagacgagaggaaaccctcgcctccgccacacgccatggtggagactcgccggagctcggccgctgcgaagcgcccgtccccgtcgccgtcctcttcgtccgtacctcccccgaagcggcccaaggcggagtctccggggtcaccgacggcctccgcgcccgcgagagcggaggaggattccgtggcgggagcggcacccgcgaggagcgacggctcggccgacgacgcggcggcggcggttgcacagaaagatcaaggagcggataagccttcttccgccgcggccgagagttcaaagaggagaaaggagccggagcaacagcaacccgcagcgccatgggcaaagctgctctcgcagtgctcacagactcctcactatcccatcattgccgctcagttttctgttggtcaaagcaaaaactgtaatttgtggctgaaagaccagcctgttagcaaggtgctttgcaagctgcggcgccttgagcatggaggtccatgtgagttagaagttcttggaaagaagggtatggtccaattaaatggaaggtccataagttcaggcacaaaagttccccttacaggaggggatgaagtcatattcaattcatgcggcaagcatgcttatatttttcagcatcctttgagtgacaaagctcctaaaacggtgccatcatctgctgttagtcttatagaacctccggttgctagcgtaaagcgcatccgtacagataagagaacaggagacacttctgctattgctggtacagagatgttgccatctacatctaatcaggcaaaggatgtagcagcagcacctcccgcgttcgccggagagaacagccaaagagtaatgctgccaatggcatcatctgcgtctgataaatcaaaagggcacactgtgagccctgataaggaatttgagaatggggaaaatgctaatgaggttaattctaacattgaagactctccaatggatgctgctgcagcccccatatctcctgatgctgctgcgaacgatgcatgtcaacaaaatggctttttgcctgatgctcatcttggtgcggaaatcgctcttgaagatcagagggatctcatcagggatcttaacgcttcagccagtgtgcctccgagtagatgtcaagcctttaaggatgggatgaaacaaggaattattaatccaagtgatattgatgttacctttgaggattttccttattatgtcagtgagaacacaaagaatgtgctcttgtcatgtgcattcatacacttggaaaagaaggagttcatcaagcagtttgctgagatttcatcaataaaccaacgaattttgttatccggtcccgcaggttctgagatttatcaggaaacattggtaaaggcacttgcgaaacattttggtgctagacttcttgtcgtggattcacttttgctacctggggcacctttgaaggatgcagagtcccagaaagatgttgggaaggggtgataaatcaggggataagggaactgctgagaagtttgcaatatatcagaagcatcgttcttcgttggcagacactgttcagttcaggaggcccagctgctccaacttccagtgtgaatgctgatattgtgggaacatccactctgcagtctgcatctctaccgaaacaagaatcctcaacagctacatccaagagctatactttcagagaaggtgatagggtgcgttacgttggtccagctcagctatcctcattgtcacaaaggggaccaagttatggttatcgaggcagagtgatgcttgcttttgaagataatggatcctcaaaaattggagtccgatttgacaagcagatccctgatggtaatgatcttggtggtttgtgcgaggaagatcatggcttcttctgctctgctgaatcacttcgcccagacttttctgctggtgaagaagttgagaggctagctatgaccgagttaatagaggtcatttcagaagagaacaaatctggacctctgattgtgttacttaaggatgtagagaaatcattcactggagttaccgagtcactttcatctttgcggagcaaatttgaatcgcttccatctggtgttcttattataggatcccacactcagatggacagccgcaaagaaaaggcgcatcctggaggttttcttttcacaaagtttgccagtagcagccagacactttttgaccttttcccggatagctttggtagcaggtggttgcatgaaagaagcaaagaaagtccaaaggcaatgaaacatctgaataagcttttcccaaacaagatttcgattcagcttccgcaggatgaagctctacttacagattggaagcagcagttggatcgtgatgttgaaacccttaaagccaaatcaaacattggtagcattcgcacgtttctgagtcgcaatggaattgaatgcaatgatattgaagaattattcatcaaagaccaatcactgagtaatgaaaatgtggacaagattgttggatacgcagtgagttatcaccttaagcacaataaaattgaaacctccaactcgaaggataataaacttgtactcacaagtgaaagccttaagcatgggctcaacatgctgcaaagcatgcaaagtgataacaagagctcgaaaaaatcactgaaggatgttgtcacagagaatgaatttgagaaaaggcttttggtggatgttataccacctaatgacattggagttacctttgatgatattggagccttggagaatgtaaaggacacattaaaggagctggtgatgctccctttacaaagacctgaattgttctgcaaagggcagctaacaaagccttgcaagggaatattgcttttcggacctcctggcactgggaaaactatgcttgccaaagcagtagcaactgaagcaggtgctaatttcatcaatatatcaatgtcgagcattacgtcgaagtggtttggtgaaggggagaagtatgtaaaggctgttttctcactagcaagtaaaatagcccccagtgttatatttatcgatgaggtcgatagtatgctaggaaggagagaaaatccaggggagcatgaagcgatgcgcaagatgaagaatgaatttatggtaaattgggatggactgcgcactaaagataaggagcgtgtgcttgttcttggtgctacaaatagaccttttgacctggacgaggctgtgattaggaggttcccccgcaggttaatggtaaacttgcctgatgcatcaaatagagagaaaattctgaaagtaattttggcaaaagaagagctgggatcggatgttgatctcgactcacttgccaatatgactgatggttattcaggaagcgacctgaagaatctgtgtgtgaccgcagcgcattaccccattcgagaaatcctagagaaggaaaagaaggagaagagtttggctaaaacagaaggtaggccagagcccgcattgtatggaagcgagcacatccgtcctcttagcatagacgacttcaaatccgcccatgagcaggtttgcgcgagcgtttcatccgactcggcaaacatgaacgagcttctccaatggaacgacctgtacggtgaaggcgggtcgaggaagaggaaagcgctgagctacttcatgtgacggcgagagacataaaaccagaaggatcacaaccgcgccataaagccagaaggtatcgcagttgcgccatattgtacagccgccatagtacttcccccctccctggccctaaatccagccagggttttcctcctccctcctgggtagccgtggccgcctgtagtccctccctcgtgtaattagaaccgtgtaccgagtcgagttcatttacccactgtttgaggttccagagagttgagatttaaattttaagtggcgccattgcccttcctttcttcctcccctcctaagtattaactttgttgcggccattgttgtcgtgactctggccatagatccttttatgtacatgcgaaatgtaaccaagggatatggaataagaacatgttcatcctgttgtagacagcatggtggtacaggaattctttttatttttcatagttgattggtgatgaactggatcggtgccagcataagaattatgataaggtaccttttctgccgctgaattttttggtgtatgtcgatttgtcgagtggatttagtattgagatgaatgatatgacatcacatggatttttatgcgtctcatgttgttaattgtcttctaattgcgaaatgcgcatgatgcagagctgaattttgtctatttactttttacaacaa

SEQ ID NO: 26425 - DNA, 2114 bp, Zea Mays
cacatcggcagtatgtcatttgttccagcgatatatatagttatttgcagtgcaccacatacatgctgctagaatagctttctgaagttatggcgagaagaggcatgaatcctactgttagtgatcaagcaatccgcctggatctcattgccaaatcgagaggcatcgctgctgccgagaagtactttttggacctcccagaaacatccaagactcatcttacatatggcgctcttctcaattcttactgcaaagagttgatgactgagaaggccgagtcccttatggagaaaatgaaggagctcaactttgctttcactgccatgtccttcaacagcttaatgacgatgtacaccaaagtcaaccaagctgagaaggtccccagtatcattcaggacatgaaggcagatgacgtattgccagatgtctttacttataatgtttggatgagggcgcttgcagctctcaaggacataccaggggttgagagggtgattgaagagatgaaacgggatggccgtgttgctcctgattggacaacatacagcaacctggcttccatatatgttgaggctggaatgtttgagaaggcagaggctgctcttaaggagcttgagaagcggaacaccagcaatgacatcgaagcctaccagttccttattacattgtatgggcgtacacagaacttagtggaagttcaccgtgtctggcgatcgctgaagcgggataaccctagaatggcaaacatgagctaccttaacatgattcaggttttggccaacttgaaggacctgtctgctgccgaagcctgttttaaggagtgggaagcccgacacatccatccacccaagaccaacacaaagggctcgggggcagataatacacctggtgcagatccaaaatctccaagtaacccgcctaataatcagtctggcaccaaggaaaccggggacgagacagcagaggacctccagccgaagcatccaaaatatgacatccgggtagcaaacgctatgatcaaggcgtacattaccgagggcatgcttgacaaagctgtcgccatgaagaagcgtgccaagatgcgcggcggaaggctgaacgccaagacatgggagatcttcatggagcattacctcaagacgggggatctcaagatggcccattggtgcgcggaccgcgcgatgaagaaggggcacagcagcggcaggatttgggtgccgccgcccgccgtgacggagaccctgatgagctacttcgaggagaacaaggacgtcgatggggccgagcggtacgtgggggctctgaagaaggtgcagaaggatctgggcgcaccggtgttcgagccgctggtgcggacgtacgctgccgccgggaagaagttccccgggatgcggcagcggctgaagatcgagaacgtggaggtcggggaggggacggcccagctgcttgactctatctgcgccgatcaataggtggttttcttttgtcctcgccgtttgtgtttgtctcaataacagcaggaccgtttcgagcgctcggctatttgctctgcaagcgctgtgatgcctgtatgtactctgaaatccggccaacgtttctgttcttttcgacatcatcagcccaagcacgtcctagaggcggtggcagcgttggtggcggctgctatgcgatgggggcaccacctccgttgatgtattgtctggtgcgggactgcgagtgacctctgaggcgggggcggagaataactggatctacctaacgtcggaatggagacctgcaggtccatttgaaattaaacagaaggttggtaagagtgtgatggtgctcattttgcgttttagaggatccatacttgcatgtagccaaagaaactattttagtaccttttttccttgtactttttttttgtcttattgctttgcctggagctacttgaaatgctccacagttatgtcctctttttaactgagatgtcgttggcctgaacaaaggatgcttgacgcttcgaagtcacacgcaatgataaattcagtttgcagcatcgcgatgcatttggacgctcattttactccttgaaagctgatactaagtgtcacgcgatacctattacgata

SEQ ID NO: 26426 - DNA, 1890 bp, Zea Mays
gtctctgtcagccatcaactctccagtgagctgcgagcctacaaggctgtgggcagtgccagcctcaacctcgacctcccccagtcccccaccgaccaccggcctcctttcccgcaggcacgggtgcacggcacgcggtttccactcgcttcgtccgcgttcggatcgccctcagagtaacagtctagcagagcaagcatgtcgtcgtcggcggagaacgaccccacggtgacggtgaccgagcgcggaggcaaggacaagcacgaggacggcggcgacaaggagcagggcggcggcggcttcatcgacaaggtgaaggacttcatccacgacatcggcgagaagatcgaggaggtcgtcgggttcggcaagcccacggccgacgtgtgcggcatccacatcccgcacatcagcctccaccgcgccgacctcgtcgtggacgtgctcatcaagaacccgaacccggtcccgatcccgctcgtggacatcgactacctcatcgacagcgacggccgcaagctggtgtcgggcctcatcccggacgccggcaccatccacgcgcacggccaggagaccgtcaagatcccggtgtcgctcgtcttcgacgacatcaagagcacctacaaggacatccagccgggcagcatcatcccctacctcgtccgcgtcgtgctcctcgtcgacatccccatcccttacaagcccgacgtcgacgtggagaagatcaagttccaccacttctccttcgaggagaccaccgccacgctccacctcaagctcgagaacaagaacgacttcgacctcggcctcaacctgctcgagtacgagatgtggctcggcgacgacagcatcgcctccgccgagctcacacagaccgccaagatcgagaagcaggggatcaccaggatgcaggtgcccttcagcttcaggcccaaggacttcggatccgctgtctgggacatgatcagggggaggggcacgggatacaccatcaagggaaagatcgatgtcgacactcccttcggcaacatgaagctgcccataagcaaagagggtggaaccacccgcctcaagaaggaggaggaggaggacgacgacgatgacaactgaagtgaggactgctggggggcgctgctgttacctttcacgaaacgcagcgaagcagaagatgcggggatcgtcgtcgacctgatacccacacccttagcgctggttaagctcttgcctttagcttatggtgctctgttgttttgcattgtctgaacatcctctcacttcctgagtgtacgttcagtttgaggtttcctgtgttgtccatctgaattctttcaaactttgcggttggaactggatgaagaataaaattccaacccgccctggttcttttgtgggtctgtttggaatagatgctgcctgccaatgatcctgaaataagctttactgaaaggctttatccatccagattccagaagctcacggcctcgcgggctcaacctcaaaccaagagtgtaatccgcctgttgcatcacatcaacaagttaacacattggatgtcattagatttgtatatgaactgtaggtcattttacctcgcatatctatccaatagaggggcatatgctaggctccatccttctgttgtctaaaccaaaggaagcagcacacaacaactacagctagggatgttgctcgacgacgactgccaaaatcattctccatggtctatcagaaggtagcaaaatagttgtgttaataacatggtcttgctcttcaattaggtgcattttatgttattagtaccacatgttgttgcatcgtgagatgatcctccagtggtaaaatatgcctgttatgtgatcattgaccaagatatgttgctcagaaaatgtt

SEQ ID NO: 26427 - DNA, 1876 bp, Zea Mays
ccgctccgccgccggcactcaccccagctgcactcccgtgggccgtgccgccgtggcacgccggcgcggcggatgcagtcgccacgaatcaggacaagcagcaggcgccaaaacccaaaccaattccctcccttccgttcctactacgatacccacctcgacgcgccgtctcgccggcgacgtcactggcaagtaccaaactgcccctacctcctcccgcttagttctataaatacgggggggtcgtcttcctccacaagattctgccaaaagatcctctcggatgcccccgcccccgcccacccatttcgccagtcgccatcgagctctcgcttccgccgcccgctgccgctctatcaccccggtgctgagccctaggatgtgactggcggacgtctctatggccgagccgtaggtggaggcggcacctcggcgccgtgggagatggaggacgatgacaccgagggtgtaggcgagagcacctgtccccccgccgccgaccgaggaggctcctcctcggccggcggcggcggcggcgactcgcacagttacactgacatagagaaggaggtcttcgaccgtctcatggagaagagaatcccggaggtcgtcgcggacccggtggccttccgcgaagagctccgccgccacttcgagcgcctgccgctgagctacgccgtcgatgtgaacgtcgacaaggcggaggacgtgctgctgcaccggaggattctcaacgagtgcgctcaccctgaaaatcgccccatcttccatgtgggcttcctgaactgcatcccgccctcggtggatccacagtataacactcagtccatctctacgagcgaaaacggtaattgtgggggttctcaggattccactttgagaaaatttgagccatgcgaagggatcgaggacctcagtttaactggacaaaaagttgtggttgactctgtggccagttcttcgaggggagatgaagaaatcctccatgttcatgaaattattttttctaccattgacaaaccaaagctcctcgctcagctatctgctttgttgtctgaagttggactgaacatccgtgaagctcatgtcttctcaacgactgatggcttttgtttggatgtatttgttgttgatggctgggatacaaaggagacagatactttgctacagattctcaaggagacagcggcacgaaatcatgcctcattatcaaacccaaccaattctgcagcctcagaaagagtactggaactacaagagaagattggtgattcaaatattgacaggaattttctgcagattggggagaagattgcatctggatcttccggggacttgcatcgaggaacttatcaaggtatggatgttgcagtaaagttcctcagaaccgaacatgttaatgactcgtcaaaggtggagtttttacaagaaataattattctaaagagtgttaatcatgataatgttgttcgattctacggggcatgcacaaagcagagaaaatatgtcatcgtgacagagtatatgcctggaggcaatctgtatgattttcttcacacgctaaaaaatactttggatctcccaacggttctcaggattgctatcggcatctccaaggggatggattatttgcaccaaaataacatcatccatcgggacttgaagactgccaatttgcttatgggctctgattatgttgtgaagattgcagactttggagtctcaaggaatccatctcaaggtggagacatgactgctgaaactggtacctacagatggatggcacctgaggtaataaaccataagccgtacgatcacagggcagatatcttcagctttgctgtggttctgtgggagctggtcacttcaaaggtaa

SEQ ID NO: 26428 - DNA, 417 bp, Zea Mays
ccgctactttctaccagcatatagagtccctccgctagtgtcttgctttttccctcagcctggtggcaggagctcctttctcctccttactctgtcatctccgtccgttccttttcttcgttccctgatttccttgccacctgtgcaccggatccatcttgggattgctctgcctgtaaggcgagattgcgagaagatggggcagacaaggaaggaggtcgtattggcgctggactctaggttcacaagcatgatgacggaccaaagaagctcgagaactccatgctgcattgctatctcaaccaagaggacttggtggaggaaggaaaggaggaagagaagaaggagaaactgagtaacatgtttgtcctgattaccgtaaaaaacagatattgaagggttggaatcaacctaaag

SEQ ID NO: 26429 - DNA, 1636 bp, Zea Mays
aaacgaaaagggaaaaaaccccaaaacctagctcctactcggcctgtcggcttaccagtgttccttgctgattaattggtaactcgccttgataagtcggtctacgatgttgattagtcggtcctaaccgatggaacgactgggaggcccacgcccacaccatcccctcgcactgctgctcctactaggctactactacgccgcagccgcacaggcagacgcgtcgattcaaccacactgctgccagtctgccacaactatttactgccgccccctcatcaccgccacgggcccggcgagcaagcgccagccaggggagggaagccgaggcctaggacaggaggccatgtcaggggaccgctcgtccacggcagagcgccggcgggggatccggcgcctcctcctgcatccgcgcggcgaggcctcctcgcctccgcctccgccgccagcgccggcgccggaggaggggagaaggaaggggttcgcctcggcggcgctgcgcggcctgggctgcacgtcggcggcggcgtccaaggcgtacgcgcccggagcggccgcggcggcggccttgcggtcgtcggcggactggcacgggcggcggcggaggaggggcaaggacaggaggaaggagcgtggcggcggcggagcgggagcgggcggaggcctcgtcaccggtgggatcggcgccgatgtgtggtgcgcacccgggatacccttcgccgcggaggcgtcctcggtggactgcgtggtggcgcggcaccagacggtggggaggggcggccgcggcgccgagggggagaggtcccacagagagaggccgtgcatgtcccggagggcgaccgtgcaggagcagatatcctcgcccttcatggactcgccgccgccgcacctcgacgcccccttcttcggggccgatctgatcccctccggccgcctccgtcggatgcgcgggtaccgctactcccccggaggcctcgaggaagagataatgatgtttcagacaagagttttactgggaggaatgaacatgtacgatcgctaccaggattggcgccttgatgtagataacatgacatacgaggagttggtcgagcttggagacagaattggatacgtcaacacagggctacgtgaggacgagattgctcgcagccttaggaaggccaagcacccatccttcggttccttgcgattcgcagcagaagtggaaaggaaatgcactatttgccaagaagaatttcagtcaaatgaagagatgggaaggctagtctgtggccatagctaccatgtgttgtgcatcaagcagtggctctctcagaagaacacttgcccggtttgcaaaactgccgtcagcaagaattgaaatgcaaactccaggcacgctgtctgcatgcctaaggtgaaatcaatgtgaaattggcaaattatgttgtcgtgtacagcccgtcatatataatattagggggtgtttgggagtgaagttttttcacagttttggaagaatactgcagtattcttaaatactgcagtattatatacagaatggtgtttggcaagctggctaaaatctatgttttcaaaactgtagtattacaaatactatagttgttttaaggtattctaaacttaggtctgg

SEQ ID NO: 26430 - DNA, 671 bp, Zea Mays
cttgacacgtgaagcagggtggaactggaagagtcaggtttgaacctcgaagtgggcagctcctcgctgtggcagctggaagcatggtgaacatttttgatgttgaaaagcaatccagcttaccctgccctccaaagggtcacaatagtgaggtaaactttgtgtcctgggatgaaaatggtgaatatctggcatctgtaagtcaggacactgtgaaagtgtggtcggtatcgtctggtgtgtgcattcatgagttacgatccaatggaaaccaatatcagtcatgcacattccatcctagatacccgaaagtgttgattgttggtggttatcagactctggagctgtggagcttatcagataaccagagaatcccaatccaggcgcacgaagggttgatagctgcactggcgcactccccgttcactggaatgattgcctctgccagtcatgacagatgtgtaaagctctggaagtagctatatatagaggcggagacgtgagatggatatacttttcaagggtgattggaccctgtgaggtggatggatgtagggtcggttgtacatgatatattgttgagctgatgattgggctgtatctgcgcctataccattatataacccaccggtttaaatttcgctgaacccatccaaccaaaccacgcccac

SEQ ID NO: 26431 - DNA, 1286 bp, Zea Mays
tccaatccggtcttgcactatttccgtcctcctccccttcctttcaatcctgctggttgcagcccctccttttcttcgattttgcagttcaacggcgaccggctgaccgccatctgccgggattggtccggtgtggaccctcttgccatctctggcgctgctgcagggcgcccaaccagcagccagggcccactggtggggcacccgtgtgagtgctgtacgccattttttgcaatggaggagggtcacgtgcgtcagacgggcgcgtgagggcggaccgacgacgaaggaattttctcccttacgtacttaatagtagtacagatggtctggtctccatgtatttcttgagaactaggactttttgccggtttaattagtttgtgatcctataccagtgaaaactagtcactttactggatcatgtttggtactgatctttttagatcaagaagtatttatttcctggttgagttgcatggttaaacctccaacctggagtttgtagatctttacccccctaggcccctactctagtcatttcatggctacaagcagtcacctttaatatccaactagtttatatgtgcaagttagtttagcgtaatttaatgtcttaatatgctctgtatctctgctacagcaatctggccctgttactttatatgtaaagcatattgtatccaggaattttttgtacatccttttgtagcagtgtcatatggttaagaaccactcacaatgagggatacatgattaatcaagtatgaatttaatggataattcgcagaagttatgaaagctgttttttatgctgggataccttcttattgacttagttaggttcatgttaagcttttttgattcaacactgtggctgtgatgtttcacttgttttacatagccttgaaacacgtgggaaacattttgaatgtgcgcttaaaatttaatgtacaatttatcagtatatttttaacggagacaattctatgcttttataaaaaacattttattagtatgttatgatcgtgacttttgattttcatgtttcattaaggtcaataagtttcccttagccttagcatgctgagatttttaaatggctttgtgctattatgtcagcattgcaaagttcactgactattgactgtatgttacatatgtaggcacgttcaagcttaccttgcagtttacagaagattacccaaacaagccaccaactgttcgatttgtctctaggatgtttcatccaaataaaagtggtgtaacattttattattaatgca

SEQ ID NO: 26432 - DNA, 2310 bp, Zea Mays
tggccccggcccattttaaggcgtttcctctccggcgcagagcgggtagcgggacgaactcgtcactggtgtgggccgtggctgtacgccgcagagtgaagcgagacgagacgacgatgcgcaagtgggcgctctcctccgcgctcctccttctcttcctcctcaccaccctccccgacccagctaagaagctacaggtgaatgcggaagagagcagcgatgacttagctaacccacccaaggtagaggagaagcttggtgctgtccctcatggcctgtccaccgactctgaggttgcccagagggaagctgagtctatctctaggaagactcttaggagctccgccgagaagtttgagttccaggctgaggtgtccagactcatggacatcatcatcaactcactctacagcaacaaggatatcttcctgagggagctcatatccaatgcctctgatgcattggataagatcaggttcctttcccttactgataaggaagttctgggtgaaggtgacactgcaaagcttgagattcagattaagttggacaaagagaagaaaatcctctccattcgggataggggtattggtatgaccaaggaggatcttattaataaccttggaaccattgctaagtctggcacttcagcttttgtcgaaaagatgcagtctggaggtgacctcaatcttattggacagtttggtgttggcttctactcggtgtacttggttgctgactatgtcgaagtggtcagcaagcacaatgatgataaacaatatgtttgggaatcaaaagctgatggatcgtttgctatctccgaggatacatggaatgaaccccttggccgtggaaccgagataagattacatctgcgagatgaggccaaggagtacttggaagaggataagcttaaggatttggttaagaagtactctgagttcatcaacttccctatctatttgtggtcaaccaaggaggttgatgttgaagtgccagctgatgaggatgagacaagtgaagaagaggattcgtccccagaaactacagaagaagagacagaagaagatgaagagaaagagaaaaagcctaagacgaagacgataaaggagactacttctgaatgggaacttctgaatgatatgaaggctgtatggcttcgcagcccgaaggaggttactgatgaggaatactcgaagttttaccactcactagccaaggacttcggtgatgacaagcctatgggttggagccacttcactgctgaaggagatgttgagttcaaagctttgctcttcattccaccgaaggctccgcatgatctctatgagagttactacaacagcaacaagtcaaacctcaagttgtatgttagaagagtgttcatctctgatgaatttgatgaccttcttccgaagtatctcagctttttgaggggtattgttgactcagacacactgccgctgaatgtgtcacgagaaatgctccaacaacatagcagtctgaagactatcaagaagaagctgatccgcaaagctcttgacatgattaggaaacttgctgaagaagaccctgatgagtacagcaacaaggataagacagatgaagagaaaaatgagatggaggagaagaagggccagtacgccaagttctggaatgagtttggcaaatcaatcaagctgggtatcattgaagacgcaactaacaggaaccgccttgcgaagcttcttagatttgaaagtaccaagtcggatggcaaacttgcctcccttgacgagtacatttcaaggatgaagccagggcagaaagacatcttctacctcacgggaagcagcaaagatcagctggagaagtctccgttcctggagaggctaaccaagaagaactacgaggtcatcttcttcaccgaccctatggacgagtacctgatgcagtacctgatggactacgaggacaggaagttccagaacgtgtccaaggagggcctgaagctgggcaaggactcgaggctcaaggacctcaaggagtcgttcaaggagctgacggagtggtggaagaaggccctggagagcgagagcgtggactcggtgaaggtcagcagccggctgcacgacaccccctgcgtcgtcgtcacctccaagtacgggtggagcgccaacatggagaagatcatgcaggcgcagacgctgtcggactcgagcaagcaggcgtacatgcgcggcaagagggtgctggagatcaaccccaggcaccccatcatcaaggagctccgcgacaaggtcgcccaggacaacgagaaaaaaaaaaaaa

SEQ ID NO: 26433 - DNA, 1234 bp, Zea Mays
gcgcgaggcgatgctgcagtctccgcctccattccggcctggtgtccaccctttgtcgcttcttctctgcgaccatcgtcaccaccagccaccatcaccatccctcccctcggcctcgcggtcgcagcggtcagagcctccgagatggagctccgcctctgcctccgtctccacgcgcgcctccctcctgccacgacgccaccgcctttccaggcgaccgcggtgctcccggcctcccgccgccttcggacgggtggtagctacggggttgctcttaggcggcacacgaggcgttcgagtccggcaatctgcgcttcaataaccgacggcgagcagggcgtggctgtgaaggagaggagcgtctcggtgatcctcttgtccggagggcagggaaagagaatgggggcgaatatgccaaagcagtatctacctctactaggactaccaattgcatttttaaaaacattctgtcaactgaaggaagtcaaagaagttgtggtagtgtgtgatccagactacagtgatgtatttgaaggttctattgacaacttgcaaataccccttaaatttgcacgcccgggaaaagagagacaagactctgtttttaatggacttcaggaaattgatggggattcagaactagtttgtgtccatgattctgcaaggcccttagtttcttctgaagatgtcttagaagatgctgcagtacatggagcagctgttcttggtgtgcctgtgaaagctacaataaaggaggccaatactaattcttttgtagtgaaaactcttgaccggaaaactctctgggaaatgcaaactccacaggctatgaagcccaatttactcagagatggttttgagctcgttaaacgggatggccttgaagtcactgatgatgtatccattgtagaatatctaaaacaccctgtgtatatcacggaaggctcttatacaaacattaaggtgactacgcctgatgacttgctactagctgagcgcctgatgaatgaggaatagaggtgataggcaaaattagctctttgcctgattttacagacaagtacgattttgtaggacggcatttatctacacttctacagttttcaaaaaccaaaataattatggagctcatgctcgagatatctgagctctctgtagacattatgtcattctttctatattatatatcaatgaaaaaatggccacgctttctgccgagttcatgctttggcgg

SEQ ID NO: 26434 - DNA, 6481 bp, Zea Mays
cccaacgcactagctggctaggcgctcaccgacgttcctctccatggcggcgtcggagcgggaggccgcgctcctcacacgcgtggcagcgaaccacctctttctcgcgcagttcgagcccctgcgtgcggtgctcctcagcctccgccgccgtgacccggtgctatgtgcggacttcctccgcgcggtcgccgctgcgggcggccgcgtcccgggcgtgctctggtccgctccccctgcctgcccgtccccatcccacctcgcctggcttgccgtgctcgaactcgccgccctcccctccactcccaatcccgaggcgctgcgcctgaaggcagagttcctggtcctcctccagcccatcgctgacgaccccgccattggcgccgaggccagagaaatcctcacgaaactgctggatttgggggtgacgaggttgaagctcgaggtcgaaggcggaggggacgcaggtgctagtgccgaggaagcctccgtgaaggatctgagagggctatgggaagtgttcctcgacaacgcctttgtgtttgatgcgttgtgcataggcgtctcgaggcagatcgccttggacaggggtttcggtgtggatgtgctcctatggctgcggcggaacgtgcaacttgcccatttggatgccgtgaagactcttgtcacggaaggtgatctggatgctgctcctggccatcttcggtttctttgccttgaccatggactggagaaggatgagtacaaggttgtcatagcagagcttctcagaaagggatgggcaaaaacatccaattatggtggaacatggtctgagttgcagaataggataactaaattatatggagcagctcttcaatctactagtcccgagctcgtgcaacttgttcagctcattctggataacattctttctgaagaaattgaagatcatgatgtctctgatgctaatgggatgcctcttcctttcgaaaaatttctcgaaacattgttgttggagagggatactgactcagatgacaaggtcttgttggatgcggctataacgtcctgcaaaaaagatctgtaccattattgccgattgtctggaaagcacatgcttgaagtagtcttggaaactgctctatcatcaattaagagggagcagcttcttgaggctgttgatgttgtttcgttgttcccccttctccacccactggttgctgtcttgggatgggatattttgaagggtaaaacaggtctgcggagaaagctaatgcagctgttctggacaagcaaatcccaaggtctacgactacaggaatattcacattaccgtagcccgacagatgaggtgctatttgacgtagtcccaggaataaaatttcaagatgcgatcgagcttgttggtatgcagccacttccttcaacaactgccgcttggaagaggatgcatgatattgaactgatgcacatgcgatattctcttcagtcagttgcgcttgctctaggagagatggaaaagtgtacagattttcatggttagcattattttatccttgttacacatggatgattgtgccaaattgtctcaatctgtcccttctgagtgctatgttagtcatgaatgccatgatataaatatcgaatctgagggaaagaacgtggtggtatattttgttgggcttttacttgatatacttcgtcataatctcgaatcaaaaggctctgatacggatcacctttcaagtactggtctgtcgcctgctggtagacaagcgttagaatggaggctcaaacatgccaaacattctattgaagacctggattggcgtctatctgttctaaaacgtcttccacctctgtctgagcggcaatggagttggaaggaggcattagttcttctacgtgctgctccttcgaaattactgaatctatgcatgcaaagggaaaactatgatataggagaagaagctgtgcaacgattttctttacctgctgaggataaagcttcccttgaactagctgaatgggtagctggtgcatataaaagagcactggttgaggatgctgttaatcgtgtcacagataatacaaatgcagcacatgaattggatattttgtcattacgcacgcagcttggttctttaactacaattctgctttgtgttgatgttgctgcaacatctgctaagtcagttcatatgtgccgatttcttctcgatgaggcaacaagcatgttatctgaaatatttccaggaaggtcccccaaagtaggaccaacttactgggatcagatccaagaacttgctaccatatcagtgataaagcgcatacttcagcgtctgcatgacatcttggatctggatactcttccatctcttcaagtgttctttactgagatgagcatctcttcgtcaacggaatgtagcagagttggacaaaagcaacgtcctcttgggcttctgcaccaaatgattgatgacgccttcaaaggaaagcgacagttcttgagtggtaagcttcacaatgttgctagagctattgttgatgaggactttgatactgtttattcgaaagaaggtgtcaacttagaaaagaaggatattttgagctctgaaaaaggcatactccttggtcacgggcttagaattctaaaacaagcatctaggagtgaccttgcatcttcaaatgttgtggatagtggtccagaacacaaaggttctgcaaacagatatctgggccctctatctaccaagccgtcaacatatttatcaaacttcataatatatactgcaaccattggtgacatagttgatggaactgacacaactcatgatttcaactatttctcgttagtctatgaatggccaaaagatctattaactcgtctggtttttgagcgtggaagcactgatgcagcagcaaaggttgctgacacaatgagtgttgattttgtgcatgagattatatcagcatgtgtgccacctgttttacctccacgaacaggacaaggatgggcttgcattcctgtcatacctaccatttgtaatattagttcagaaaacagactatgcaccaagtcttctcctgctcaaggatggagtgcacatgattcgtccttgtcttctcgtcaagaacccctctatcctctccaattaaatttagtgaagcatttagcccagttatcttcagtaagagcagttttggcctgtgtatttggaagcagcatactatctggggacaatgaatcatcttttactcatgtgaaagattcaacacaagctccagaaactgagagatcattttttgaatttgctcttgagcaatcagagagatatccaaccttgaaccggtggatacagatgcagtctaatcttcatcgagtatccgagtcttctataacagataaatccgaagtctctttgcatcaatccaagggaaagttttgtatgaagcgaacccgtgagtctgacagtgatggtgaatcagagcttgaagagaatgtcataagcgggaacaccagttcaagttcactagaatccactaaacatgaagacgctaggctagagccaacaacttttatttcatttgattgggagaatgaagcaccatatgaaaaagctgttgagaggttaattagtgaaggaaaattaagtgatgctcttgctgtgtctgatcgttgtttgcgcaatggagcatctgataatttgcttcagttgctcatcgaacagaaggaagaaaaaggtccaggcacaggacaaattcatccatatggatctcacagtcttgggaatgatacttctcagtactgcttgaggctgagagacaaaaaagttgcagctcagctcgctctaaagtacttgcacagctgggaccttgatgctgcaaccaatgttctaactatgtgcatgtgccacttacctgagaatgatcctatgcgcagtgaggtgttgcacatgaagcaatctttacagaggtatggccatatcatgagtgctgatgagcactacactagatggcaagaggtggaagctgattgtgaagatgacccagagggcttggcactccgtcttgctgccaaaggagctgtttccgctgctttggaggttgctgaaagtgcctctttatcaattgatttgcggagggagttgcaaggccgtcagcttgtcaaactgctaatcactgatccacttaatggcggaggcccagctgcagcttcaagatttctgtcaactttaagggattccaatgatgctcttcctgtagccattggtgctatgaatttattacctgacctgcgttcaaagcagcttcttgtgcatttcttcctcaagcgtacagttgggaatctatcagatgctgagattgcacggcttaatttgtgggcattaggtctccgtgttctttccttattgccattgccatcacaacagcgttgttcttctctgcacgaacaccctcagttgatcgtagaagtactgttgatgatgaaacaactccagtctgcttctttgattttgaaagaattttcttccttgagggatgataagttaattattgcgtatgctaaaaaagcaatctcaattaacgttagctcagctcctagggaacgtcgatcgaatatctctgcatcaagggcaaaacaaaaaaaggctacaactccagctaaaacaaattttgtgcaaagttttggtaactttcagagagaagcacgcaaagcattctcatgggtcccccgtgatagtggcactaaaacacccccaaaagatatccttcggaaaagaaagagttcaggctctggaggtgatagatcctcttgggaagcaatgcctggtttacaggaggagcggacacctgtatatccttctgaggcgcaagaaagacttccttttgtctctgctcctgatgagtgggtgctgacgggagatcctgacaaggatgatgcaactcgttcatcccataaatatgaaacctctcctgatatcacactgttcaaggcattgatatccttgtgcaccaatgagtcagtagctgcaaaaggtgcacttgaattgtgtatgactcagatgaaggttgtgctaagctcccaacagttgcctcttgatgcctctatggacaacatagcccgggcttatcatgcaacggaaacttatgtacaggcactctcttatgctaagaatctatttaaaaagctcgttggtagtagtgatttgtcaagtggctctgaaagaagtaaggaagttgatgatgtttctgtggacactggcagttcaagcactgggagccagtatctggatgagctgtctgatttcctaactcaagcagacatgtggttagggcgtgcagagcttcttcaaagcctgctgggatcaggtattattgcctcgctggatgatatagctgacaaagaatcttcaagtagactacgtgacagattggtcaacgatgaacggtacagcatggctgtatatacttgtagaaagtgcaagattgatgctgtaccagtatgggttgcatggggccatgcattagttcgaatggagcactatgctcaagctcgtgtgaagttcaagcaagcacttcaacaatacaaaggcgatgcaacttctgttgttactgaaataatcaacacaattgaaggagggcctccagttgatgtttcttctgtccgttccatgtatgagcatttggcaaagagtgcggcgaccatctttgatgattccctttctgctgatgcttatctgaatgttctgtacatgccatcgacatttccacgatctgagaggtcccgacagtccagaggtcatgtagacagccaattcaggactgctagttcctaccttgaagatggccctcgcagcaatcttgatagtgtccgatatgctgagtgtattcattacttgcaagattatgctcggccacaaatgcttgctttcatgttcaggcatggccattacactgaagcatgctctctgttcttcccattcagtcaaccaaccacggaaggggaaacatctttgtcttcagctccatggagtgatcctttaacaactgattatgggacaattgatgacttgtgtgatctctgtcttggatatggtgccatggctgttttggagaatacaatacggacaataacacaatcgcccacatatcatgaggcacacatgattcagtacatgaacactattatcacccgcatttgcaactattgtgaaacacacaggcattttaattatctctacaacttcctggttctaaaagatgaccatgttgcttctggcctttgttgtattcaattatttatgaattcaatgtctcaagaggaggctttgaggcatttgggacatgccaagacacatttcgaagaagccttatctgtacgagatagaacaatcgaggctactaagttggtattgcggtctgctcggaataagggtgcacctggaaaaatgaccagggaaacgataatgaaatattccactcgtgtttcctatca

SEQ ID NO: 26435 - DNA, 371 bp, Zea Mays
gctcacgttccctattggtgggtgaacaatccaacacttggtgaattctgcttcacaatgataggaagagccgacatcgaaggatcaaaaagcaacgtcgctatgaacgcttggctgccacaagccagttatccctgtggtaacttttctgacacctctagctttcaactccaaaggtctaaaggatcgataggccacgctttcccggttggtatttggtacatgaaaatcagaatcaaacgagcttttacccttttgttccaccacgagatttctgttctcgttgagctcatcttaggacactgcgttatcttttaacagatgtgccgccccagccaaactccccacctgacaatgtcttccgcccggat

SEQ ID NO: 26436 - DNA, 1015 bp, Zea Mays
tccgttgcgatttagttaggccgttaggatttgggcgtcacctcccccgggtataagaaccagttgccgcacccatctggctatcgtgcgtcgtcaccttcgaccgggtgtagaaagccgagagggaggagagagatcgccgttggcaatgatacatggatgcgtcgctaaagcggccttcatacttggtccagggagtaacccagatcccatggaagatgtacgcatgaagctatgggcgcacttactgttcggcgggctcggaatttttctccggtgccaaccaccctccgtggacccgcgccacgacgagagcaagcacctctatggcataatcgacggtacataaaagcaaattgagcttgaaatagggcataatacaaatctatatggtaccaagtgaaaagggtaagctccggacacttagtcaattattttgggtactaatcatatttttctaagtgctagggactttacgaagtcaagccaaaaggagcaaaaaagattctaaatagaaaagagaaagttggactactatgtgtagcaccggacggtccgatgccacccaccggacagtccggtgtgcatcggacagttcgatgcacggtccgaccaaatggctgctctggagaaaaatcagcaagcgtaggctataaatcatcagaaagtccgcacggagcgcgggacaatccaatgtgccagccgaccaatgactagtagacacgtcggcctgggaccaacgatcacttggagcaccggacaatctggttttctggtaccacccaccggacggtgtggtgcccctcagaacgaggtcaccacaacgtggagtaggcattggccgaaccacgggataaaatcattgtgtaacttgtgtatttctttattgtgattgttttcttccatagagttctcacatattcacttgtgttattgttcctaagtttgatatatatcttaaaggaacaatcaaatgaagagttctcttcttctctctacctctattcatctcagg

SEQ ID NO: 26437 - DNA, 2610 bp, Zea Mays
ggtctgcttctctcacttccgccgggaatgtgtagagaagctgaaattgctaagcactcctgaggagcgtgctcgtaggctcaatgaagaacctgaaatacatgctgaccctgcaatggatccatattatgaatctccggaagaacaggagcaggagattgaaagaagtagcttcaataagtccagaagttctttcttgaggaaagatggtagtcttgtgtctccaggtaaaggagatggtagaaatgctgcacagcgagatccaaaaactaactgggaatctaatcgaaacacaagggctgaatcgagttctcatatggaatcacccctttcacggaggtccacatattcttctcaaggagaaagtgttggttatacaaataagccagagggcttgaacattgatgcacaaaccgttagactggaaggcaccacgcgcagtgctccacaagggtcacctggtgcctcatctggaagtctagctactaacataggttcaggggcaaaaactgcatctcaatcagccattaacgagtctgagaagatctggctgtacatggatccttctaataaaatccaaggtcctttctcaatcatacagctgcggaaatggaacagcaatgggtacttccctcctagtttgaaaatatggaaagctagtgagaagcaggatgattccattctattgactgatgctttggcagggaagtttgagaaagaccttcctccatgggaaccaccacatgttagtttgtctcaaattaacaaaacccctcttgagcaaagcacaatagctgatgaacaaactccaaaatcagtaattgcaaagtctttctcaagcagtgatcaaagacatgattatagttcaacgaaccttggaacaaccatgatccattctggctcacaaggttattatggaatgcaaaattcccatgcagcatacacaagccagcaatctcttactgggagttggaatgccacgtcaagtcagtttggggttgcaataagtcctttgacacctacccagcctgccatgcaaagcctttcaggacaaaatattgtggctgcagaaaatatgggtcatttaactactggaatggctcctgcaactgcaaatgcagaaatggttaattcagatttgacttcccagaaccaaatgttgtcttctttaccgcaaacggatgacagattagctgatggaattgaatccaaatcaggagaagatgtttcacatggaagagtgaggtcttcggctgaagctatcggaccacaggatgcacagcttggaccagtgcaactaaacgctcagcaacttgaaaacacaagaaaccatatgtcatcaattgatctctccaagtcaatgatgccatcacagatgatgtcagcaccatctgctgcatcagtacagccttcattgacaaccactgctcgcagtgataatcaaagcagtgggtgggctgtacctgcacaaatggcgaacacacctggccagtctcagataactggaaatctaacctggggaaatacacctcagggtgacgcaagcttaggttggggaatggtgggacagagcaatatgaatatgccttgggtagcatcagctcaaggtgcttcaggctacaacatgggtgtagccatgccgacgcagccaaatgcagttccaaacatgggctggttaccaaatccaggaaacaccagcatgaacatgatctgggctgcaactcaaggccaggggactccaaatgcggctcctatgatgggaggtcagatgcaaggagtcccaatggccccttggggtggtgttgcagcaggaagtgcaaattcttatcctgcctggggaaaccaacaagctggaaacatgaaccaaaatgttggctggagtgctcctgtgcagggaaatccaggtcaggcaaataacaacatgaactggaacgcaccaaatggtaatcctaattggaataatcaacagagagagaatgggggcaggcactctggacaccgcggtgcttttagtggtggtgactcaggcggaaggtcatggaagtcacgctctggtggcgatggggggtcaaggggacatagcagattctcccattcaacaaacacagagggatatccatccaggactgatcggcattacgataggcagaattcaggcaacgagaggcgatatgagaatcacaatgagagaaatggtcgacagtttgataggcagccttcggataatgaaaggaaccatgataggcctgatggcagacatggtggcagggatgacgataggcaggctgataggtccgagtcaagagagctgcgttagaactggtttctgtttcttacattcgtttccttgtatgtgcagtagcaaactagcatagtagcttccgtgcatgttttgaactttatgctctgtagcgatctgcatacatgtgcagatcaccgtgtataacatttgtagtttaatgctgtgtgcatcctagttccgaatttgtaatttacttgaataaatcgtcttgtctgatttctgatgtaaagcaggggctacacgcccaggttcttggactagggttgttggagcatcaatggaagacaagggagagccagtggtggttg

SEQ ID NO: 26438 - DNA, 1587 bp, Zea Mays
gggaatccgtgtttctgctacctctagaccatctccagcagatcgagtaaacggtcgtgtaaaatactgttttgtattgtagattacgctgcttatagagtagagtttaaaataggtggtgagatagagagtgctggagatagtctattctagctctacgcagcctcatgagtcatgagtgagtcttttctctcatctcttagtcactaagcaaaacattcatccatacgaggtgacgacaacggctctatatctcttgggagatatcatctgaccatgtcaagcccgcaagcagtcaataaatacggcctcgcctctgaagaagaagaggaaggggaagccagccagccagccagccaggatgtacaacgcgccgccgccgcggccgcaggacatgtcctactacgagcactgccagaagaggcacgaggagaagggctgcctctatgcctgcatcttcacggcgctgtgctgcttctgctgctacgagacctgcgagtgctgcctcgactgcctctgctgctgctgcgactagcccggctccagctcagaggacgatcgagacgcagatggagatcgcctccgccacttctaccttaccctagtgacgatgatgatgatgatgatgattcagtttcagtagcctgtctccttttagtctggttgtggcaaacctaataaagcatgcatgtcgtagcgccatgatttcagttgaaccaccacacccttttgtcattgctattgttatcacccgatttccgattccaaacacaaggcattcgttcgcgtagtttacctgtcactgctgctaccgatccgacacaatctattcttcgtgtccttcgttttgtctgtgatgacagcagaattcagggtcctggggaaccctgttcgagtgtcatagggccgggcacaatttaatcttttcatgtctgaatcatctgtcaccagtagcgtctggtctgctgctccagatcgtgccacgggcatagccatctagcgaaagcgccatggcttcgaagcccaagttggatcgctacctaccagctcccagagcttctaaagctgcattgctgcacatcttcagattggatgctgactagtggtttccctgtagcaatatccaagggcagtggtgaaaatcaagcatgcagcttatctttgcgtgtatggcattcgagtgataagcatgtctctggttcctccagcaggatttgacccgacgtatccaaaggatgcctattcagtggatggaaacaagggatcagactcttgaaagctgcgcacccagcaacatgacagaaaatattaaatatttgcttttagatgaggtgacaaaagggaagacaactggaccgtttgccaccctctgtgggccaggatagttaatgttgacattgacatacaatataagtatagtgtgttgaggtatatttgtatagtctatctataaccaggctaactatagatagtttagattctcctagctgttgtaatcgtgttcgtatctgtagcctgtaacttgtgtgccaagtttggcctgatatataaacaatcggcaacatcctgggagaggcaatgccttcc

SEQ ID NO: 26439 - DNA, 1806 bp, Zea Mays
ctgagatctgtgccataataattctctagccttttggcttactaaatggctaattgtgcattgtttcaggaaatttcctttaaaggaaaggtatcgtgaagcaccggcaggacccaaaaggtgtttaaaactatcaatgacagatggcatacgacatatatttggaatggaatacagacccatcaaagacctgacagttcttgctcctgctggtttaaagattattgtaaggaatgtacacacaaggaggggtcttcttatgctagttcctgaggctgttgagattcttggtggtgtagttgacgaattggaagcagcgcgtgccagacttgtttctgaagtaaacaaaccacctcgtggcaaaagtaaacagggtggattatctttgtcttcaagagctacgcgagctgcctggccatgtagcaccgatattacaaatggtgttgcgcaggggatctcaatgcaaagagcagttaattcctcgtatccaacaggatcaggtaatgctttccaggttggtggagctacagaaactgtggttgaagagcttgttagccctcttgtagcaaaccgtgtccaagaaatcaacatgcagggctcatatgcttctcttaccagggaaactactgaaacttctatgcatactacccatgaatatgatcccactcatatcactgaaaaaagtacagggaccgtcatggaagaacgtcctgatcctcctattctagcaaacagtgtccatgaacaaatgcagcgagtccaacctgctaacggtgcacaatcttcaaatgttggcaagatcaatcagatggaacagtctttcattctaagcggtgaaaatgaaaaaccatttacatacatatacagcatgcttattgactggggtaggcaacaggacacaaaagcctacattcaaggaaaaatcaagggtctgatcacttctgtaaaaaaatttcaatataaacaacgcaccaagtacgagctttatgtatatatagatgatgggagtttcatttcagaggccttcattgacagtgatattgtgaataacatgcttggcctttctcctggagaggttactgctgcacttgctggtgaattagagtttgcatcacccagtgaagtgaaagaaactttgaaaggatttcagaagtttttggtgaagtttgagggtatgatgcttatcgagttaaacaagaactctcctgttcctgttgttcgtgagttaaatgaaggttgctcaagttctactgcatggcttctgctcggaaggctgaaaacaatttcttctcagaagaagaccatccaaactcaggatattatggacaccactccatgattgtttcgatcctctaaaccccagcggccgattataatctttcaatgctggtgcgggtgacacaatgatgtggcatggaaggagtgctaccaaaacattctcattgagcctagaagctttcgtccatctcattcattttcgtctcattttaataaccgtagaaaaaggtcctaaatgattggcggagtagaaaggctgacggagaaagtctgacggtgagatcctgaagaccacaaccgtaatcgtcggatggctgcaatgtcagaataagtatgatagaatccgttctcgaatatttgtccgtgcccgctattttatttttggaaaaaagcgacaaataaaaaaacaacagagggagtaatttgtagtagcattaagataattgagtcctttattaatcgtgtcgatgtctaaaggaacttcggtctcatacagctagtgctatccatggccacagaacgtacacg

SEQ ID NO: 26440 - DNA, 3523 bp, Zea Mays
ctcataacagcctagggctacagagcaataatatttgtatgcggttacattactgaaaaatgtttgtagtctaccatgaggcgacgaagcatataatgttgaattgaatggcaaagatgaaactatagtcgaagaatctggctgtcgtctttcatcatcagaacttaatgatgcaaaccaggggggcaaaagtgttcagtttgtgagcgatgctctggcatctatagatctaatctgtaaacaagagaagtttggtcattctctcaagggatgtaaggatccttcaattgcaaatgccatttattctacaagtgaaaatgtagctattgaaggaaaaactacaaaagaaagttgtgtccctttggatagaggggacaagcatgaagaaaaaaaacaacacaatgagggatgtcataatgaagctgtacctgaaataagccacatggagaaaggtggcagaagtacagatgtctctaacaagaggcacacaaatcaaattacttctcaagtgaagaagggcaaaaaatcaaaggttggttctgttggcatgcctaccgtggatgccactggtgaaaaagatcatatgtatagtgaaaatgctgccaaacaagatactgtttctactaaaaaggagattgcccatgaaccttctgtgcagcagatgtcaaacattgtgtatcaaggagattcaaatgtagtagaaaatccgagtggtgatggaaagaaaaagaaaaaaagaagacgccactcagaatccttaaagggtatgaatcctagtcaagatctgacatcatcttctggatttgtaacaaacaaaaactcgatacaatgtacagatgctgctccaatagatgcaaagcaaacaacccagggcattatagaaggagaaacagttaatgagcacatgaagcttagtagaagtctagatgtagcagcaacaaatattgttgatggggtattggcagatctacgacctaaagacagcttaagtaaggatctggatgaagatcttttaccaggacaaactcacctaggcagcaatcagaatggactagaagttcctgaatccattgctgttaaagttggtagcgttactgcagcattacctccaaaatgccctgcagcggttcactttgcttctcctgttagctcacctagacaaaagaagtctaaggggaaaaaatcgaaagtgctatcaaccatgactgactcttctcatcaatcaagtggtgtatccgaagaagatgctaatagagaattaacagaatctgattctttgaggtttgctgataaaacaagtgatcctgaggatatagtaactggaaatgtggttgcacaagctgatgataagcgcaaaaccactaagcgtcaaaggaagaagggctctgttaagcaggtatgtgatacattggcattgaaggaaacaaatgatgcagaagaaaatttggttcagggaggttatgtagttgacactcctttaagcactgttggggaagtagagcagaaaggcaagtcttctcagataccgactcctaaaatacgaaaaactaattgttctactcatgggctggatagtcacacaactaaggacaaccagggtgtgtatgtaactgacatcattgaaacccatgataatgaaaatgctgcaggaactccaaccttgcatgaagttcagaaatatgcaatggttctcaaatctgccaacactaattctcaaaagcaaaggaaaacatcttcgaattctgaacttcaaagtcaggattgtgccctggaacatggtttcactgcagatttggtgaacggcaggactgaaagggaagttagcactacaagttctgctagtgctgttaaacctgattaccacaccgtttttcatcgtgctaatgatggaatcaatttcctcgatcattttagctgcagcaatatgaatgatgatccatcaattgctgcagaaagtaagcaaaacaatgaagatgaacctttaagggaaatgaagaataaaaagaagaaatggaagcaaggtactagtagcattgaaccaaatgacattctagaatcttttccctcagagaaagctagcttaactggtcattttggtaccagcaaagctattgtgtcatctgttgcaaaagaaagcatgaacatagaaaatgagaatgtgaatgacggcaaggagaagaagagaaagggcaaagctaatatggaagtacctactgctgaaaaggacaattctaattgtgataatcaaggaattgatattagtacccaagaatcacttatttcttttgtacaaaatgaaaggacgggtcaggacaatggaaaagagagcaacagtaaagttactcagaatgccagtataatgcaacatggacgagaagatcccacttggaatcatactcctgagaagaatctccaccagagtgttgatgatgatcaaaacaagttgctcactgaaaaggatcatgcacatataagtaaagaagtggggaaattcacttctcagccaaagccccatgctaagattagaaagcctgatgagtttactatcaagggaaaggtggctccaaatcctaagcctgtaagcaaccttatgaaggatttttccacgagcccaggagcgtcaagtgacagcacagagggtatgccacaaagtgctaaccgatataaagtttcagtccagaaagtcccaagtaaaatgtatcaagagaccagtggaaactccaaaaaagcgagtaggaaaatagtctctggtgcaatatccaatgactctatcagggagggttgtggtgatgaattggacaccacaactgtcatggaaggatcatctgatagttcatctacctctgctgactcaggtatttcatctacagcctatgatgaaagtgaggcttccgatgatgatggggccatatcactatctcagaagagtctcaaaggtggtctgcacattagctccatcctccgtggttcccgtagctataagaaggcaagaaagaagctggaggagctgttagacgatgatgacaccattgtgcctgatagccagcccacggatggtcttcggggttgaacatgcgtcaaccttttgcaattatccacctaatacggtgcaagtttcatgcgagccccaaagccggtgtgctttgcaattgctgtagcttaacctcccacaatttgtctaaaacacatgcgcgccggcgttatccgttgaggattgcgtatttttatttattgttctcctctgtgcatactcttttcttttcgggagcaaaaaaacattgcatacacgatacatatagtgcctaaaatatacagatcatacatgagatgtaagagcatcagttcaagccgcagcattctatctactcatcatttgtacaaggctggaatagcatgtgatacggcatcgtcaaactaacaaacagacgatcacggggtgcgagacagtctcgtcatctgcgcttctgggtcttcatccctaatgttggcagtcttgcccatagatttctggctcaacatccgg

SEQ ID NO: 26441 - DNA, 2498 bp, Zea Mays
gccacttgttctcaaatcacttcttcccggactcccagactcctcccaaaaccctcgcatcctctcccacgcatgtcacaatcgccatgaccgacagaaaccccgccgccgcctcaagcaagcgtcactgtgacctctccctcgacgatcccacgccgtcggccaagctccagcggtgctccgagccgtcagaaccaacgccggcggggaaaccgaacggcggcgcggcgacgggagaggagagcgagatgatggccggcgcacggaaccctagggcgcagaggtacctggtcgccgtggagtacattggcacccgcttctccggctcacagaagcagcccaaccagcgcaccgtcactggggtcctcgaggaggcatttcaccgatttattgggcagccagtttcaataatcttttctagccgaacggatgcaggtgttcatgctttatcaaatgtttgtcatgttgatgttgagcggataagtaaaaggaagcctggcgaagttgtctgtacacaaaactcattttttttcttaacactgattaccgaccaggccttgtctacatctcttgacactctaaacttatttctttttttgatctttgcatgataagtatatttgtgacagttgttgttatgcctgatttaaatcttctaggttttccaaaataaaattctacaagcaatagaattaccttttctcctgaccttgcctctaaatcatctattttgtccgttccaaatcataattcactttagctttgccttaagtcatatttaaccaagtttaaataaaaatgcaccaacatctacaacatcaattagtttcattaaatttctatatgaaatgtcttgatagttcacaaaatgttgatgtcgttgaagacctggcggctggcgccactgctgaaacaagtcgctgtagtctgggcgtctggattgatgtattttggtgggagagttgtttggtaggttttgaactgtttgttgtgagtgttgttagtagttgagagtgattgttggtagttaaactatcacaatgttgattgtaagctggtaacatcagcagtggatatttgactattggtaagctttctaataaagctgggtgaatgcttttgatctaaaaaatgtcttgatagtgcacttgattggactttaagattttaatatgtttttattcctaaaaacttgttcagttagaggcatttgacttagaaccaaactaaagtgtcctataatttgtaaaagaggaaataaataaaaatatgttttctagaacagcgcctcttataactcctgctgctgatttgcttttccctttttacagttaacacctcatgagcctggagttgtaaaacgtgctgtgaaccactttctactgaagagtgaaggtgacataatggtgactgatgtctgctgtgttgcaccagattttcatgctagatacaaatctctagagcgcacatatcactatcgcttgcttgctggacctgaatcaacatctgtttttgagaaaaactctgtttggcatatatctgaagatttggatattcagtcaatgaagaaagcatgcagcatacttgttgggcatcatgatttcagttcatttcgagcggctggatgtcaggcaaactctccagtgcgaactctggatgaacttagtgttacagaagaaaccagacatggaatcttctgggaaaggatctgatggttcctgtaccagtagtgtgaaatcagattttgagaatggaaaagattttggaaagcggtcaaggcaccgttgctttgttgttactgcaagggcacggtcttttctttaccaccaggtaaggttgatggtcggtcttctaaaatctgttgggactggagatctaacaactgcagatgttgagagaattctggatgcaaagacggttactgctgcacccagtatggcaccttcttgtggtctgtaccttgctaacgttaaatatgatctgaatacctgaagacaagttttatctagtggcttctgttggtgggcctccagattttgtcagctgttggctatcaaaggaattatatgctgccacttgccaaagctttcagttgcctgttttgtccactgaatcttgcatggtgattgaaaacctagaattaagtttatctgtcagcacaagagccggcttcattctcttcttgtacacagagctcttctgcatgttcagaaacaaaataggtagcttcattttagttaagttcaactatccactctttaaatttcagctggatccacccgattttgttgggtgtacgtagatttgacctggtaggggcaaaattttatttcttggttttctcatgactgtacttggttcttgatatataattaattagccaaatgcgttgtgtgcatattgaaaatattcttttctgttccttgataaattacatcgagcaagactgcaagagaactttcttcaagaaaatattcttttctgttccttgataaatt

SEQ ID NO: 26442 - DNA, 2143 bp, Zea Mays
tcaacctctccttcccgaagcaaccccaccgttccacccccttttctgccttcctttccccgtgcaacaaacgcaaacgcgacctaacgaatcgaatcaaattcgccgtccacctcgtcggcgtcggcgcaccggcctcgagcccagccccccgtccgagtccgatcagccaccagagatgcagcacgggagcggcgactacgcctcctccgccccctccggccactactaccagcaccagtacgcggcccccggctcgaacccctatccaatcgccacggacgccacggcgccgggggcagtgtcggggggctacgcccccgcgccgtcctactctctcggcggcggctaccctgaccagccgccctccgccccggtctactcgcaggcaccctctgccccggcctactcgcaggcaccctccgctccggcctacacgcagccgccgccccagccccagcacgcccccggatactcgccttacaacaccaatctcaacacctacccgacagaggcgtattatacctacacgccgccgtccacccagaccgcggccccaccgcctgcggaggccaactccccggcgctgccctacgacgccccgtactacgggggtgggtaccagccgccggccgcggggtacgacaacgatgattacctgaacgagggtgcctacgcttacagcgccggcggtggctcggagccgtacggggcgcgcggcacggcccctgcgcggtcgggatccgcgctgtttgatgactatgggcggtctatcagtgccccatctgatgactatgggcggtcgatcagtgccccatctggatgggaggagcagcagccgtggggcagtggcggcggtggcggaggtagtgggagctatggggtgatcgcaaaggcccttccaaaggcggaaacgcgtgaggatgcgagtggtggtgcacagaagtttcgggttaagctgctgccagagggtgctgggaactctactgacgtgctttgccagattggtctagatggaattcgcatgcttgatccgagtacaagcaggaccctgaggatttatccactcgattcactgacaagatgggaggttttggatgcaactatatttgcattctgggcgaagacatcagtggatattgaaccaaagagaattaggctgaagtcaagcagttatacttcaaatactatgcttgacactgtaacagcagcaacagtgcagtttaaggagataggtgcagatgcaagaagcagaggagcaatagaaactggcaaacccttggtacaatcaaatgagaaaaagaaaggttttgattggatgtttacaaaacctgttgatgaagtgaaagaccattgggtcccagatgaggttgccaagaaatgccactcgtgcgctgttgattttagccctttcaatcgcaggccagggaaggattgctctgacggctgaggataatgctccacttgtccgagtttgtgatagatgcatggctgaggtcactcaaaggcttagcattgctaaggatgttgccaacagatctgcaactgttcaaagtcatgaagatcttgcaagaaaactgaaggaggaaatggagaaaaaccgcaagtcatcagcatctggtggtggtgcgcctggtaccagaatgagggaagtcgcgtgccctacctgcacagtccatcttcaggttcaggttcccacatctggctcagagacagtggagtgtggagtgtgccagcatgccttccttgtcagcgccaattgatacaccggggagaagatgcatatgctaaagaaattattctgttgacgattattcctttttttattatgctgtatacataataggtgtgtgttctgtcaggccgtacatgtttccttgattgtgttggtgatcacggttaggatatgttacttttttccctgtacatgggtggattccaattcgggagtattgcggtgctgggtgtatgcacagaatattataccattagattatacttggtagagattgaagactatgctcacgcacgcgtgtcacgtccgcattatgcatgcttgaagttttatcatgcttcttctttagtagtacctttgtgccccttcaaagccaaaaaggggctctcttttgaagcaaatttcgta

SEQ ID NO: 26443 - DNA, 722 bp, Zea Mays
ataatgatagaaggtcgtagcacaaccttaaatgaggtgccgccgtcgccgccgatgatgctgaacggacgtgccgcgtccccatccagaaccatccctgctcaacaccttctccgttgctcaccatggcgtcgtagttgttgccggacccattgccaccagatagtcacggcctcttcgtaacttcactccgttcatgttcgtcgccgctcgtgccaccctcccgcggctgtaactccctctcccttcctcctctcaccgcaggcctcatcacgccctcatcacccatcgttgctggttctgcccgctgttgctggagatcgtgaccatggaactcacgtcgtcgtcctagcgctcctcgcgatgttgctgctccagggcgtcatcctcatgtcaacggtggagggccttgtgtggatcatgcaagaagctccacaagttcctcatcaagaagatcaggcaaactggttggagggatcttatcagaaatgtagcggcggactactcatctctttggagagcggaaacagccttactttccaacttgataagcgaggttacaagtcacctgaagattatcctggtacctggaatctcatgtctcaggcaagttgtgcccttgaccacttatgttacccaataatgttctttataatcatttattcatgcataggcttaattttgatgggacccaataggtcaccctagactgattatctttt

SEQ ID NO: 26444 - DNA, 2658 bp, Zea Mays
ctggggtggtttcatcccacctgttccccaaccaaacatctgtggagtacagcaaaatagtagcacaactgaaaccaggggaaagtgaagatgtaatactgttggcgtgccaaaagcttctatcaatcttcagtcaccggcctgagcaaaaacagatctatatggcacagaatggtttcctcccgctgatggaactccttgaaattcctaaaaatcgtattttatgctcagttctgcagcttatcaacaacattgtaaaagatagtacaggcttcctggaaaatgcttgccttgttggccttattccagtggtgatgaattttgcagaaccaaatcgcccaaaggatgttcgggtgcaagcatccttgtttcttcagcagctttgtcaagccagcaccttgacattgcaaatgttcattgcatgtcaagggatccctgttttggtaagctttatggagcctgactatgcaaaatacagggatatggttcatcttgcaattgacggcatttggcaggtctttaagctccagcactcaactccaagaaatgacttctgccgtatagcagcaaaaaatgggatgcttcctaggctggtgaatacactatatagcttgaacgaagcaacacgatttgcctcagtctcagggtcaggtgcttcagtaacacagaatggctcaaccccccgacgaagatctggccaattagacccttcagttcttgaaagttgcaaggcgaggctggatcatcatcattcatctggttctttgcaatctctacaagcagatgcagataagcaccacatattaatggactcctcgtcatctcctaggttcagcgacaaaacaagcagtaacttggagaggaatgagaacgacttggttattcggccacagaggcttagtgtttctgccggaaggacatctacagacagatcaccgaagcacatagaactagtttcaaatggtcataataacagtcaaaatgaccaggtccgacctctactgagtttattggagaaagaaccaccttctcgacatgtatctggacaacttgattatgttcgccatatatctggtttggaaaggcatgaaaccattctgccactattacatacatcgacagagaggaaaacgaatggtgaacttgacttaatgatggattttgctgaggtttctagacatggaagggagaatggccatctggactctagtataaaagcttcaaatagagttcatagtatgaaatatgcaccttcagcaagtgcgtctaatgaaggggcatcaacttctggagctgcatcacaaactgcatctggtgtgttatcaggatcaggggtgctcaatttaagacctgggagtacaacatcatcaggcccattagctcagatgttctcttccatgagcgcagatgtggcacgtgaatatcttgagaaagtagcagatcttcttttggagtttgcacaggcagacaccgtggtaaaatctctgatggccagccaaagccttcttacaagggttttccaaatgtttaacaagatagagcctcctattcttcttaagattcttaggtgcattaatcatttgtcgggtgatcctaattgtcttgagacacttcaacgcacagatgcaatcaaacatctgataccgattctggagcttcgtgatggacctctggtttatcaaatacatagtgaggtccttaatgctttgttcaacctttgcaaaattaataaaagaagacaggaacaagcagccgaaaatggaatcatccctcacttgatgaaatttgtcatgtcagactcacctttgcggcagtatgccctgcctttgctgtgtgatatggctcatgcttctcgcaactctagagagcagttgagggttcatggaggactagatgtgtacttaaatctgctggaggatgatgcatgggcatgcacggcattagattctattgctgtttgtttggctcacgataatgatcacagaaaagtggaacaagcactgttgaaaaaagaggccattcagaaattagtgaagttcttccaagattgcccagaacagtattttggccatatattggacgctttcttgaagataatcacgaaatcttctaggctaaatacagcaatggctaccaatggtttaacaacattgctcattgcaagacttgaccatcgagaagctattgcccgcttgactctgctgaaactcataaaggttgtctatgagcaccatcctcgaccaaaacagctcatagtagagaatgacctccctcagaagctacagaacctcattgaagagcgcagggatggacaacggggcggccaacaagtgttggtcaaacaaatggccacctcattgctgaaagcgctgcacatcaatacagtattgtgatattggtggatcatatgttttcctctcaagttgtatatgcttgccctagaggagaaggtgccttttccttttgctctgctgtggtggtttctcatgagcaccagactcatctgttgtacctgatccctcttttttcgggagaaaggttttttaggtgcaggatgaaatggacgttctgtccttcagtgttgtttatatttagagtgttagtgaggacattgtaaattaagacatataattaataaacaaaacccatgttgagata

SEQ ID NO: 26445 - DNA, 1746 bp, Zea Mays
aacggaacaatacttatctttttccctgcccccgcggccgccgccccgaacgcgcacgcctcctccgccgaagccaagcaaaccaccgacctcgacggagtcttctagccgtcaccctcgttgtcgccctgctcctcctctcagccggtccggccggcggcgtggcgtgaagatcaatccggacccggaacgagttccctcttttgctggttacataaactttggaataggaggatatcccatattgatctttgtgattgagattgattttttttctggaaaatggagatacaaacttcagggaagcccattgatgtgctgatggagaaggttcttagcatgaacattctgtcttctgattactttaaggagctctataggttgaaaacctatcatgaggtcatcgatgagatctacaacactgtcaaacatgtggagccttggatgactggcaattgcagaggcccctccactgcattctgtcttctatacaagttctttaccatgaagcttactgtcaaacagatgcacggtttgttgaagcatcctgactccccacacattagagctattggtttcttgtatcttcggtatgttgcagacccaaaggttctttggatgtggtatgagccctatttgagggatgatgaggagttctcccccggatctaatggccgcaagacaaccatgggtgtttatgtgcgtgatcttatacttggacagtactactttgatagtcttctaccaagaattcctctcccagtaactcgtcagattacagccaatcttgaaaagatgaaattgcccactaagctttctggggcaactggagactccagtcgtcagggatcagaagatactgcacgccgtcctccttcagtgaaagcttctctgtcagtttcctttggacagcgtgctccacatcgggcttccaccagggattcatctccagttcgtcgaacagtcacccgtgatggtcatcgaagttcatactcaccatctcgtcgtagtggtagccgtgagggtcctgatcatgaccgttctgaccgggaactggatcattctagtcgtgaccgtgaaagagcccgggatcgttcaaaccgggatcggtatcattcaagccgagaccttgaccgtgacaaggatgccagagattatcatcggcatgagcgtgatagcagggatcgtgagtactacaggtccaggcattcagaagaaagacgggacgacagaagagatcatgaaagtagcaggcacaggcgctctagctctcgccacaggagcaggagtaggagccgaagcaggagcaggagtaggagcaggagaagccgcagccgaagcacgagcaggaggagcctgaatgagcagcgatccagcccattcagggatgcaaataaagagaaggcagccaccgtgtcgagcaacctagcaaagctgaaggacttgtacggtgacataactgcaaagaaggaagacagtgatgctgaaaagcttcaccgtgattcatgcgctgaggaggtcatcaggctgggaggccctcgatggagtcagcacgggaattgaatcgacatgcagttatggcaaggctgcattgctgaatcgaggtcgcaactcataatgccttatataagtgttggtaactagttcagacaaacaacttgttgggaaaataatgaaacatatttgataagggtacgattggaaaatagcctttatctaggtatgtgagatgctgttcaaaacgac

SEQ ID NO: 26446 - DNA, 888 bp, Zea Mays
gctcagtgctgagtctgctccgtccgtctccgtgccgtgtgctggcggtggcggtccaggccccgctcgctcctaccagtggcccgtgcgtgcggccgccggcgccctgatcgatcgacccgcgcctcggccggatggaggcgtcagtagcagcagcaggaggtgggggaggcagcgccgccacgcggagcagcccggcggccgtgcaggccaccaacgacgacgccgcggccagcaagctgtcctgtgttaacaaaggatacatgaaggatgattatgtgcggttttttgttaggcgaccaacaagaagggctccaataatcaatcgtgggtattatgcgcgttggtctgttctcaggacgcttctgcatcaattcctcaatgcggggaagaatagtaacaatgacaagcctaaacaaatattatcccttggtgctggctttgacacaacattcttccagttgcaagatgaaggaatggctccacactgttatgtagaattggatttcaaggaggtaaccagcaaaaaagccgccatcattaaccattatagtgaaatgaaggaaaagttaggctcagaagcttcaatttcaatcgaaaaaggtgaagtgataagcacacattacaagctattttccgctgatattcgtgacataccaaaactggattcagttattcgcatggctgaaatggatcctagcttgccgacctttataattgcagagtgtgtgcttatttacctggacccaactgccactggtgctattgtgagttgggcatctcaaaagttctccactgctgtctttttcttatatgagcagattcatcctgatgatgcatttggggagcaaatgattagaaatcttgaggttcatttaaaaacttggg

SEQ ID NO: 26447 - DNA, 3008 bp, Zea Mays
acgggatccctggtacattttctgtctgaggaattttatcgaacacctgagggcaaagaattgtcacaaaaaggtcatccatttgaggaggaaatcacatctttgctaaagaacccccctggttttcatagctttatgctgtgtgaccagtgcccagaaatgagtgctacatataattgggttcatacagaaactcaactggaacatttggcgagattattgggtgaggaaagagcttttgctgttgatacagagcaacatagcattcgatctttcctaggatatactgcactaatgcagatctctacccagaatgaagactatctgatagacacaatagcactgcacgatgtgatgggcattctacgaccagtgtttgccaattcttctatctgtaagatcttccatggagctgacaatgatattctttggcttcaaagggattttcatatttatgttgtgaatatgtttgatactgctaaggcatgtgaaattctattgaaaccacaaaaatcactggcatatttgcttgaagtatattgtgaagtgaccaccgacaagacaatgcagcgtgaagattggagactgcgtcctctgactccagaaatgatcgagtatgcacgcactgatgctcactatctgttatacattgcaaattgtttggcatcagagctccatgcaaaagcctgtgatacttccagtgataaaatcaattttttcttcgaggctagtcatcgctcaaatatggtgtgcatgcaactgtattcaaaagaaattgaatcccctcctggagcttccagtgcaacatctattctctcacgaaatttgcaaactcatgggttcgactccaaaaagtctagtgaagtgaaggatcttgtttggaaattttgtgcatggagggacttaatggctcggatgcatgatgaaagcttacgatatgttctgccagaccaagctatagctgcccttgccgttagtcttccaaagggcccaacagaggtgtttgctgtcatagcagaaactgacctaagcatttcaagtatgtacccttccttgtcatcaccgtcacctcttgttgtggctcatgtcaaagaactctgttatctgctggatgacatcactaccagcatggacagcatctttaaaagtttactagagaagtataaagatccaagtggattatgtcgactatcagtttataattataaccttataacacacctaagtttgaagcaaacaagtatgttttccgttgctccaagtggaaagaagttgacagcactgcctaataaaaaggtttcacgggatttattcattaaaaagttttcctgcaagtccccggtatatcacaattgcaggatttatgctagtgatggaagactactttgctactgtgaccgcaaaaaactggaatggtacattcagcgtaatttggcgaaattgattgaaaatagtcctccagcaatcatgcttctctttgaacctaaaggtcgtccagaggatgaagataacgagttctatattcagagcaagaaaaatatttgtgtgggctgtggagaaaagagccattatattagatacagaataataccgtcatgctacaggatgcattttccagaacatttaaagagccatcgttcacatgatattgtacttctttgtgtagactgtcatgaaatagctcattcagcagctgagaaatacaagaggcgaatagcagaagaatttggaatacccctttttgtgcaaaagataatgaactcgggtgatataagtttgattaccaacacatcagtatctgaagataaattgaatggaacaggtgtctccccattgcagctgaggactgctgccatggctcttctacgtcatggatccactatgccattgaagagatgtgaagagctaatgcagattgtgaagtcatactatggtggtagagatgtgactcctgaagatctcgagatggcattacttgttggtatgagccctcatgagcgaaggcgtcttgaaaagaaaaagggatattcgtttagagctcaggctcaaactattattagaaagagcagcagcaataccatctcagaagacagtggacatggatcagaaaattgtcatgccttatctgcgcgatttcctgaggttggaactggtagtaatggtcagcaagagtttgatgagacagggaatcaaaaccagctagagaatttaaccctgagccagggaagctcaagtttgccagtcagcatggaggacaccacttctgatcatgacactgtgacactcgagaccgataccgagcagcaagcaagaggtgcctgtactcctggaaacagtcatgacgacaaggaacaatccatatgtgacaattctagtcaggtcatttccaagaatgctgagaagatatccctgttgggtcatgggcatcatggtaaacaagttgtggaacttttgttttctaatggtggagaggaatttgttaaccagttttgccaaaggtggaggcagatctttgttgaagctgttcacccccgttatttaccttctggctggaatattaaccacagtggacggcgggattttggtgacttcagtgtctacaagccaccaaggaaagatcctcaatctgcaactgcaagggattaggcttacgcgggtgtcatgctgtcgttggtaccctgaggttcaacttactttccagaattggttccattcccttaaacttgatcttgttgtacttgttccattcccttaaacctgatattgttgtacttgtatgtatctcaatctgtgtgtttgttcgagtaccttgaaataccaatttcatctcctatgtatttctttgagatgaactttgcatcagttttgttgagccgtttttttatacgtgaggatttagagtactaacaatttaagtccaagaaaaatcaacagtgaagttcaactcagcagattaaatcttcaaagtgccgtttttaactgggagttgagctcaaattggtttcttc

SEQ ID NO: 26448 - DNA, 2461 bp, Zea Mays
ctccgacctccccacgttcgacggttcgaagcctcggagggaaaccaccaaaaattctcccaaaacccttcgctcatttggtttccatatgaaacgaccgccaaaaacttccttcccaaaaaatgaggcgccggaacctaattgtgcattctgattccgacgaggacgacggcgagggcatgaccaccgccacaacccccgcctcagtttcagcttccgtcgctagcggcggcgtaagcggcagcggaagcgtcggccggccctcgccccaaaacctcagccccctaccagtccccttcccgtcactctcgctatcttctgcccccttcgtcatctccgatgacgacgaggacgtcgacgagatcgtggaccctgacggggactctcccatcgttgacgcccctgaggtcttctccccgccagctcctcccgcgctccatgctcccgctcccgctcccccttcccctccccctcctatcactaccccgtcccagaccccaatcccgactccaccttcggcacggaccccgaccccgactccgccttcggcgcggaccccgaccccgactccgccttcggcgcggaccccggcctcaatagcgcctccgcacccgtccccgctgagcggccggttgcgcccggtggacgagttcctgcggcggctcgggttgcttctgcggccggactggctcgagtcctgcgctgcggggattcccggcttcgacggcctcggtggtgttgaggcgcaggccaggcggtgcttcgagcagtttctcttcgccgatatgaactcttgcggtgctggggtgctgccggagggcgtcgggggcatgcacgctgagttccttgatggccccttcgtgcttcaggttgatgaagttgtcaatatttcagttcctttaaaggaaaggtatcgtgaagcaccggcaggacccaaaaggtgtttaaaactatcaatgacagatggcatacgacatatatttggaatggaatacagacccatcaaagacctgacagttcttgctcctgctggtttaaagattattgtaaggaatgtacacacaaggaggggtcttcttatgctagttcctgaggctgttgagattcttggtggtgtagttgacgaattggaagcagcgcgtgccagacttgtttctgaagtaaacaaaccacctcgtggcaaaagtaaacagggtggattatctttgtcttcaagagctacgcgagctgcctggccatgtagcaccgatattacaaatggtgttgcgcaggggatctcaatgcaaagagcagttaattcctcgtatccaacaggatcaggtaatgctttccaggttggtggagctacagaaactgtggttgaagagcttgttagccctcttgtagcaaaccgtgtccaagaaatcaacatgcagggctcatatgcttctcttaccagggaaactactgaaacttctatgcatactacccatgaatatgatcccactcatatcactgaaaaaagtacagggaccgtcatggaagaacgtcctgatcctcctattctagcaaacagtgtccatgaacaaatgcagcgagtccaacctgctaacggtgcacaatcttcaaatgttggcaagatcaatcagatggaacagtctttcattctaagcggtgaaaatgaaaaaccatttacatacatatacagcatgcttattgactggggtaggcaacaggacacaaaagcctacattcaaggaaaaatcaagggtctgatcacttctgtaaaaaaatttcaatataaacaacgcaccaagtacgagctttatgtatatatagatgatgggagtttcatttcagaggccttcattgacagtgatattgtgaataacatgcttggcctttctcctggagaggttactgctgcacttgctggtgaattagagtttgcatcacccagtgaagtgaaagaaactttgaaaggatttcagaagtttttggtgaagtttgagggtatgatgcttatcgagttaaacaagaactctcctgttcctgttgttcgtgagttaaatgaaggttgctcaagttctactgcatggcttctgctcggaaggctgaaaacaatttcttctcagaagaagaccatccaaactcaggatattatggacaccactccatgattgtttcgatcctctaaaccccagcggccgattataatctttcaatgctggtgcgggtgacacaatgatgtggcatggaaggagtgctaccaaaacattctcattgagcctagaagctttcgtccatctcattcattttcgtctcattttaataaccgtagaaaaaggtcctaaatgattggcggagtagaaaggctgacggagaaagtctgacggtgagatcctgaagaccacaaccgtaatcgtcggatggctgcaatgtcagaataactagtgctatccatggccacagaacgtacacg

SEQ ID NO: 26449 - DNA, 957 bp, Zea Mays
cgcgtcgcgtcgcgtcatcttttcagcgcttgtccactgcgggcctgcggcattcctttccttctcctcgaaggcgaagcaaagctaccaacgcatacaagagtgagagcagggagcacgagcgctctgagtgagtggaagacgagaggagttggagttccccagggctagggtttcattcgccacccgcgccgcccttcccttccccaggtatcaataacacctgaggttacttcacgcggcgtcaatcgtgctgtcatggcagagctagtaaaactttacagacactcccatttggatgggcgtctgcctgcatatgatggaaggaagagtctttatacagctggagcgttgccatttgcttcgaagacattcgaaattactctgcaagatgaggaagacagtcttggtggaggccaaaggcgccagagggtatttcgggtgaccatcaaatttgctgctcgcgctgatctccaccatctggctatgtttcttgctgggaggcagccagatgcccctcaagaggctcttcaagtacttgacatcgtgctacgtgaaatgcctactgccaagtattgtcctgttggtagatcattttattctcccaagttagggagacctcagcaacttggtgaaggtttggaaacttggcgtggtttctaccaaagcataaggcccacacagatgggtctttctctgaatattgatatgtcctctactgcattttttgaggccctccctgtaattgattttgtttctcagcttcttaatagagatatctcagttagaccattgtctgattctgatcgcgtgaagattaaaaaagccctacgaggtgtgaaagtggaggtcacacaccgtggaaacatgcgtaggaaatatcggatatctggccttactccacaagcaacaagggagttatcgtatgtgcatgtttcttagtttatatcagttgat

SEQ ID NO: 26450 - DNA, 372 bp, Zea Mays
atttttagttatcccggccgcatctgtagtcgtcaagcatgtctgttgccatgaactcgcccctggtgtccactctgtctctggtccgcgcttcctttagttcggccaggcggggcatcgttccatgctgtgttcgcgtagtttccctgctcgccagcgcgtcccctcggctcgcttggccttaattctcatcgcgtcatcgactccgccgttccaataattttgccgcatcacccttcaaatccgagtcctcgtccgtaggatcgtcgttgacctcgcaacttcagctcgagttaattatggtaagttgatttattattcccgtcaactaaataaatggtaggattaaatagaagaattgattgcgatgat

SEQ ID NO: 26451 - DNA, 2053 bp, Zea Mays
cccatgcggaccggaacggtcaattatccctccactgcccgccacaccctatcccccacactcaccctccgcaccggatcccgtcatcacctccgagcggcgcgccgggccggcatccaactcgccgccgacgcgccgcgccccagaacgagccgccggaacgatctccctaacccccgatgcgccgtcctattgcccgcggcgagcccaaggtacaaaccctagctctagctcctccctccgcagccgccccaaccaagatgggcgcccataggcgacaacccagctcccaccgccgcgttgccggcgccctcacgctcctcgccgcgtccgcgctcgcgcttcttctcctagcatcccgccgggttcccccgacctacggcgtcatcatcgacgccggcagcacggggagccgcgtccacgtcctcgcctaccgctccacggcgggactcccgcagctggactgggcacgcatggcctcgatgaaggctaccccagggctatcgtccttcgcggcggacccacgcggcgcggggctgtctctggcgccgctattggagtttgccaggcgccgtgtgccgcgggagagctggggggaaaccgaggtgcggctcatggccactgccgggctgcggctgctcgattccgcagtggccgagtccatcctgcagtcttgcagggaagtgcttcgggggtcggggttccaatttcaggacgaatgggccaccgtgatctcaggggctgaggaagggatatacgcatgggttgcagcaaattatgctttggggactcttgggggtgatccaaacgacaccactgggattattgaacttggtggggcttctattcaggtgacacttgttactggtgaacctgtgccaccgaagttctctcatatgcttaagtttggtgatgtctcatataacctgtacagccacagttttttgcatcttggtctgaatgtagcatatgaatcactccatgacttgctcagctcacctggccttagatcaatggccacacatttgatttctcaagctaagtacaaagatccttgcactccaaggggatttacacgcatagcaggatcagctaaacttcctgttggtgttcttgagccgaaggttgaatacagaccttttgctcattctgcggggaacttctctgagtgtagatctgcagcactaacactactgcaaaaaggaaatgagggatgtacatatcatgaatgccgccttggagcagcatttgtaccagagttggaagggaaatttttggcgacagaaaacttttaccatacttcaaagttctttggtctgagttcgaagcccttcctttctgatctgatggtggctggggagaaattttgccatggggattggtcgaagattaaaaataagtacagttcttttgatgacggacaactgcttcttttttgcttttcctcagcatatattattgctctactgcatgatacgcttaaaatgccactggatcataaaaggattgatgttgtaaaccaaatccatggcgtgcctgttgactgggcattgggtgctttcattgtgcagacgacgatgaacagaacagacattgtccattctaaggtggagaaaacctcgtctgaagacgatctacgatatggagaaaggcaggtacatcataacaagggtcagccaatgagtcgcgcacatcagcgttgggagtgggtggactttctgcagcggagcactattgaccatgtatgtagattttcctaaattgatttcttacttagtggccaactacctccagcatgttgccttgcggagtcaacttgttgagtttgagcagcaacccctgtatatgatagaaggatgcgggttgccgtggcatttgtgcatgttcagtgttgtatgtaatgttgctaaactgttgttgatgtaattagaattttgtgcatgggcatccatccgatgatgtaatcctgagataaccatgtgtctaatgatcgattgaagttctctgccatggatcatggatggcagggcagctgtatctttgtttcatgtca

SEQ ID NO: 26452 - DNA, 4606 bp, Zea Mays
atgtccgcgtgtaacacctggcgtaccggacccgaaaattttcttcgaacgagctctgagcagtgtagccctcctgtccgctgttcggtgcccgctgcccacctccctctcctccttccgacctcgccgcctccctccctaaactctaaaccctccaccagccgaagctactgccgcggccgcaacagaggtcgcgacgacgaacgctgaagaagcgccggcgagggagagtcctttactttttcctatgctgtagcaaaacaagcctatatcatcttccaaatatactcgttccgtgccggcggcctcccctcctacgcccctgccgattcttcaatcttcaccaacgtctgcgcgtagcaggctagcagtcggcacgacttcctcagatctgccggacgacttgctgttcgtcaccgactcaccagcaaccaacgtcagccatcagccggcagcaggggaagctgggcggagggtcattgcggcacggcgtccaggcgtacagcaggcaccagcaacagcccatggcaaacgccgcagatgaccctatggcagatgaagccagagtagaagatgccttcacacaggagatcaccgattattcgtacgtccctagataccatgtgttgagttggatggaaactgtggaggggatggtggccggtgtggcggcgcttccgccggtgtatttgatactgaacagaggtgcgattttcttttatatttcttccagttcatgttctccttgtgtggctggtgctggattcaaccgatctagggaagagatgttagttgatttgctgtaaaaatcaatatgttaacagagatatatgatacatgctcctgcttgctcatgatgccggtttggtgccaaggctatcttcttgagacgggatggggatggaagaggctggtgccctacagacctggttatgttgagtggcatgtgttcaagaaataccttggggactatttcgaccataatcgtgaagcttttctttgtgccgagcagaagcctgatccatttggatggattattgctaaaaagagtgccctgattgctgcagccaaattgtgcctcaagatggagaaggcacttctcaggtactgtgctagctttctcactcctgacgacaaaaggttgatcctccggatcaaggaccaggcaaagcaaatgatccaatcagagggtgatcaatctttggttgtaactatatgcttggaggtatgcttgctacaaactacaccaaactgttgccaaactagcgccagggattcgagccctccccgcgtttccttgagcatgagcctgtccgcgtgtaacacctggcggaccggacccgaaaattttcttcgaatgagctctgagccgtgtagccctccagtccgctgttcggtgcccgctgcccacctccctctcctccttccgacctcgccgcctccctccctaaactctaaaccttccaccagccgaagctactgccgcggccgcagcagaggtcgcgacgacgaacgctgaagaagcgccggcgagggagagctccgacgagtcctctctgtcggccaggttgtcggtgccgagcgcgcggtcgtcgtgcagctcgtgggaccagtccgccgagcggctgctagaggcggacgcagccctcgtgcggaagaagtgcgccgagaagagcgcgccgaggccgaggacgccgccgggcagcaggtcctccagcgcggcgaggtcttggtcttggtcttggagcagggtcttggtcttggagcactgcacgaggagcacatcggcatggtgcttcaagcaatggttcaaatgggtgtccttgttcctactggagatatgactgttgtcagaagaaccgctcaatttttccttaatagctttcaagagtgcctaacagcacaaaggaaggagagagaaatggcaaccgcagaactgggtttcaaaaagcaattaactaaggaggagaagtttgaaaagaggaagcagagacttgctgcaatcggagaggatcttttggcgattgctgctgatcaaccatttcgcttccctgccacatttacatttgtggtcagagcattctcagttctagatggtactgggaaaggccttgatcctaggtttcatattacagagattgctaagccaaatgccaaggaattgctaagatttaatgacgctggtgttgaaatagttgtgaaggcaagtttcaacatttggtgtgtggagagacatgtgtattcctcctatgacgaattccttaggctccatgaagtgtatcaatttgtcttagtatttttattcgtggggatgcctgactcaaatgaactcatgttcaacactgagcaacctacttataattttggagcctataaaatttctaagctaaaaaaggtaataaaaaggaatgatattatagtcacatcatctgaacaacagtgaagggaagggagggatagatggtctgaatgcctataaatgtcgttcccttggtctgcttcttaaatttgaaaccaagatactatagtcaaatacttctaaacttgaagcctgtaaattggaatcaccaagttaaataagaacaggggtaactattcatagctcagatggttgtcatccaatacgtgcgctaaggcacagacaggtgaggttgcatattcaatccccaagacagtaaaccattgaggcatattaaaacacattttccatgaggtttcctaagtgatcctttaggtaaacagaaccatacctagctccatatgaaactatttcccgatttgaagtacacctaagttaaggttcatacattggagctctggcagtaaaacaatagtccttaccttgagacagcttagattagaatgaggtggatggtaatatggcatgagcaacataccacagttcatgcatggaggaaatcatttttactttctttcctagccatggtagttgtgttgctccttaccaaggcactacatggagcatcatatggttcatgatgtaaacatggttttagatctgtctatactcacactcaagaaccagccaaaatgtgatattccacaacctgagagaaatcaaaatgaaatcatgtacaacatagtacatatgatgatgtgcggtgatgcgggtgcatgtgtgttgtgtgtgtaggagaggagggcgcagcttgattcaatccatgtcaagtcagaggctgctgcgaggtttgcacatgcaagtagaatttagatggcatctaactgaataaatgatctccattatggactggttatattattttctgtgcgatcggatgggttaaagaaaagacgtgaaatggtattttccagtatggactgtataaatgtaattatattcctatgctggtcctgcttcgctttcatgtggatttatcttgcaaatggtatgtggatccgttccagaggcaatgagccttgcagccagtttgcagtataaaaaacccaattatgtccactgttggttcgacgcagcgtgtgccgaggatttctactgccaagcataagaaagtatttgaaatcaagaacttgcattcattcaatcataatgtgtttcctatcaagcataagtgtgtgtgttttgtttgatatctgctttaataggagattgttcttgtcaccccaaaaatgttcccattctactttcgggcaggtgaattgcagataaatggtctgttcgcaactggtgctctcgggcgactccatcactgagcaacccttcgccccggtggctgcggtgtcgcactggctgacacctgctcgcagttgcattacaagttttactgactatgtattttcaggtttattcaatttcagttgtaatgcttctgacagcagttgtatcagtcctcttgttcagcttccatgtatccctcgcatccttccttggatccacataagtgttaatgataattttgttgcatctcctctgctgatcagagctttcaaactcatgacagaataatgtactaaacttcagtttggtgtctatctcagtgtacctacactcagttggaaaacttcaaccacactgcaacaaggtttataaaaggtttgctatgaggaaaaacaaatttatgggctcaaacaaagtgtgatagtgaaagtcattttgcttccagcttaagaaccaagccaagaaaacagatatcaactgtgacgccacactcaaaagcttgtttggtgagagggataaggttgggatgctggagatctctaagcttttgagccgtggcttcccgaaaatctccaagcttttgtggtccatggagccagggatggctctttggtaaaagacttcgttgtggatggcctcttttatggtccatgttaagtcccaagtcccactaggtggttaagcagaaaaatcttgtgatggcattaagactttcagactttgtttttgggtctgatgcatgtaaaaaggattcccagtgtttctgttgctcttgcgatcctgtgaggacacatatgagagaaatatttagtttgttgatggcaaatcttgtcttatgttcatgcctgtacctatctgatcaagcgttatgatatgatcccatgcgtggtactgtgttctttagagatg

SEQ ID NO: 26453 - DNA, 2463 bp, Zea Mays
cgggtcacgtgagtgacgtggcacgcaagcagttcagctttcggttctcctgccggcggcgccgcgtcttttcccgcaccttcgcatcgtatgccacttcagacgccatggccgtggctccgcctctctcaacccacgtctcccgaactctaacctcaaacctgcacctctggccgcggacccacggtggcgtggctcatgcgcggacgcgggctctgatcccgacaccggctgcggcgtgcgccttccgtttcagtttccgtgttcgcgccaccgccagtggctcgaagctgccgccttatcctctacccgatgtcttcccctacattaccgccgagtgggaggccgtcgcgaagggttgggcgtgcgccgccgtcgccgtatactgcctctcccgcgcagtgcccgccgcggggcgcctgccgcgcgcgctcgccggcggcggcgggggagggggcgcggctgttgtggtggcagccaggggcggggtcgccctcgctgcgtttgcatcggcgcgtgccgccgctacatacgcgcagcaggcgtttctctgggaggcggcgctgcaggcggcggggcggctgcgggagcgcgccttcgagcgcctcctagagcgcgatctcgagttcttcgagggtaggggaggggtggctgcgggcgacatcgcgcacaggatcaccgacgaggcggacgatgtcgcggatgccttgttctccgtgctcaacgtcattccatgcatgtgcttcgccatagtcaatcttggtaaaaggcttcgtcaaatatccaaggaggcacatcttagcctcgccatgctcgcatcatatctcaacgatgtacttccatctatgctgactgtgaaggcaaacaatggggaacttaaggagatcatgagattccaaaagttagctcgtgctgatctaaagaataatttgagtaagaagaaaatgaaggctctcatacctcaagcggttcgagcaacatacattgggggcctgcttgtgctctgtgctgggtcgatagttgtttcaggctcatcctttgatgctgaagagtttctgtctttcctaacagcacttgctcttgttgtggagcctattcaggatgcagggaaggcatacaatgaatataagcaaggacagccagcattagaacgcatatttgatcttatgaggttcaaccctaaggtgactgataagccaagggcaattcatttacaaagtattaatggggacattaagttccatgatgttacatttagatatgttgatgacatgcctccagtagcagatggtgtgaatcttcatattagaccgggagaaataattgctttagttggaccttctggtggaggcaaaactactcttgccaaattactcctccgtctttatcatccacaaaaagggtatatacttctggacaaccatgatattcaggacattcaatcgcaatgcctgagaacacatatcgcttttgtttcacaggacactatgctattttctgggacaattgctgaaaacattgcttatagagaccctgtgggagatattgacatgaatagggttgagtacgctgctaagattgccaatgctgaggagttcattaagatgttgccagaagggtacaattcaaatgtgggacagagaggttctagtttgagcggtggacagaagcaaaggtaaaatgctcactttccagtttccagactaccttgtatcacaaggttatctattgccagggcaatctatcaaaattcctccatattgataatggatgaagcaacttctgctttggatatcagatctgagctgctactgaaagaagcgcttagtaatctaattgcaaaacactcagtaactgttatcatcattgctcatcgacaggaaatggtcctaatggctgacaggattatttcactagagcgcggtgaattgcgagagatgtcgaaacaggcatttttgtctcaagatggtcacttcagcttaccaaggatcaggagtccaaattagggtgtccaaactagggtgagacttggcatgggtaatggtagtttctctcgtgaagatttgttcatatatttggccatggaagaaaacgattgatagaatcacatttcttgcctgagccctgctcagaactttggcttcttggaaccttgtttcatcccaacagcaacaaatctgtcaacattatcgaaggtcgtctgccggagagaatagcaggctcctcagcggcattggctcctacctgctgcaagattctcctcaagacctcaacaggaaggtcaaagcaaggtatagggttttaccaatttttgtacacatgaaaaagcacaggttccttacatcccccgcccccgcccctgcatacatgcaggatgcagtagttgagctgtatatatgccaaaataaagttattcgttttagatttttttattgccaaactccagattggtgcgtttcagaa

SEQ ID NO: 26454 - DNA, 1685 bp, Zea Mays
ctttgctagatgtagatgaacactttgaagtactgaacaatgcatggctgcaatggctttgcctccgctttccattcgaggtgatctgggcattatatctacagctgttggtagatacactccttcgttgttgaaatcattcatacaaatgggaccgcaaggagctctgggcgctacgaaacttctacgtccattcaaagaaattgttgattcgctggagctgaaaaatccatttgttcgtaactggatcgatcttctgtgctttctacttgctggagttaaatctgatggtgctctttctgcagaaatggtttatatgtttgcagaatggtacaaaccaggatgcttgcttgagtaccctctgggtggaactggagcaataatagatgcccttgtgagcggtattgaaaaatttggtggcagacttgctcttcgttctcatgttgaaaagatcttaatagagaatggtcgagcagttggtgtcaagctacaaagtggacaagttatccgtgcaaagaaagcggttgttagcaatgcatctatgtgggacactttggatctgttaccacccgatgctgtcccaaaatcatatgaagatagagtgaaagcaactccacaatgtgaatcgtttatgcatctccaccttggttttgatgcagagaatgctagagaggaccttgggatccatcacattgtggttgatgattggaacaaaggagttgatggtgaacaaaatgttgttttgatatccgttcccagtgttcttagcaaggacctggcaccgcccggaaagcacattcttcatgcatatactccagggacagaacctttcagtttgtgggagggactggacaggaaaagtgcagaatatcgaagactgaaggaagaacgttctgaggtgatgtggaaagctgtggagcttgctctcggcccaaaatttagccgcgaaaaatgcgacgtgaaattggtcgggacaccgctaacgcacaggagatttctccgaaggaacaggggaacctatggtccagccataaaagccggagaagccactttccctgggcaagcaacaccgatcccccagctcttttgctgcggtgactcgacctttccagggatcggagtgccggcagttgcggccagcggcgcgattgtggcgaacacgctggttccggtgtcgcagcattcagagctccttgacgctgttggaatctgagtggcagatacgtccgtcggtcctgaacgataatcaaagattttcccactgctgttggaaaaagatcgtatggctgaatggagaagaagacgacgacgacgaccgatacagtagagttttctagtcagaacggagactgggaaaatatgttgtacagtatattatttactacgactgcatgaagcttgtgctgcttctgacaaattggtcgcctcgttcgcctgcatgctccttgtattgttctaccgaaagctctgtggcgcatgcaggccttttgtcggacattttttttttctggtatacggaggaaggaccatgtgcttgtttgtacaactctagtcgcagtttgctgaagtccttgaacgacggcaacaaatgccagctgcgctgtcttttcattggagggcagcactggcctggttgttgtttattattattattattattattattattattattattattatta

SEQ ID NO: 26455 - DNA, 2089 bp, Zea Mays
agacaagctcaaataatagtataatatcaagtatgcaatatatatttggtctcaaagtacaagttcaaccaccttctgcaataggctaaccaactataaggataacaaaatgtagcatgtcctctgttcgtatcattgtctgcttgatcaccaccctttttgctactgatttctttgaagtcaaggctgtgaaagaaattgagcctgcacttaagaagcagctcatcatctccaccaccctgatgactgttggtattgctgtaatcagctggttggcccttctagctaagttcaccatcttcaactttggtactcagaaggatgtctccaactagggcttgttcttctgtgttgcaattggtccatggctggtctgattattggttttgtcacagaatactacactagcaatgcatacaatcctgtgcaagacgttgcagattcctgcagaactggtgctgtcactaatgtcattttgggtcttgctcttggatacaagtcggttatcatcccgattttcgctatcgctgttatcatctatgttagtttctccattgctgcaatgtacgacatcgcagttgccgctcttggtatgctgagcacaatcgcaactggtcttgctattgatgcttatgctcccatcagtgacaatgctggtggtattgctgagaactgatgctgttgatgctgctggcaacaccactgccgctattggaaagggatttgccattggttcagctgctcttgtgtctctggcgctttttggtgcctttgtcagcaaagctggagtcaaggttgtcgatgtcctctcccccaaggttttcattggtttgattgttggagccatgcttccctattggttctctgccatgaccatgaagagtgttggaagtgctgccctaaagatggtggaggaggtccgcagacagttcaacaccattcctgggttgatggagggaactgccaagcctgactatgcaacctattggaagatctccactgatgcttccatcaaggagatgattcctcctggtgctctggtcatgctcactcccctcattgttggaaccctcttcggttttgagactctctatggtgttcttgctggtgccctggtttctggagtgcaaccgtcgttttctcgcggatgcgattttttatttcattgcattggatacgacttgcgtccgctttctcacccaatcaggcggccctccgcctgcgcacgcctcgtgttttccgtctcgccaccgtgatgtcgcctctgctgcttcgtcgcgtcgtcgcctctctgctgctccacggatccctgaagtgctgctgctccggcgccacgggcggcgccctctggcagccggctgccaggggcgcgtggaggatgtagattggtcctggtggcggcgacagcggagggccagcaactgcgagcggtaccgtgctcctgcggtggcttcgtatgcagggaccggaggtctacagtagcgcgcatctagccggctcagcatcgtggatctaaccagaggaggccacggctgttgctcctccctcggcaatggcgagggttcgagacaggacgaagcacttcaaaggggtcgcaatgctctcacatggatacatcgagaaaatgggaaccactcgaaaacgtcgctcactctggctgaggtaatggaaaatcactacgcatccaaaatcagcactttcaatctttagaaaatagcactggttattggagtcattttttgaccgatggagttatcctttgattcagtaagtattttttcctaaaaaacaaatcaaccatgtggcacctgaaccaccatcagagattgcagaggagcacgatggtttagagagtgttttagtgcctatgcaggggattgtggttaatgggaaaagtacttcagagctattgagtggctctgtatcattgaggtcagctgaggtggttggaacacctgttggacgaattgtgaagtgtgaggagtttctgaaggctgcaggacctgttatggctgtgaaagaaattgagcctgcacttaagaagcagctcatcatctccaccaccctgatgactgttggtattgctgta

SEQ ID NO: 26456 - DNA, 2196 bp, Zea Mays
ctctgatgggccaacccactaacgttcagcggcagagcccgttatttccccacttcagcgcccacacttgcgccgcggcagcagaacaccttcctgacccgaattcaatccgtgcgcaggcaccctccgccggcgatggctcacgcatcgctcggcgcccgccccacgtccccgaggcgacgaccggcacaacgcgccctcgcggcgctacccgacacctgcgacgaaacgcgccaagttcaggagcgcgtcgacacaggggctcgggaacacggtgtcgccatcgcggaaccctagcgagatcgtcgggaaggtccgaagccaatgggcatggttttgcctggtgtggttggattcaagttgagtgggaagttataggatggtgtcactactactgacattgttcttactatgacccaaatgctaaggaagcacggtgctattggcaaattcgttgaattctatggtaagaatagtagagaagcatggtttacatcgttgggagcataatttatcttattcatatatctttcaacattttttctctttagttctcttttgcatttaggtgttggtgtgggcgagctatctttgcctgctagggccacaattgccaacatgtctccagaatatggagctaccatgggcttcttccttgtagacaagtagcattggactatctcaaattgacaggccgaagcgatgaaactgtatatttcactatgtgtcgatgattgaagcatacctgcgagctaacaaaatgtttgtggacaagcatgagcctgagacggaacgagttttctcttcatatctggagctggaccttagtgaggtggagccttgcgtttcaggccccaaaaggcctcatgatcgtgtccctttgaaggaaatgaagtcagactggcatgcttgcctggacaacgaagttggtttcaagggctatgcggtgccaaaggaacagcaaggcaaagttgtgaaattcaacttccatggaaggccagctgaaatcaagcatggcagtgttgttcttgcagcaatatgcagctccacaaacacatcaaatcctagcttcatgattggtgctggccttgtggaagaaagcatgcgaattgggccttgaggtgaagccatgggtaaagacaagccttacccctggatctgtggttgctactgagtacttgaaacatagtggccttcaagattatctgaaccagcaagggttccatgtcgctgcgcatggctgcgccacttgtgtgggcaactctggtgacctggatggatctgtatccgctgctatcatagaaaatgatatcgttgctgctgcggtgctgtatcctactacctgctcaaccttggggacagcatcaccacggaccacatctcctactcggggaagatccccgagggcacacctgcggccaagtatctgctcgagtatggcgtggagcccaagaacttcagctcctatggtggccgccgcgggaacaatgaggtggtgatgaggggagcgtttgccaatatgaggatcgtgaataagcttcttaatggcgaggctggtccctggacaatccatgttcctaccggggagaagctctacgtttacgacgcggcaatgaaatggaaggagatgctgtcagttttacccaattatcgagtgaaggagtatatgaagaaactttacaagacatctgtacaaccctagatgagttgcagtagattccacccattaaggacaaatggacaataatccatcatcgaagccaaatcataagctaaaaggttgagaagatggtgcttctggcatgtggatggcgctatacgattactgtttgtgactcaagtaatctatacacttatggttggcgcaaatacgttcaactaggacatattgattttgaagatgatttagttccacataaactagaagcattgaaagatagcactatatctcaggaaaagatagaatggaactcaaattttggtggttacactggtgtggagacttgaattcatgtatacacttagttagactcaatgttagtgcaaacagttgatgaccaagttttttaattagtattttagtttggatgtatagtacacttatgtatgagttatttgacaatgcttatttatgagatattgaatgacacttgtctatgttatattaattataatgttattaaatatatgggcatc

SEQ ID NO: 26457 - DNA, 94 bp, Zea Mays
ctttccctggctgtcttcgcgcgagcaccgaggtgttgaacacctagaagaagtggtgtctgaagaaggagttcacttcagtgcctgctgatcc

SEQ ID NO: 26458 - DNA, 1326 bp, Zea Mays
gaagccagccaacgccaccaccagtccaccaccccaccatcagttactactgcctgcctgcctgcctgcgtctctcctccaggtccaggctccaggaatccaccccccacctcctcggattctttccccctctccagctcccccgtcctgcagccgcctgcactgtgctgccgccccgttcgcctcccggcctccagcctcctcggttcccgcgggagggccatgaagttaaggacaaaacgacctgaatggaagtcccttgtgcctctacaactgagcagattgagcaggaaatctgccatgcgtttctttttgttccccaaggttcagtcggctggtcaatcgccagatgataccccagtttatcttaatgtgtatgatttgacgccaatgaacggttatatatattgggcaggcctgggcatatttcactcaggaattgaagttcatggtgttgaatatgcattcggagcacatgactttcccaccagtggggtctttgaggtagaacctcgccaatgccctggtttcagattcagaaaatcaatatttcttggtacaacatgcttggatccaatccaagttaggcagttcatggagctgcagtcagtaaactacaacggcgatacttaccatcttatcacgaagaactgtaaccacttctgcaaggatatgtgctacaagttgaccggtaacaaaattcccaaatgggtgaatcggctcgccagaataggcgccatttgcaactgccttctcccggagtcgcttaagatctctccggttggccatgacccaaacagtcaatccgaagactcggagaagaggcgtctgaggaacccattcagctgcttctcttcgatctcgagccaccggcagctgccgtcgtcatctcctttcccaccatctcctgtgaaagggggcctcccccgttgctcgtcgaggaaaagcagcacggcgtctccgaaaaataggtagcctgccctggggcgcgcccctgcgtaacttccgagtcgtcgtgctaattcctgcggtgtcaacatctggatccgcacggcgagtgctgtgctgtgctgcgctgtagctttctgtcagctgttggaaaaagcaaaaagagagagaaaaaaaaacgctataaactataagttcaaataaatgtactggacgaggctaattttatattgtaaacgttggtgtatttttctatgaacttcattacagttaaaaaaaggctttggctgtaatttaaattggaggaaccaggagagaggagaacggatcgtggtcgtccaggtattatatatataaaagatcaacttgttgttctaa

SEQ ID NO: 26459 - DNA, 2181 bp, Zea Mays
acatcctccattagtccgcctccggccaccccctttcattccgccgcaacgccaccgcccccaacgcaagtttccggcgatggaccccgcggcggccgcgctaggtgcagtacccgccgctggcgcgccacctccgggcgcagccgcaggggaccagcaggcagctccccgggttgagcggctcagcgcgggggtgcagcagcagttgaacctggaggggatgcgcgcgcgcgcggtggggctgtacaaggccatctcccgcatcctcgaggactttgacgtcatcatacgcaccaatcccagcgcctcccccaagtggcaggacgtgctcgggcagttctcgatggtgagcatggagctcttcaacattgtggaggacattaagaatgtgtccaaggtgtttgtcgtgtacccccggaatgtcaatgccgagaatgcaacaatactacctgtaatgctgtcgtcaaaactgctgcctgagatggaagttgaggaaactactaagagagagcaactattgtctggaataactaatctacctgtgcctacacagattgaaaaattaaaggttagaatagacatgattgggagtgcatgcgaaactgctgagaaagtaattgcagaatgccgtaagagctatgggctgggaagccgtcaggggacaaatcttggtcctacattggacaaagcacaagctgcaaagatacaggagcaggaaggcctacttagagcagcagtaaattatggtgaaggattacgggtacctggagatcagaggcatccacaatctcttcctatccatctgatagaagtgcttcctttaggagacggtgcacaaaattttggtgatagttctgttatcccaaaaatatgtcaacatttgcacctaatagtgtcaacagccagggaaatcagattcaggcatccggaggacagttacttggaaggcctgcgccatcacctggaaccacaggaacccctaatttcgagaatgtgtccactcctccaatgccatatgctaactctcctaggtcaggcaccaatatgatgaataccccttccccccagcaacatctaacaccacaacaacagaggcaaaaactgatgcaacattctcaaccgcttcaccagccggtgaggccatcagctgctgggatgctagcacagagcgcacttcctcaactacaagatttacaggggcaggctcaacaaaaactacaggtccctggtcaacagcaaatgcaatacaaccaagcattgtcacaacagtttcataacagacagatgcaacctggacgtatgcaaccaggcatggctcagagtcaattgaatcaaggaactcagctacgaagtcatttaggccagtttactggagctgcaaataatgcgatgttcaatgctgcacaggcatcatcaaactcacaaatgatggcaaatatgcatggatcacagtcgcttatgccacaaatgcagtatggtatggctggtgggcatccacataggagccatccccaaatgctgactgaccaaatgttcggtatgggagccacaaatagcagcatgatgggaatgcagcagcagcagcaagggctatacgggaacatgcaggcaggtgcacagaacgtgccacagggtatggcgggccttcagaaccagacccagaatcccaacttcactcagcagaggcaacaaaaccaacaatgatttaacactaacgttcacggaggttgaaagatgagcaatatatccgtcgttttgctgcttgtctgttggtctttactcagcttatctgtgagactgatagtagccccaggttagccttcgttttgctgtaaatcattagcgagatgcaggtcaattataattatatacgttgtaactgtgtttcggatatgtctaatatgttttgttggaatcgtgttacgcgcgttccttttatttataattaagcctcgcagcaaggccggcaatcgaattgcatacggctagacgggtgggtagttcaccaggatgaaaatcggtcatcaggtggaccctagaattatttgaggaactcacagatgtactgtaatatgtattccctgttgtctttctggataaatatcccaagatgttattacgtctttcatgcttgcaatcatgaggccccattgcttgcatgcaactcgaaaacgccgatga

SEQ ID NO: 26460 - DNA, 1710 bp, Zea Mays
aaaagctactactacatcctgaatctgatgattcagctcaactttcctagattgagactgaaaagctgctagcccagttagttgagactgagatgaacagacgtttgaaggaggacacttacaaaggaaagaagtttaatgcattctgtcacttcttgggctaccaagctaggggagcactgcctgcaaagtttgattgcgattatgcctacgttttggggcatgtgtgctaccacatcatagctgccggattgaacggataacggatacatgactacagtgacaaatcttaagaatccagtgaacaagtggcgatgtggtgcgactcctatttcgtattactactttattcgcttgatgggacgcaaggcttcccatgtggcattggaatgtgctcttcaatcacatccaaacatggtcaaattttcaccattgatccaacctctgctacggcaatttccagcatcggcggtgtgctctttacaaagccttagagctgcctctcctgcaaagtctgaacttgcagagatagtcccacaagagaaatcaccaaaagattccattcaaccaatgtcaccgagtccaaggtattctacctcaagatgaagggcgactaccacaggtatactgttatcgctagcagatctagaccatgcaagttgtggtttgtagagatcaaaacttaagatctgtgtgtagatatttgtctagacaatgggagtgacaggatgctggtttttagtaaggttggttgcttatctatgaatttgcctgtatgatgcatgatcctgtgctgtctcctgtagtacatggttgaaatataaatttgtgttccatgttttttacccgccccctacacgtatctcttggatatctgatttctactcatgatgatttggcatgtaccttgctgagttcaagtcaggtgcatagaggaaggatgctgcggggagcaccatgaatccctacaaagctgctcgagtttcctctgactgttcaccattattggaagcaggtcaggcagagagccttggaaccgaactcttggagatggtgcctagcagggaagaggagattaagttgaaagaataaagggaggatgctttgtcgacttttgtagttaatgattatgtgagacttcagtttaagggctcaacttttactggttcttggaagtcatttagtagccctaagatttcatcagcattcttagtagtaattgctatagtatcaaatgggattgtggtatgagttgctcgagtactaagtactaacgttgttgtacattgtgaagctaagtgggtaatatcaaaagggattaagatttatgtgtggtgcttactgtatttgtttttattattttattgtgctttgtacatgtaccgtcattcttactctggtgttcttttaatgcaaagtttgacacaatatatttttatacgagagaccgaaggttacttagtattgttttctgtttcttttatcgtctttgcagatctatgtttggatgatgaaaacagtgctactcgatgtgaagtccaccaatactatagtttaaattaagtctaagatcggtgctttagagggaattggtaagagccagcaagcacttttttttgctggaattatggtagcagtcaggtttcagatttctatgagttcggtgaataaaatgagcttatgggtgttgtcaatcttttttaatttcct

SEQ ID NO: 26461 - DNA, 1094 bp, Zea Mays
caaattcccttctccctcacgtctctttctctccccaagccgccgcctccctgccgttccgtggagcaccaggccagtgccgttccgatggtcattccaagccagtgccattctcctttggccgtccctgctccagccgtgagctcacccaggccacggcctcgtcgaaccgcacagcccctgcgctccttccccagccgcgcttagccctatcctccctgctcgatctccttcgagccgtaacggctccctggcgtgtccggctccctgcccctctccatggcgtcgcccagctctagctcgccccccctctgatctgtgcgcaggggtttcttccatggcgagctcccctgcaaacttcatctagccgccggccgagtttctttggtggtcgcttacccccagcatcggccagagcttgctgtcattccccaacaaacatgtggttgtaggtgagagatttcagaagtctgttggacgaagaaaagagaagtgaaatttgtgcagcgcccgtcaggtgttaggtttaatagatattgtgtctaccgtgtgagggaatcgtgccagcttcctttgggtttgggactgggagctccatcgctctatgcggcggtgctcgcccgtgtctcagctgccttcaatggcccccttgcccgcgcagtcgtctttggggtccatattgatggtagtccctctttctttgtgtgttcacaagatgggtcggcagttttagtgtctcacacgcagtggccacgggatttttcaagtcacttggtcgtggaagggcttcttattgcagtcatagtgttccagctctccaggaagagctacaaaccaccaaagaagccactcactgaaaaggagattgatgagctatgtgatgagtgggagccagagctgctatgccctccaatcaaggagggggccacaatagatgctccaacattggaaagtgccgttggaccacatacgattgttgattgttgatggtaaagaagttgtgaactttgcatcagcatgaggtctggagtctagacacagcattgcaaactgaggtttaatcatcttagcaactacgcaatatgatttatctc

SEQ ID NO: 26462 - DNA, 1699 bp, Zea Mays
cttcgtttttgggtcctcgcgcgcgggaggaaaaggaaggtctcgcacgggagcaagtagagggattcgcgagcctacaccgtatctctgcgagactcccaagatggataagctcagtggttctgcacgtcttatgattgtttcagatcttgaccatacaatggttgatcatcatgacgaggagaacctgtccttgcttaggtttggtgccctgtgggaatctgtttactgtgaggattctctactagtcttctcgactggaagatcaccaactctttacaaggaattaaggaaagagaagcctatgctaactccagacatcactatcatgtctgttggcactgagataacatatggggaggcaatggttcctgatgatggctgggaagaatatctgaacaataagtgggacaggaatattgttgtagcagaaactgtgagcttttctgagctgaagcttcagccagagacagaacagcgcccgcacaaggtcagcttttttgttgataagaagaatgcccaggaagtgataaaatctgttgccgagagattggacaaatgtgggctagatgccaaaataatatatagtggtggccaggaccttgatatattacctcaaggagctggaaagggccaagcacttgcatatttgcttaaaaagctaagctcatgtggaaaaccgcccaacaatactcttgtttgtggtgactctggtaatgatgcagaattattcagcatccctggtgtacatggtgtcatggtcagcaatgcccaagaggaactacttcagtggtacacagaaaatgcgaaggataacccaaagataattcattcaaatgagagatgtgcagctggtattatacaagctattggacacttcaagctaggacctaacatttctcctagagacctgcagtttccttatgcaaaggaagcctctttcaaacctacagatgctgtagtgaagttctacgttctctatgagaagtggcgcagggctgaggttccaaagtctgattcagttataaagtacttcaaaaacatcactcatgcaaatggagttaccatccatcctgctgggcttgaactctcactccatgcatccattgatgcgttgggatcatgttatggtgacaaacaagggagaaagtaccgagcatgggtggacagactttttatcacacagactggttcagatagttgggtggggaggtttgacttgtgggaatcagaaggtgatgtgcgtgcgtgttctctgtcaagtcttgctttgattctgaaggctgaatccccagagggctttgtgctaacccacatccaaaagacatggctgaacggatactcgtcaggggttgagcaggcgtttaagctgtagagcagtataccgtctcggctcgtggttggagttttcttgagaatagaatagaataatgtacctgtttataatattaacttcccaaaaccgcactggaggatcaccagggagaggattcggtgccttctcctatttggcgcgtaagataaatgttttgtctcatggctttcatgagaagatgaaattgactcatcttggtatatatttacaaatcttgaataatgcagcgttatctatatccagggatgtcaacggcaatccagggaaattgggtttttacttcattactcattaatgctttatttggttagaagatgattgatg

SEQ ID NO: 26463 - DNA, 3758 bp, Zea Mays
gccgggtgcccgtagcgccgccgtgccgcagacgcgcggacccctgggcccattgccctcgtggccccgtgccgtgctctggcttcctttctgaacggatcccctcccccaccaaaaaaaaaaaaaaactccgacgccttgggccgttggacgcaactcgcgagccccccgaaagcaccgcccgctcccacacccggcacgaggcggaggcacccacacccactccggtcacccaacttgactcgccctccccctacctccgtcgctcttcccgtgaaaccctccaggatccaacgaaaaaggcgaaatctccgaaccacaccgccataatcacacacgccaaccggcggcccagggccggctttcccccctggttccctcctcaaatggcctagcggaggcgggtgtctcttttctttcccctcgcgtcgcgcctcagtgagggcaaggtagagtggcactgggaaagacgcgcgccgtgccgcctcgcaatgcccgctcccgaccgtgccacggcggggggcggtgccgggggccacttccgcggccacgcgcacctcaccaactgcatccacctgcgccaccaccacgcgcacgcgcacgcgggagcgggaggcgcgtcgtcgtcgggccggaggcggagcccggcgtccgcgtcgctgatgcgcgaccttctcgcgctgcagcgctcgcgatcgctccgggacccgtccacgcgccgctccgtcgagtcgtccagggtggcggccgaccccgacgatggcaccgacgacgacgacgacgacgacgccgatctccccgccaagtcccgccgcagcgccggggcgctcaagacgctcctggaccagctagccgagaacccccatccgaagcccggccgccgcccgccccgccggttcaaacgtcgggcaggccgccgcgccgccgctgccagcaagcctccagaccgcgcggccgcgctctccgtcaactccagctcccaggaggccgtctgcggcaacaaatacctgttccatggcggcggcggcggcgacgacgacggcgatggcgtggtggagctgcagcagcatttgccgcaggactcgcgcaacgtctgtggcattccatggaactggtcgcgtctgcaccaccggggcaagtctatcctcgacatggccggccgcagcctttcgtgcggcctctccgactccaagtcggcggcggggcgaaagtccgaagcgcccgccgcctcaggtgtccgtccccttttccccgttaagtccgagaggctggcttcgtcgaccagttcggactcggacgcgctgcccctgcttgttgaggaggctgccacctccggtgctcgcaaacgcattggcgtcatttcttctggaagctactccggagagcttgggattttctctaaccagacaagcgagatggactccgacctgctgtctgagtctcagtcggggcacaagtcactggcctcgcgctcgcagcatggccgtgggcgtcatcgtagcctgacacagaagttcgcaccaaagacgttcaaagacgttgttggccagagcttggtggtgcaggcgctgtccaacgccatcctgaggaggaagattgggttggtgtatgtattctatggtccgcacggcacgggcaagacttcgtgcgcccgtgtctttgccaaggcgctcaattgcctctcctctgagcaccccaggccctgtgactcatgcacgtcgtgcattgctcacaatctcggcaagagcaggagcctgatggagattgggccggttggcaacatcgacatggagggcattgtggacgtcctcgataatgtgatgctttcacctgcaccatcacactacagggtgtttatatttgatgactgtgatactctgccagctgacacttggagtgctatctcaaaagttgtggaccgggcaccccgtcgagttgtgtttatccttgtcagtccaaaccttgaacttcctcacatcatcctgtcgagatgccagaagttctttttcccaaagctgagggagtccgacattgtcaatacattgcagtggatttgcaccagcgagagtctagatgttgataaagatgcaatgaagctaattgcatctcgttccgatggatctttgagggatgccgagatgactcttgatcaactcagtttgcttggacaaaggatttccttgtctcttgtccaagaattggttggtctggtgtctgatgataaactggtcgatttgcttgatttggctctatctgccgacatggtgaacacagtgaagacactacgagacatcacagaaaccggcgttgagcctttagcactgatgtctcagcttgccacaataattactgatattcttgctggttcgtatgcatttactcgagaaaggcccaggagaaagttcttcaaacgtcctaccttgtcaaaggaagatatggaaaaactacgtcaggccttgaaaacactatctgaagctgaaaagcagttgagggtttctagtgacaagacaacctggcttacagctgctctgcttcagcttgctcctgataagcagtacctgctgcctagttcatcaactagtacaagtttgaaccatggtgtgctggttggtccctttcctgataggggtgtagggagggccccagcagttgagaataaaggtaacctggcaggcacgtcttatggggaaaagagaactgttgaacacacagaaaatggtcatgtgttgtcaaccagttctgtcagagcaaatgagggaactaaactcagaaaagcggaaaatgaaatggtctggcaagctgtgcttgagagtatccaatcagatacattgagaaaaatgatggctaaagaggccaggctaaactctatcagccttggaacagaaccaacagtgcaactaataattagctcacatatcagtcatactccatcaatgtttccttaccctgagaatgactcgacactgaggaggtcctttactaaacatagtccactctcttctggagaaggtgaaataattgaagttggaccttctcgcatgcattggcatgctcaaacaaataatgatgttcttgacgtaaatgaaagaagaaaggagaacacatgggaggaagaaacttcgtcatcaccaaaccaagagagcgtgactaatccaaaaggaagaaatgggaacagacagaatcgacagaacagcatagtaagaggaaaggtatctcttgctcatgttattgggagggctgaagcttgttctcagcgaggaggctggtctagacgaaaagctatatcgattgctgaaaagctagagcaagagaatttgaggatggagcctaaatcgagtctactttgttggagaacctcaaggactcgtcggaagctctcttcaattaaggtcaggaatcgaagatcacgcaccatatcaaggctcatattgtgtggaagatgcatttcgaccaaatctccaagatagaagaatttgaatcgtagaatttgcaacctgttaacttagcattcataatttattctgtctgtaccttgtaggctgtagccgtgtcagtttgtagatccttctctctctctctctctctctctctcaattctgtatatttcttgacatgtaaaaaacgacgatagaagtgacatagtaaattcttctttcaaaatgctctgtaatttttttataggaagactagaataaaaactttgtattcggaagtctctgataattgataaatgtccttagtctccatagacactgaac

SEQ ID NO: 26464 - DNA, 1576 bp, Zea Mays
gctggagcaacgtcgacgagccgcacagggagtacaagatcattggcgatgacactgtgtactactatcatgacatgatagtggaaatgattaaatggggatatcaagaaggaaaaactctctttggatttggttatgatttccgtcaaagcaacaggctctcagagacacttgacagattttccaaaaagctggagtcagtgtacacagcttctggtggaaaaaagatcaatctcattactcattcaatggggggattacttgtgaagtgtttcatctctctgcacagtgatacatttgaaaaatatgtcaagagttggatcgcaattgctgcaccattccaaggtgcccctgggtacataactactagtctgctcaatggaatgtcttttgtcgaaggatgggaatcaagattctttatttccaaatggtgtatgcagcaattgctacttgagtgcccatcaatctatgagttgctggcaaaccctaacttccagtggaaagacatcccactgctacagatttggagagagaatttggataacagtggcaagaaaagtgccctgttagagtcgtatgagcctgaggaagcaataatgatgattaaagaggctctttccagtaatgagatcattgctgatggcatgcatattccggtgccccttaatttggatatattgaattgggcaaaggaaacttatgatcttttatgcagtacaaagcttccggaatcagtgaaattctacaacatttatgggattgattatgatactccacatactgtctgctatggcagtgaacagcatccggtttcaagtcttagtagcctcttatatgctcagggaaaatacgtctatgttgatggcgacggatctgttcccgcagaatcagcaaaggctgacggatttaatgcagtggcaagggttggggtggctgctgaccaccggggaatcgtgtgcagtcgccgcgtgttccggatcgttcagcactggctgcacgctggagaacctgacccgttctacgacccgctgagcgactatgtcatactcccaacactctacgaaatcgagaagcatcgtgagaaacacggggatgtcacgtccgtagcggaggactgggagatcatctccccgaatgacggcaagaccttgaggccaggcgagcttcctcctatggtcagcacactgaccacgagccgggaaggcaaggagggtgcactggaagaggcgcaggccactgtggtcgttcacccggagaagaaggggcggcagcatgtgcaagttagggctgtgggtgtcagccatggtggctaaagccgtaggagccaccactttggttgtctactctatctagcagtagcagctatacctgtaggtgcacgcactgtaaaattggatgtacatatatggctatgacctctgtagggactctggttttagaactataaatgggcaccctgcctgcttgtaaatgttcagaaccgaaaacacaggccctgttctttttttttccttttttaaaaaaataaaaagatggtaaaggattccattacttggaaggcacattacctatgtgg

SEQ ID NO: 26465 - DNA, 1409 bp, Zea Mays
gcctactccagtctccaggcccaggcaaaacagccccggaccgcgtgcgtttcgcttccggcttccgcccctgctgtttcttggcgttcaccccctctttctctcgtggcgacgacggcgaccgtcgccgcccccctacgcgctaggtgccagggtccgtcgggtccttcgctggcgacgagcacctaccaggcgatccagtggtgtgtttgggaaggtttgcgctacagaaagatcacttccaacatgaatgaacgctttccagatgctacatcagaagagctcgatgtgagtgatgctacatgtattatttgccgtgaggagatgactacagcaaagaaactgctctgtgggcatctgttccatgtgcattgtctaaggtcgtggctagaacgccaacacacttgccccacgtgcagagctccaatcattcccgcagataatggacatgctgtatcagcacgacaacatggagcccaggctggggttcagcctggtactgccactccatcctcagaaggagcaccaggtgagaacatgagcaggcaccaagcaaaacttgaagctgctgcagcggcagcttctttatatggaaggtcttttgtttatcctccagcaaacaccctaaaaaggtctgttcctcctcagcctgcatcaagtacaccacaatctgaagcaagtagctccaatcatcagtcacaaaaagaccaagaaatgcagtcccgaaacagcagcgatggtttagtgcctctgcctcttaatgcagatggtgctgttggttcaggaacaagcacaagggaccttgaaaattcacttcagaaggcacaagaaaactttattaagagccagattgagatgttacagatccaactgcaaatggtgcagcgtggcgctgctgggccgcccagtaacgagaatactgagcacacagaagaatgactgaatctgtgaacagacacttctgcatcgtggtgtaataataaggagaatactgatgagcacacagctgaatctgtaaataggcggcgatgaggatgggacaaaagaaagccaaggattggcgatacctggggctgggggaaactgttacatgatgtcttgcctggatttttggcaggcctgttaatttatgcttcactattagtgccttgttgccagcaccagatgtttctctctctctgtgtgtgtgtggtggtttctgtacatgaaagccttttgacgggagaaccaaccatggctagtttaattatgaagttcacttgttgtacccgagggaaaatagaaatgactcttgtttttgcctatctatccatgacttgttgtaccgaggtcctttgattgcagaggcgactgtgagcaacatagacggcaggggttgggaaaagatggccctgttgatgctacaactg

SEQ ID NO: 26466 - DNA, 977 bp, Zea Mays
ctaaaacttccacttgttctagccgtcacggcgctaccagttctctgccgcatctctctgttcctctgtttcttcctcttctctaatacattccactagtaatctgttaacacttcgtcatgaagttcggcggctcgtcgctcgcgtcagccgagcggatgcaggaggtggccgacctcatccttagcttcctcggcgagatgcccgtcgtcgtcctctccgccatggggaagaccaccaataacctcctcctaggaccctccatttctagctctcagcgcctgggtcggggtgctcgattctttcgcttactagctaacaaggctagatgtgcgtgtgcctgattcgttgtctgtgtaggccggagagaaggcagtgagctgcggtggaggaggggcgtccgaaatccctgagctcgctgtcatcagggagctgaatcttaggacaattgatgagctcggtttagataagtcgatagtttcagggaccgttctccccaacacgcaggggtagcgtaggaggtgttgtggcggcattatctaggaagcggtctgtggacgtgaggcggatcaacccgaaggtgcctaaggaggaggctgtcaccatctccggtcgactcgtccagatcctctccgaccatgggcccctcaccatcggcaacacctggaacaacaccaaggtacccaatcaaccagtcagtcaagcagagtggcaaaagccggggagcgatgcaggcgtcggagcagcaacaacggaggactctgctggtgtagatgagaaggaaacacacaaagagcatcaaaagcaagttcaacgatcttatgtcaacccatccacctctgaatgaggcatattcagatgtgtgtgtattcagtttacggagctcaatatgttacatcgacctttccaacctgccggcagaactcaagaagctcaagcacaagaagtgcctcgtccagtccccccaactccttcat

SEQ ID NO: 26467 - DNA, 1707 bp, Zea Mays
aaaagcgttcgcgcccctgcgcccctcactgcgcatccgcatcactgcgtgtcctcctcctctccccctcactgcggcgcatccacatctgccaatttctccacctcctcctcctcgcccctgtgcctcgacatctcgcatccgctccatctatggaaggccaccacgcgccatggatcgccgctctctaccgccacctcaattgaaggttcaccgctctctacgcggatccgccacctcctcctcggccgccgtcaatagaagaattccagagatgcaattcccgaggccatggagcagcagacaatatcaattgccaaagcagccattacaatagtactcattttagggacttcatttcttgcagctgccaatccaattacaggatgctatgacgctcttaagtgatcatgaacttatacattgaaataatggtgggcctcgagaggccaggaggtggagaggagttcaacaagtactacatcttgtctgctctcctatccgtggattggtgagtgcaaacaacttcctgctaaaagttagcaaggaattggttgatacttattgatgtacgtgtttgttcattattattgtaccatgtttggttggaatatttttaaaagaatgttgaattatgaacgatatgagttattttatattctatattcttttggtttatgaaagggtgcctgaaatatcctatagatgtctttagtagaggatccaaataatggcctgcaaggtttattgaatcggatcgcacaaaactccatctgcttcagaattgagctaagcgcatcctaacatcttgactcctatatcgatcaattatttttgttacacatttgattctttagtttcgtagagggaggaacatcgtgggatgcaggccccacggaacaccagatattttgaggtagaccgcggcgaggtgcccaagggcagcgcctagatcttcttctggatggtcaagttctgtaacgacaatgtggcagaggagatgccctgatcttcgtttaaatgcaggtcagtttgcctactaagcatccacaaaatctcattataagttctgagaaggccaagtcaattgttcagtatattacaaaagtcaggttggagaactcccttgttcaggcttttgtctttcttctgcagaaggagagatgacgtgctgcatgacatgatggcatgtgaggcagcaacctcttctccgcaacccttgtcatggcctggagttggtgttctaggaaggagcacaattttattagggtagccaccagagttgaggtcccttttcaatggacgaacttggtgctgtggacgacatctgctattgtagctaggcgcatacatgttttcctataaatgctagctctgcaatcaccaaaggaaaacacaagagtactcttggaggaaagtttagcattcagtttaacaaaccttaccaactcatgccttgtttgaatgcaataatgcatgttatgttgccctgttgttgcttggacacatgcttggcatggctattttctggttatgtcacaactcacatctcccatgtaaatttatggctatgatatgcatcaaacaagcttatattttgctcttaagttggttcaaacagttctaattcattttaataattatctaaaattggtttgataattggtgcaataaggaactcatttgaaaggtaagagttatgtgttg

SEQ ID NO: 26468 - DNA, 1590 bp, Zea Mays
aaattcgaagttcccttgaagttatgcactatgatggttgaagtattcctcaatgatgaccatctcattcgccatgttgtgaagttcaacttgctgaaaccaataattgatgtctttgttgacaatggggagagatataacatgctacattcaggagtactcgaattgttggaatacatacggaaggaaaatataaaaactctcattatctatgctattgagtctttctgggatgaacttgccatctttgaacactttggaagtattcaggccttcaaactcaagtatcaacagtacctggagagcgctgaaccaaggttgaatgctagtgtgcctgacatgagaaagaaggcagaacaaagaggtcttgagaaggaagaggaagactacttcaatgaggacagtgatgaagaagattcaggctccggccggcgggctaaacatgcacagaaccaaaataacaagcctaagtccaaggtccccaatggaagtgaagctgatgacactgatggcgcctctaggcctaaatctgctggacttgtggactatgacgatgatgacgatgaggacttcaatccaccaccaaaggagccttctaggcctgcagaggatgatgtgcccttaaacatatccccgttgaagcggaagccagtgaatgcagtggatgggaaacattcagacggagagggtcgcaggaggcaaaaaatagaaactagaattagttgtgctaaaattgctgctgttactagtacagctattaagcacacagatctacaaaacaagtatgcttcccacttgcttacgtcagccacaccaagtactgaagccaatggtatttttagtgaacatggtactaactatgaggagcaacaacatcctatggagaacacagaaacttcacgacaaactggtggtgattgtataaaagatgtgggcagtatgtctcccgagaaggccgtaaatactaccaatacaagcgattcggagccttattcagtaagatgactactacacagctggttggtccatgtacccatcctgtgctgtggtcaacaggaaggaatcagaatgtgtttggctccaagcgctgaatgcatcgatatcatgctggaaacatgattggaggtaaacatggtcactccatccgcaaagaagaatcatgtgttcaaccagtgtcaattcaacagaataaagaagaatcatgtgttcaaccagtgtcaattcaacagaataatctgttcagcagtttgctttatccgtgctcattgtactacgaacctccgccgtctacttgaatatcaagcctccacgggcagcaaagaatggcgcaaattattgagactcgacagcaatgagcttgatcagtatgttcagggacggtccggaggtgtccttgagggggtcgccgatgacggcagctttctgagcgtgcgacccaaccgaggctatatctaacaaactgcactatgtaaacagtctacattgtaaaataatattttacacggttatatacactctatttaagcatgatcttagtgtggttgtttaaacatggtcttagtgtggttggatgcaccacttgcccttgtt

SEQ ID NO: 26469 - DNA, 1015 bp, Zea Mays
agcgcttcgagccctggcccctagctcgcattgcgagttccagcgagccaaccaaaccattagaccaaccaccgctccgtcagtccctctccttccttcctagttcattccctcacctcatctaaccaagctcccgagagcagagagctgagagagggagagaaaaagtaatccgacggaaacgacaagggcgcggcgagggcggggacgggaaggccctgggcgcggaggcgccgagcacatggcatcgtcgagggtgataccgtcgtcctcgccgtcgcacacggcctcggatctcgcgcgcctagcgcaggccgccagcaggcccggcggcgggggcagcgggccgggctccatgaacgtcgaggagctcctccgcggcatctacagcgacatgcccaccccggcgccgcccgcgtcggaacccggacgcccgatgcccccggccccggcgccggtgagcgccacgcggaagacggcggaggaggtgtggaaggagatcactggcggaggtggcagtggggaagccgtggctcccgtggcggctcaggctgtcgctcccgatggtggcgctggcacaggcggcccggaggtgacgctggaggacttcctggccagggagagcgcggtgaaggaggatgaggttaagatttctgtcccccccgcgccggtcatggggttaccgggcggagcggagggcgtgagtgtgcctggcggcggaggcgggagggaacggaagcggcagcttgtgagtacagtggatcgcgctcgctctgctatccagcgagagaaacgaatgataaaaaaccgcgagtctgctgccaggtcacgggagaggaagcaggcctatatcgccgagctagaatacatggtaacgcggctcgcggaggagaaagctgagttgttgagacaacaggaagagcagttccagacgcggcttgaagagttcttacagaaatggaaggaaaacatataaatgcccttgcgacttctgaggcttcaggacataaggtga

SEQ ID NO: 26470 - DNA, 3358 bp, Zea Mays
atatcactcgtgtgctcgcaaacaagcgtccgagttggaggcgtggcggcccgttttgcatgccgtagctctcccggtgttcctccccttccgaacccctcgccgcctctccgtctcgtgattcgaatcactgccccattgcgaacgagccgccacagctgctgccagcctcaaggaagggccccggttcccaatcccagacgggccagcggatcgatcgaacaggcggccggccactcgggatcgggccggggccgcggcggcgcatgagctctgacgccgcgagggggcagcgcggcatcaactgcacgaggggcgacgcggcggcgatgccaacctcatcgccctttgtcggcgacagcggcggcgcgggctccccgatccgcgtcgagcgaatggtccgcgagcgtagccgccgctacgacatcttcgcgtcggacgcgatggataccgacgccgaggcggccttcgcgctggatggggtccagtcgcctggacgtgcgtcacccgccaacatggaggatgctggcggcgcggccgcagcgcgaccgccgctcgccggctcccgcagcggtttccgccgcctaggcctccgtggcatgaagcagcgcctcctcgtcgtggccaaccgcctgcctgtatccgccaaccgccgcggagaggaccactggtcgcttgagatcagcgccggcggccttgtgagcgccctccttggcgtgaaggacgtcgacgcgaagtggattggctgggcaggcgtcaacgtaccggacgaggttggtcagcgagccctcactaaagctcttgcggagaagagatgcataccagtgttcctggacgaggagattgtgcaccagtactacaatggatactgcaacaacatcctgtggccactgttccactacctaggactaccacaggaggacaggctggcaacaacgaggaactttgagtcacagttcgacgcgtacaagcgtgctaaccagatgttcgctgatgtcgtgtacgagcactaccaggacggggatgtgatctggtgccatgactaccacctcatgtttctgcccaagtgcctcaaggaccatgacatcaatatgaaggtcgggtggttcctgcacacgccgttcccgtcatcagagatttaccggacactgccgtcccgcttggagctgcttcggtcggtgctgtgtgccgatttagttggatttcatacttacgactatgcgaggcattttgtgagtgcttgcactagaatacttggacttgagggtacccctgagggcgttgaagatcaaggaaggctaaccagggttgcagcgtttcctattgggatagactctgatcgtttcaagcgagcattggagcttccagcagtgaaaaggcacgtcagtgaattgacagaacgttttgccggtcgaaaggtaatgcttggtgttgaccgacttgacatgattaagggaattccgcaaaagattttggcctttgaaaagtttcttgaggaaaacccagactggaacaacaaagttgttctactgcagattgctgtgccaacaagaactgacgtccctgaatatcaaaagctaacgagccaagtgcatgaaattgttgggcgcataaacggtcgatttggaacgttgactgctgtccctattcatcatctggaccgatctcttgatttccatgccttgtgtgctctttatgcagtcactgatgttgctcttgtaacatcactgagagatgggatgaaccttgtgagctatgaatatgttgcatgccaagggtctaagaaaggagttctgatacttagcgagtttgctggggcagcacaatcacttggagctggtgccattctagtaaacccttggaatattacagaagttgcagactcaatacggcatgctttaacgatgccatccgatgagagagagaaacgacacagacacaactacgcacatgtcacaactcacacggctcaagattgggctgaaacttttgtatttgagctaaatgacacggttgctgaagcactactgaggacaagacaagttcctcctggtcttcctagtcaaatggcaattcagcaatatttgcgctctaaaaatcgtctgctcatattgggtttcaattcgacattgactgagccagtcgaatcctctgggagaaggggtggtgaccaaatcaaggaaatggaactcaagttgcatcctgacttaaagggtcctctgagagccctctgtgaggatgagcgcactacagttattgttcttagcggcagtgacaggagtgttcttgatgaaaattttggagaatttaaaatgtggttggcggcagagcatgggatgtttttacgcccgacttacggagaatggatgacaacaatgcctgagcatctgaacatggattgggttgacagcgtaaagcatgtttttgaatactttacagaaagaaccccaagatcccatttcgaacatcgtgaaacatcatttgtgtggaactataagtatgctgatgttgagttcggaaggctacaagcaagagatatgctgcagcacttgtggacaggtccgatctcaaatgcagctgttgatgttgttcaagggagtcgatcagttgaagttcggtctgttggagttaccaagggtgctgcaattgatcgtattttaggggagatagttcacagcgaaaacatgattactccaattgactatgtcctgtgcatagggcatttccttgggaaggatgaggacatctacgtcttctttgatcccgagtacccttctgaatccaaagtaaagccagagggcggctcagcatcacttgaccggaggccgaacgggaggccaccatcgaatggcaggagtaactccaggaacccacagtccaggacacagaaggcgcagcaggctgcatccgagaggtcatcctcatcaagtcacagcagcacgagcagcaaccacgactggcgcgaagggtcctcggtccttgatctcaagggcgagaactacttctcctgcgccgtcgggaggaagcggtccaacgcccgctacctgctgagctcgtcggaggaggttgtctccttcctcaaagagttggcgacagcgacagctggcttccaggccacctgtgctgactacatgcatgttcttggataggcagtaaatagactgaagttgaagcctccgtgctttaccagagacagagagaagaagaatattcattcctcgtatgcgcgacagagctacacccgtagctagtcagcgtgctgtacaatcatgtacaaaatttatgctcgtgataaaactgcgagaggggagctagcaaatgggaaaggataaaggagtttagttgcttctggtacgag

SEQ ID NO: 26471 - DNA, 1040 bp, Zea Mays
cttgagcttctcaggttgtagggatgatgttgctgagcaagggcacgccgcctgggtgccgttccgggggtgccgtggtgaagaggatgagagaagggactaagggaagctgaaagtgcatggatttgtgcaagataatagaacagggcaaaaagtagctatgttaattggaaaatgggatgaagctatgtattatgtgcttggggatccaagtgttaaacccaagggatatgacccaatgtcagaagcagttcttttatgggagagggacaagtctcttaatcagacacgttacaacctttctccttttgcaatttctctaaatgaattgacaccacatttgttgaacaagttggctcctactgattctcgtttgagaccagaccaaaggcatctggaaaatggtgaatatgagatggcaaattcagagaaacttaggcttgaacaactgcaacggcaggcacgacaactgcaagaaaaaggatggagaccaaggtggtttaagaaggatgatggcgacagttaccgctatatgggtggatactgggaagcgagggagacggggaactgggacggtattccggacatctttcgccagaatagtttgtctccaggactgcactaactacccttcttccctatgttatacttgtgtatctccaccaaacatttaacgaagttatggtggcaacaaggcagagccaaagcatagcgtttcttcgtgggcatggtcaacctcgtgtcggctggggttggacaagtggttggaaacgtaggtttcatttttgaatttcaggactaattttgtcttggaatgcggttagtttagatttgttttttatgccttggcggctaatccacggatggtaggctttgccgcgcgctctagtgtcttgggccatgtatggagtattatctatggacatcgggtgatttcaatcgtcgtcacaatacttcttgactgttacaatcgaatttacacaacataagatgtgatatctggctcaatttggattgaatctataattgtccttgtgtca

SEQ ID NO: 26472 - DNA, 2632 bp, Zea Mays
actttcagtgtcatgtacatactttgtaatgaagaacctctctggatgagcaaatgtctttcaatcgggggtcctcttgaatacaaagtttcctggaagaagacggcactatgtaggcttggtctatgttcagaaaataaggagatttggcagaagcctcgtcagttcgatggctttaattctttgtatctataccggagatggtatagatgttttactactttgaatagtttttcgtttgacgatggacatgtggaaaggaaagatgactttttattggatcagtttcgttctcagtatgatggaaaatgcccagttttggttacgaagttggccgaaacctggcctgcgaggacaaaatggacactgcagcaactgacaaaggattttggggaagttccattcaggatatcacaaagaagccctcagaagataacaatgaaactaaaggattatgtttcttacatggaactccagcatgatgaagatcctctatacatatttgatgataagtttggagaatcagcaccaacattacttgaagattatagtgtccctcatttattccaagaagacttttttgatatcttggattatgaccaacgaccagcattcagatggcttattattggaccagagagatcaggtgcttcttggcatgttgatcctggactgacaagtgcatggaatactcttctttgtggccgaaaaagatgggcattgtaccctccaggaagagtgcctggtggtgtcacagtacatgtaaatgatgaagacggtgatgttgacattgaaactccgacatcattgcaagtgttcaagagagtttggagaatcaagatttctcatatgatattgattttttgtcacaattcattgagaaagaaagggaccattattcttctctctggagtccaactaattcaattgggcagagagaagcaagagaatggctgcgaaggctttgggttctgaaacctgatctgagagaactaatatggaagggtgcatgccttgcaataaatgttgacaaatggtattcatgcttagaggagatatgtgcatgccatagtttaccaccacctacagaggatgagaagcttcctgttggcactggtagcaacccagtcttcattgtctcgggcaatgtgattaaaatatatgctgaaggaggattggtttattctgtccatggtttgggcacagagcttgagttctatgatctcctgcaaaaaagtggttcacctttgatcaatcacattcctgagataattgctagtggcttccttgagtataaggatgatatctacagcacggttccgtggaatggaaaaggaataccagaaattttggttaagtactactcattggaggtttcttgtgcgaacagctgctttcctcttgggctttggagcaagcaacgatttgggatgtgtagttcggctgatgtttcagacagaccaatttggccttacatggtaacaagaaagtgcaaaggagatatttttgctcgcatccgcgatatgctgtcgaagactgatattcttcatcttgcatcatccttgggagttcaaatgcgaaacatacatttattacccctgccacccgtggagcatgtacctgaatctgggaacaatgatgtgaaagaagtggtaggaacatgtgatgataccacggttctacctgaatggcagcaacttgtctctactctaaataggaggaagcagaatgtaaaaaagcacctagctaactggggggactctgttccacaagttctagtagaaaaggctgaagaatatctccctccgaatatgggcttcctcatcaagtttgttaaggatgatggtgagttgctgtacccatgcccctcttggatacattcagatataatggacgataacattcttatcgaggggatcataaaactgagttcttctggtgagagggaaagagtttatgactcagatcgggacaaaataaatgcaattcacatcattgatttcagtgatctgtccattggggatcctatatgtgacataattccgctgcacttggatattttccggggtgatagtgaccttctcaaggaatttctacggagctatcaacttccccttctgaggggggaatcaaccaccgatgtctacagatcagtgcgaaactcgaagttcagcagggcatcatatcgcgcgatgtgctactgtatattacacgaggacaacgtcttgggagctatattcagcctgtggaaggagatgagggctgcaacgtcctgggaggacgttgagaacctggtctggggagagctgaaccggtaccaggactctgcagttcgctcagcataactaaacaccagcaaaaaaaaaaaaaactttctgaacatacgtgtatgttgttgttcctccgacgaatgtaacttccaaatataaaaaaaaagtgtagggaaaataacgaaggctcgacacggcatgcccgtattttcctatggctggtgataatattgagatccctgaaatggttctatgaaatgaaccgcagaccgttgaaatcgtttcagatcggcaacataaatcgcatgggactgatgtgccacaggggatttctgtgcagatctcagtgcatgacccacgca

SEQ ID NO: 26473 - DNA, 3705 bp, Zea Mays
ttttgctaaataatttacgtggatattgttgtgattcatcgtaatattatattcataacgagatagcataatcctcgctcccgcacaaatgcacaattccatcccggccatggcagtctcctccccgccgcctcctcgattgcacctctccctccatcttcgaaagcctatccagaactcgccgcctagcggcaaaaaggcacgccccgctccgacagccgagacgctccgccgccggttcctccgccggggcgtctcgccgacccccaagatcctccacaccctccgcaagaaggaggcgcttaaggccctccgccgcgcaaggaaggacacggccgcagccgctactgcgtcacgcaatccgtgcgacgaggaggagacccgcttccgtgcggccgccgcggagtaccacgcgctcgcgggacggccatgggacgccggcacccgcggcatggcgcccccgcgcggtttggacggggaggagggcgggctcgagggcctgagggagatgctcgcggcgaggaggggcgacgggttccgttggctactggatgacgacatcgaggctgaggcagcggagaggaagcaacagaggcgtccgggcgccggctgggatgtggggaccgaggacgaggagaggaggattcagttgctagtcagcagaacatccatccaactggtattggagtcaaatgatccaaccttgccgcagcctgaagatcgaatatctggtgtcgagaagggcttggctgggttacaaccaaattgcgggccaccatggaacaaaaagaggttaaacggagattacctaagttttcgtgattggaggcttactagagtgatgaaaagggctgacatcatatatagtgaagataatctactgagaatactagatgggcttgaggcacgaggaaactggaggcaggctttatctattattgagtgggtgtacaatgaaaatagctataggcatcggaaaagcaggtttgtgtatacaaaattactctcaatccttgggaaatcattaagagcaactgaagcacttcacattttcaccatcatgcggggagatgctcaaatataccctgatatgcctgcataccattgtattgctgttactcttggtcgagctggtcttctgaaggagttaatcaagattattgagtatatgagacagaagccctcaaaactagtaatgaagatgcggcgcaaggattgggatccttcattggagcctgatgtacttgtttataactcggtgctcaatgcatgtgttctgtcacagcagtggaaaggtgtattttgggtgttccagcaaatgagaattggtggtttaccacctacaggagcaacatatgggttggccatggaagttatgttgaaagccaagaagtatgactttgtccagaagttctatgagaagatgcagaaaaatggcgtaccaccaagagcaataacttacaaagtgcttgtaagatctttttgggagcaggataaaattaatgaagctgttgaagcagtcaatgacatggaacaaagaggagttgttggagcagcaagtgtttactatgaattagcttgctgtctctgcaataatggaaggtggagagatgctatgttacaggttgagaagctgaaacagcttcccctcacgaaaccactggagtacgcatttactggaatgatcttagcctcatttaatggtggatatatctatgattgcatctcaatatttgaattaatgaaggaccactgcatgccaaatattgggactgtgaatgtcatgttaaaagtttatggacattgtgatatgtttgggaaggcaaaggacttgtttgaaaccaccaaggcttgtttcttaaattctcagacatatatccacgagcattcgtcattcaaagcagacacatatacatacaactctatgcttgaagcatctgcctctgcccaacagtgggaatacttcgaatatgtgtatagagagatggctctgtctcatcactgtctagatcaaagcaaatattcatggttgctcatcaaggcatgcagagctggaaagccatatttgctggagcatgcacttgactcgatacttgaaagaggagagatccctgatgtacagttgattactgaatcgatatgccagtctattgctcatagagattatggaaggacgctgcagctcttgaatattatgacccaggcctcaataaaaattaaagaagtcgagtgggattacctactacagcaaaatatgcatcaattcagcattgatgccctcgagggccttataaagtatctcagtactaatggtactaccaatgctgatcctgcagttgatttagtaagagcactgcagtcccaatgccgggacgataccagtactcaacagtttgaactctcttttcatggaagtggaaacaaatattcatgtagcagtctggcagaactagatcagctcacttgcaagaacttgtgcactgatataattcttgacgtccctggttctgatagagagatgcctcagttaggtgtcagtgctctcatgtgcagggacatctcattaaacggtcaacgagtggaaaacaaacatgagctttctgatcttgggcagaggggtccacaggtatctgcaattgacaaagtacttgattccatgaattcttatggtgacaattcgtatggggagatgccatcagcttcaaaaattcttgagctgtgggagcatgagaggtaaatgacatgtttgctccaaaaacagaaaattagaggataaatgaaatgctagcagatattatttgatatatgggcagtgcaatccttgtataaattactgacaaatgctgtaaatttgaaggcccctaagttggttcgtgggatctctgctgcaatcgtgttgcctaaaattattatcagaaggctcttatttgtgtgatctcattgtccatactacggaaaaaacagggaatatatagaagctctgagctcttggaagataaatttatgcattgacactgtttctctatttatagcgtctctcaaccctcacccaaccaccatctccatcgccaatgcatgggtctgggggcttttctgcgatcagcacctccttataaggacgacgtgatccactgctagccaaagaagcagcagatgaagtgttaaggccttcgtcttcacaccatcgctgatacttcaagcgacatccaagaaaagcattagatgggtggtgggggaaggaggagaggaggccaacgccgggagacaaagggtggttactgacgacattggaagaaggaccggcgtgaggctatagggtggaggagtagaggcatcgacctaagggaggccaaggggcatgagcggaagggacatctagctaaccttacattcagttgttggacatctaactattacactgtataacgcgtgcatatacatgtatccttatacaccctcgaaaaactatggcatcaaatctcaagatcaacaaaattatcataagcacctccatcgacagacatatcacttactggaagatgtcatcaacttttaaaataaatctggaaaatacaatcacccgtgcctaattgaggttaaacggtatgcaaattccacaagagtgttacgcccctagccaccggctcgagttcgccgagacgtgagcaaccagtgccgactccgagacgacgctttcaggcccaa

SEQ ID NO: 26474 - DNA, 1509 bp, Zea Mays
aaaggaagttcgtcctctctctcacggtctcacctctcacgtccagagagagagagagaggatgccgtcgcgttcgccgcggcagtcggcccgaccccccctcccgaccgccgccgagccccctcccggcctcttcccggccagggaggacctcgtccgcttgctcgccgtcatattcatcgcagcggccgccgccgcggcctgtagcgtcctcaaccgccgccctgagcccttctgcgactctccccagtggcccgatgactacgccgacgattcgtgtcaaccttgccctccgaacgggcgatgtgtggacggcgagttggagtgcgtccaggggttcaagaggcacggcaaagcatgcatagaggatggactgctcattcaaagagctaacaagatttcacagcttctacagctaaggatctgcgatcagcatgctcgtgctttatgtggccattctgccgaaatcctgtttcaggagcatgaggtctcaaatgcaattgatgaactcttgtcaaagattcccgctggtctaactgaggatgggcttcaacttgtgaaaactagggtgctggagagtgccgggggcttcttcgatacaacatttacttccagcaaagtcaaagtatataaatgccctgagctggttgcggagcttcatatgccaatgggttgtcgagttcgccaatggatctttagaaataccacatctgtggcaatcttttgtatcctgtttgcagcactgctttggatactgtggatcatttacaagaggcggacattatctaatagagctgagcaaatatacgagcaggtatgtgaaatccttgaagataatgctgtaaacgccgagattgacaactccaattctgaggtttgggtggttacctcctggctcagggatcacctgttggttcctcaagagagaaagaatgctttcctgtggaagaaggtcgaagaactcatacgagaagattctcgaatagatcaatatccaaaggtgattaaaggggagtcgaaagttgtttacgagtggcaagcaagtggctcgcttagtgcaaagattaaaaaggtgcaaggtgcaagggccaagtcaaggactggtgtaggtgtcataaaatttggggaagaaatgagtgcttcctccttgggtgaggtgagggagcagggctcgtgtgatttaacacgcgaagaaagaagtaaggacaaggtcacgtgcagtgattaggttatcaatcaatctatctacatgtatgcctctggtctttagaggaaccagcacgtgagcttggcaagagttactgatcttttgtaaattttgatgataggagccgagccgtcacagtgtgttgttgctgttacagttgagtttgttggcatgtcatgagattgtctggtacagtttcaacaactgatgaatgaacatggtcactggaagatgctgctgacggagcagtcgtcgtgcacacgccagatggtctcaccgaggaggttagcgacggagagcac

SEQ ID NO: 26475 - DNA, 1616 bp, Zea Mays
cagcgataggaatatcgccaagaattctaccgtctgcgtctgcccgtcttcctctctctctctctctcctctccctcattctggatccaccgccgcagccttagctgggtccgtcgctgtcgctccgcctcccgctcgcttgccgggcccgacacgcccgccaccgcctccgctttgtctctccggcgatccgacgccccacccggcgtctgtgcagagcagtcgtgaggagttctctgttgtgggctgcccggcgatggaccggggcgagcgtctcggccgcgcgctggacgccttcgggggcaacctgtgggcgctggttgacgcagcgctggacgcggccgctcgcgaccgccccgacgagcttcgcgcgcgccgcgatagcatcgtcgagcgcctctacgctgccgccgcgggctgtagcaactgcgccgggcgtccgccgtctgttgccgctttagcggccgcggggctggaggaagaggacggcgaggaggcggctccggcttctccgtgggcggaggctgacgcgcaagccggtggcgcggaggcacagaccgaggtgctcggcgccggcgagcctgatctcgagagcaagatcgtggccatcagggacttcttggaggaccctaatcagcccgagaacgagctggtgagcttgctgcagaacctggcagacatggatgttacctacaacgcactccaggagactgacatcgggcggcaggttaatggtctgcgcaagcatccttcggccgaggtcaggcggctggtgaagcagctcatcaggaagtggaaggagatagtggacgactgggtgcgcctggacaattccggcggtgacggcagtgcctctgttatgactgatggtgactccccacataaaatccaaggcagaagccaccaaagccctcgggtttcggggtttcagtattctccaagcccacagaggtttaatggttcaacttcagagatggctaacaatgggtttgagtcaacaatggatgcgaagcgtagggccagccctgtaccagcacatcataactccaggcagatgaacaacaatcatcattctactactattaccaccagcacgtcatctgctccagctttctcggtgcagaaagtgacaagggagcaaaagcagagtcttgtggaccttgacaggcttgattctgccaggaagaggctccaggagaattaccaagaagcacaaaatgccaaaaagcagaggacaatccaagtgatggacatcaatgacataccaaagccgaagagcagaaacgctttcatccgcaagagcggcagcggtgggctcccggcgaggcaccgatagcctaacctccttcgtcggctggatatctgcgacacttgcgaagttgtgccctagaaccgcaacgggaaagaaaaagaagcaaacggtttcttgttctttttttccctgtaccttgactgcctaggtttacctccagtgtaatattgtcaggtacataagggtgaaatgatatgatgtttctcgaggaaaaagaaagaaattagtcactgtttttgctatggtttggttgctgttattgctgttggtcagtgctggatataatatgcataaaatgtgtgca

SEQ ID NO: 26476 - DNA, 1988 bp, Zea Mays
aagcgctcagcccgctgacttgataacgtaacgagctatccgccacggacatcaacactacggacggcggcgatctccccgccgacgtgggcgaacggctccacggcgatcggatggccacgagcggccgtcgcctaccctcccacagtcccactcccacactagtccttttcccctgacgtggcagcggcaagtgcacccaaacgtttcgatatcccagagtggtgtggccgccgccggcggcttctttctccccttccattccgctccccgtgacgtcaccgaccaggcaagcactccgctccaccagagccgcctcgcctgtctgtccgacccacacacctaccggagcgcgcgtcccgaggtcggcggagcagggtcgggaggagggtatggcggtggtgggcgtcctcgcgctgcagggatcctacaacgagcacatggccgcgctgaggaggatcggggtgaagggggtggaggtgcgcaagccagagcagctcctcggcatcgactcgctcatcatccccggtggcgagagcaccaccatggccaagctcgccaactaccacaatctgttccctgcacttcgagagttcgtcggaggtggaaagcctgtctggggaacctgtgctgggctcatctttcttgcaaacaaagcagtagggcaaaaaacaggggggcaggaacttgttggaggattagattgtacagtccaccgaaacttttttgggagtcagcttcaaagctttgagacagagctttccgtgccaaagctttcggagaaggaaggagggaatgatacatgccgcggtgtatttatacgggcacctgctatattggaagtaggtccagatgttgaaatattggcggattgccctgttcctgttgacagacccagcattacaatatcatttggggagggtactgagttccttttagttctttaatgagcagtgagccagtgaatatggccatttcttggaaagcaggtacaagatactatggtcagatctgggcatacttgcatataacatgctgattctacatgtggtctctgccttcttgtgtagtcctgattattcaaactggctttgagatctgaaatgatatatagttttaacccgttggccattgcaactcaaatattcagacaaatggactaatgggttcttcgatgattcgatcaaatttgtctcctttggggtattactggtttgctaaagcatctgaatgggctgccctgtcacggcagcatgacatgtgtttttgttcattggcttgtttttctgcatgaaatgtgttcatgtaaccgtgccttttgggaattggccaagtttttccttatattaggaaaaaaacagcgaaagtgctagttggcaatcttgtaacgcttaattccgtattctgaatggggcctgcttatcctctgttgactgacgagaatatatactttcaggaagaagagtattcaaaagatcgggtaattgttgcagtgcggcaagggaacatcctcgcaactgctttccacccagaattgacatcagactccagatggcatcgtttcttcttggacatggataaagaatccccagcaaaggcgttttctgcgctctccctgtcgtcatcgtcaagagacactgaaggcctgccaaagaataagccgtttgatctgcccatttttgagtaacgctaaagacaagacaaaccaaaagattgaaggaacgaagaaactgaccgtatttattatcgatcatcatttagccggttacaaaaacagccagctgagaatctgtcatactcagccgaaaaaagtgttgtctggtagctaacttgtacggataaaaaataatcacgctgtgtgctgtacgcaattctcatcagataaagcgaaacattgttttcctgggaattatagttttgctgaaggtgaccagttgaacacttgaacatggtaatactttccccctctatgtgcaacttcgttcaag

SEQ ID NO: 26477 - DNA, 4098 bp, Zea Mays
cacaggtccacagcggtccaagcgagtgctaggctgttagcaaatatcaaactccactgctaccactaatacacatcgcccccgcacatatcgatctcgtcgtcgtctcccccggtggcatgctccgctcccgctagatccgatctattatctatggatccccgccgtctccccatccttctctccctcctgcttgccttcttctccgccgttgtcgcctctgacgagatccacggatgcggcggcgtcgtcgaggcgagctctggcttggccaagtcgaggaaggcatcggattccaagctcgattactccgacatcacggttgagctctgcactgttgatggtttggttaaagaaagcacacagtgtgctcctaatggatactattttatccccgtctatgataagggttcgttcatggtcagagtgaaggggcccaagggatggtcatggaagcccgaaactgttcctgtcatcattgatcacaatgggtgcaatggaaatgcggatataaatttccagttcactgggtttatgatatccggtaaagtagtgggagctgttggtggtaagagctgctcaaaacggggaggacctgctggtgtgaaaattgaactgatgacagattctgatgagttgattgcatctgctttgacgtcatcatcaggagaatattcatttacaaacataattccagggcgttacatattacgtgcttctcatcctgattatgaaattgagttgagaggctcaccagagattgacctgcgatttggaaatgccgtggcagatgatgtcttctttgtatctggttatgacatttatggcactgtggttgcacagggaaatccaatagtgggagtccacctatatttgtattcaaatgatgtaacgaaggtcccttgcccacaaggtttcagtgatgcacccaaggaaggtgcactttgccatgcaatatctggtgctgatgggaagttcacatttagatcactaccttgtggtagctatgagttgttgccatactacaagggagagaacaccgtatttgatatttcaccatcttcactttctgtttctgttgagcatagtcatttgacgattccccaaaaattccaggttacatccaagaagtatactataactgccgagaaggatcattataagttcaaccgtttggaggattttatgattttaccaaatttggcaagtattgatgatatcagatcagttagatatgatgtatgtggtattgttcgaacagttactctgaattcaaaagcaatggttactttaacacatggaccagaaaatgtaaagccacagcggaaattagtgggtgaaaatggacatttttgctttgaggttcctgctggtgaataccagttatctgcattacctgtagattccgaacgctcttctagtcttatgttttcaccgggatctattagcgtcaatgtaaatagcccgttgcttgatctggaattctctcagtcacaagtcaatgttcatggtaaagtctcatgcaaacagcaatgcagccagaacattctggtctcacttgttagattggctggcggagttgaacaggaaaagaagacaactacattggaacaagataatgttaattttgtgtttaagaaagtatttcctggaaaatatcgtgtagaggtgaagaattctttacccgagggcttagctaaggatgattggtgctgggaccagagtatcttgaatatagatgttggtactgatgatgtgagagacattgtgtttgtacaaaaaggctattggattgagctagtttcaactcatgatactaatgcttatattcagcagccagattcttctagacttgatttgttgataaagaaaggatcacaaagaatttgtgttgaaacttcagggcaacatgagattcatttaactaatccttgtatttcctttgggacctcgtctgttttgtttgatacagctaatttaatgccgatccatatcaatgcaaagaagtatcttgtaaaaggtgaaatccatgtggacatgagctccattcaggaaaacattgattccaaggacatagtcgtggatatcttgaagagtgatggcagtttcatagaaaagatatccacatcacttgttcttggaaaggacaatcaaaatgacttcactgcctttgagtactctatttgggctgaccttggggaggacttcatctttgtcccccatgattctagcattggaaggaacaaagtcctattttatccagcaagacagcagtattcagtttctatgaatggatgccaagatactgttcctctaatcactgcaagaactggtctatatcttgaaggatcagtgttacctgcaacttctgatgttgacatcaagattctagcagctggaaagagcaactatgcccatctgaacaaaggggatgtagcaacagaggcaaagacagattctgaaggatcattttttgcaggtcctttgtatgatgacatagtatataaagttgaagcttcaaaggatggttaccatctcaaacaaactggcccatacaccttttcttgtcagaagcttggtcagatattagtgcggatttatggtgaaaattcagagcttttaccttcagtattattatcattgagtggcgagaaagggtacagaaataactcaattagtagttctggtggaaccttcacctttgacaacttatttcctggaagtttctatctccgaccacttctaaaggaatataaatttaatccgtcagcagtagctattgatcttaattctggagagtctagggaggctgaatttcgtgcaaccagagtggcttacagtgccatgggttctgtaacactattaactggccaaccaaaggagggtgtttttgttgaagcaagatctgaatccacaggtttttatgaggaagctaccacggattcttttggtagatttcgtcttagaggacttgtgcctggatcgacttactctataagagtggctgcaaaagataatcttcagtttgcagcagttgagcgtgcttcacctgaatatttgtcagttaatgttggtcatgaagacatgactggtattgattttgtggtttttgaacgccccgaagtaacaatcttgagtggccatgtggaaggagatggcattgatacgttacatccgcatctctctgttgaaatcagatcagcaacagactcttctagagtagaagctgtacttcctcttcctctttcatactactttgaagtccgagatttgcccaagggcaagcatcttgttcagcttcgatctggccttccatcacatacacataggtttgaatcggagttagtcgaagtagatctggaaaaggatccccaaatccatgttggtcccctcaaatataaaactgaggagcgtcatcaaaagaactgaccccagcaccagtttttccgcttattgttggagtttctgtggttgcactggtgatcagtatgccaaggttaaatgacttataccagagcgctgtagggatgacttctctgggttcagggatggcaccgaccaaaaaggagccacgcaagaatatattaagaaagagagtgtaaatggcagattagcttagccttaggggtcgagaaatgagacatgacaaattgagcaatttcaagagtggaatagcttctggtttccccctcgggtaattttgccgacgaaaaggaatgccagttttgttgtacgatagcactatgcacagtttttgaagccttagattgtgccgttttgcagttttagactataaagaaagagttgctgcatcatgaatgaactttctcaccagtcagcatgcacgatcgaataggttaatctgagcggtccaggactaagtagaatagacaagtttgttgtggcacgttgtttgcccctctttttgattgtacaacgaccaagtaaagcgtgcgcaatgacttctctatgacttacggatctggttcgccctttagcatatgtggtctagcgtggagcgtttataatataaatttaaatagtttttaaaattatttttaatgtaaataataaataaatatgatttatctaagcgtg

SEQ ID NO: 26478 - DNA, 2707 bp, Zea Mays
gccgtcctggtgcagcaggcagggcgcgatgcccagctcggtgatgaactccgagacgaaggagatggtggccatcaagaagatcgccaacgccttcgacaaccacatggacgccaagcgcacgctccgggagatcaagctgctgaggcacctcgaccacgagaacgtatgtcaaaacagagcatatctatataaaatagttgttggatgatctgacgccgattgctgctgctccgatttggaccaacaattaaaacagatcatcggcatcagggacgtgatcccgccgcccgtcccgcaggcgttcaacgacgtgtacatcgggacggagctgatggacacggacctgcaccacatcatccggtccaaccaggagctctcggaggagcactcccagtacttcatgtaccagatcctccgcgggctcaagtacatccactccgccaacgtgatccaccgcgacctcaagcccagcaacctgctggtgaacgccaactgcgacctcaagatctgcgacttcgggctggcgcgcccgtcctccgagagcgacatgatgacggagtacgtggtcacgcgctggtaccgcgcgcccgagctgctgctcaactccaccgactactcggcggccatcgacgtctggtccgtcggctgcatcttcatggagctcatcaaccgccagccgctcttccccggacgcgaccacatgcaccagatgcgcctcataaccgaggcacgagcacgacgcacgcaccacatccttcctataattcaattccttcttcttctgctgctgctgatgaacatcgccggcacgcggcaggtgatcgggacgcccacggacgatgagctcgggttcatccggaacgaggacgcgcggaagtacatgcgccacctcccgcagttcccgcgccggccgttcgtcagcctgttcccgcggatgcagcccgtcgcgctggacctcatcgagcggatgctcaccttcaacccgctgcagaggatcacaggtcagtcggcgcgggcctactacagcttagcctgttctttttcctccctagcttcttctctccatgtgcaacttgcaactgggtggctgctgaatcctgaactccgccgcacgtgttctttagttggcgtcggtagtcactgtggtactagcatgtgggggcatgcactcgcgatgcagtgtatagtgcgtagtatgtaggcaaggcaacgcagctgacaacatgtcgcatttccagagagagaggggggggcatgcgtttggtttgtccgcgcaattttgggtgttggactggcctggtaaggactcaggagcatatgcaatcttctttgtctgaactagaaactttcacgcgccaacaaaacggaacgatttggtagtcctctcctcttcgttgaattcattcagagttagagaccataacagaaaacagggcgtcagttctgtgattctagttagctgctgtttaaaattagttggagatataggctattagctgtttttaggtagagacatctaatatctctagctaataggctattaactgcttgtttctttctcctcctgcgtttcccaattctaatattgtgcatccagctcatcaaagttgtgcacgctgtggtctgcgggagctttctccatttgcatccaaattaatgccttgatgttactaccttctacgtttacattacagtactttgggtgctgctgctttgacccatcctcggctttgtatcctcctcctgtcctccatatcgcttttgccgaaatgacgatgacggggctatgtgcatagaaaataaacatgttttaagatagaaaaaaaactatcgatacatagtcttaagggctagtttggtaacactatttttaaaataaaaaaaaactaatttttctttagaaaatagaaattccttgaaaagataggatgccaaactagccctaaatattagattcctccactggcaacactggcattggcaggcagctatctatctatacatgatcttaaacattagaatatccaggacttggattataccttcattatacttattgctctacaagttcacgacgagtgattgatcataccttcattacactaaataaactctgttgtgccggtgccgtgcagtggaagaggcgctggagcacccgtacctggaacggctacacgacgtcgccgacgagcccatctgcacggacccgttctcgttcgacttcgagcagcaggctctgacggaagaccaaatgaagcagctgatattcaacgaggccatcgaactcaaccccaacttccgatactagctagctagctagttcggacacacatcttaattatacgtttcaggctgtgtagtctgctgcaggtttcaggtgttcgtgtaatgagctgtaccaagaataaaatgctttggactcatctggtgactggtgggtcacatgttcctcgggcatacagaatcacagttttgtctgccaaagttatagcagcttctcttctcatgcagttgttcatattcgccacgcagctaacttttgcaagcagtaatctaataacacggacgaactactcgtcagttccgaaccataggtcctttaaattttaatctaagctagtttaatttgtctatatttaatcgaacttatagaaaataagtcaatatatctacaacaatacaatatcgaatagatgcaaaaaaa

SEQ ID NO: 26479 - DNA, 3300 bp, Zea Mays
cgccctcgggcggccgtcgcagatggctagcacgggtgagcacttgcgtagcatagaggatagtgaactagcaaggaaatggttagaacgcatgaggagctccgggcatggcgtcgaccacatcgtcattggacaagcataccaaacacgtcagcgtcggacaccgccacatgaactcgtccttctaaaacaggtcaccagtaattcggctgtgcgagctggagaagaaaatgctgcctccctctatgttttatctgttattgactcgttaaaaaagaggattaccgcagatcgtttgacttacattaagaataggataggggagaacaagactaatatcagcagctatacacagaggacttacaatttatcaaaaaataggcaaattagtacatcaaagggtactgattcagcatcaaatttgctcacaaaaaggcaagatgatgcgctatgcaccctgcatagtcttgatattattccggttgacaaagatggtggtacttttcaagacgaaagtcctttctcttcatctaatgttatgtttggtggaaatcttggtcccaagaatgctattattagaccaattaaactaccagaagtgccaaagcttccaccttatacaacatggatatttttggacaggaaccaaaggatgacagaagaccaatctgtacttggtcgacggaggatttactatgataccagttgtggtgaagctctaatttgcagtgatagtgaagatgaagccattgaagatgaggaggaaaaaaaggaatttaaacattctgaagatcacattattcggatgacagttcaagaatgtggcatgtctgatgctgtactgcaaacgctagctcgacacatggagcgggctgctgatgacataaaggccaggtatgaaattctgcatggtgagaaaactaaggattcttgcaagaaagggactgagcataatgtcaaagtggaagatttgtactgtgacaaagatttggatgcagcattggattcttttgacaatctcttctgtcgacgatgtctagtgtttgattgcaagctacatgggtgttctcaagatttagtatttcctacagaaaaacaaccagcttggagtggcgttgatgacagtgtaccctgtggtattcattgccataaactggcatctgaaccagatgctgctgctggtgctgatcacatgctttttgatgttgaggagccaactcactcatcagacaatgtgatgaaccagccaggttcaaataggaaaaagaacggctccagtggaaggaagactaaatctcaacaaagtgaaagctcttcaactgcaagagttatctcagaaagcagtgattcggaagtacatccaataagcaataaatctccacaacactcccctagtccctcaaaagttaaaattgggccgaaaggtggaatcagaaagattaccaatagacgaatcgctgagagaattcttatgagtgtgaagaaaggacaaagggaaatggcatcatctgattctaattttgttagtggatatcttttggcaagggacatgaagcttaggtctgatacacgaaatggaaataaggaattaattgtatcctcacaacagagttctccaagcacaagaagttccaaaaagaagagtacacctcaaattgggaacagctcagcttttgctgaggctcataatgattcaacagaggaagcaaataaccgtcattcagcaacagatggttacgatagttcaaggaaagaagaattcgtcaatgagaatttatgcaagcaggaggtgtacttgagatcatggaaggcaattgagcagggacttcttgtgaaaggattagagatttttggaaggaacagttgtttaattgctcggaaccttcttggtggaatgaagacgtgcaaagatgtttttcaatatatgaattatattgaaaacaacagtgcctctggagctcttagtggtgttgattctcttgttaaaggatatattaagggtactgagttgcgcacaagatcaagatattttagaaggcgaggtaaagtccgtcgtttgaagtacacctggaaatctgcaggttacaatttcaaaaggattaccgaaaggaaggatcagccttgtcgacaatataatccttgtggttgtcaatctacatgcggaaagcagtgtccatgtctttcaaatgggacatgttgtgagaaatactgtgggtgtccaaaaatttgcaagaatcgttttcgaggatgtcactgtgcaaagagccagtgtcgcagccgccaatgtccatgttttgcagctgacagggaatgcgatccggatgtttgcagaaactgttgggttgggtgtggtgatggtacattgggagttccaaaccagagaggagataattatgaatgccggaacatgaaactgcttcttaaacaacaacaaagggtcttacttggaagatcagatgtctctggctggggagcattcctcaagaatagtgttagcaaacatgaataccttggtgagtacactggggaactaatctcacacaaagaagcagataagcgtggaaagatatatgatcgtgagaactcatcgttccttttcaacctgaacaatgagtatgttcttgacgcatacagaatgggtgacaagctgaaatttgccaaccatgcccctgacccgaattgctatgccaaggttatcatggtaactggtgatcatagagtgggcatattcgccaaagaaagaatcctcgctggtgaagagttattctacgattaccgctatgagcctgacagagctcctgcttgggcccgtaagcctgaggcgtcgggagcaaaggatgatgggcaaccgttcaatgggcgtgcaaagaagctcgcccaaaacaaccgaggctgaatctgatttgattctttcattgttaggacaaatttggcagccattcaactaatacaaggaacctgtcattcataggccccaatttatttgaactcgtcattgtaactcgtatgtgcttgaattctccatggcatctggtcctgccatccgtagagttaggtcccgtttgttttgtttgttttgaggaactaaaaattaatccctctattttagtcacattgagtctctagattgtcaaacggcgggactaaaacaaagactaaactatttgtctctagttcctcaagccatgacttaaagggaataaatcacataaattttatttttatccttcctttatttcagttacactaatgatgtaataattgtatgaggtattttggtcctcttagagcatctccaag

SEQ ID NO: 26480 - DNA, 2463 bp, Zea Mays
atgggtgctgacaccttgctgcggagcggcggcgagcctggctccatcgagaggcggcggcgtggggaatatctagggttcctcggaacccgagccccagcacacagacaccgcgcccgcggacactgctcgctccccttctcctccgtcgccgccaccgcagaagcctctaccacgcgcgaccagctcgccgccgcacccgccggggccgacggcctgcacgcgctcgccgagcaggtggtgcagctcgtgctcgccgacggctccggcgccagcagcccgcgcgtcgccttcgccgacggcgtcttcgtcgactcctcgctgaagctcaagccggccttcgaggaggtcgccgtgggaaagtacagggccgacacccagtccgtcgacttccagaaaaaggttgatttgatccccttcccaccgagctcccgaacacttgtgtcctgctaccgtagttcatactcttatgacagtggtcatatcaaccagaacttatcaaggaagtgtgaagcattagttgtgtcaggtttggcagaatatggtgatgaaatagatgggattgccccagctgatatcatgaagattcagcctatcctgcaagaagatctgaaactagatttttcaaaatcacgtacaaataagacagggaatgctgaaattactaagaggagaaggatggtcgtgatagatgaggtgttaagccaagatgagacaccattcttgtacagcctcgtgtttggtgaaggtgttgtcaatgacacaacttctgttgtgttgttcaatgcaatccagaactttgatcctggaaatatcagcggtgccaaattactgaacttcattagcagtttcctttatttgtttggctccagcaccattcttggagtagcttctggacttcttagtgcttataccattaagaagttgtactttggcaggcattcaacctatcgtgaagtttccattatgatgctaatggcttatttatcttacatgctagctgaattgctcgatttgagtggaattctcactgtgtttttctgcggtgtcgtaatgtcacactatacttggcacaatgtaacagaaagttcaagggtcacaaccaagcatgcctttgcaacattgtcgtttatctccgagacttttctgtttctttatgttggtatggatgcattggatatagagaagtggaagattgtcggtcaaacttatagcccggtaaagtctatcgctttgagcagcaccattttagccttggtgctggtttcaagagctgcttttgttttcccactatcctttctatcaaatttgaccaaaaaaactccaaatggaaagatatcttttaggcagcaggttattgtttggtgggcgggtctcatgagaggtgttgtgtctattgcgttggcttacaataaggctgcagtgccacacaagttcgtttggtgtaggtgctgcttgatttttggcggtgcatgccgggtgttcgacaatgtttctgaggttttgtggcagtgtgaggcattttgggagggacatcatcatgcccaacttgaagtcgtccgtgaccacaacagcgagcgcggtgaggccaagaatgaggattcacgaacactgcaattcaattatggttcattcaaacataaggcattggataaattcttaactaaaaaggtcgttgctgtttgtgaatgtggtttggattatgacagacttcagttctgtccgacagatatgcaaaaaaagtactttgagaaacaatttgagttggctgaagcagtaaagctgcccatttttcttcacatgtgtgctgctggtgaagacttctatgaaatcatgacacaaaatttgcacagattccctggtggggttacacattccttcactgactcaacagaagatcaggataggctactttcttttgagaagatgtttatcggtgttaatggttcctctctgaaaactaaccgaaatcttgaggttctacgaggcattcctgtcgagaggttgatgatggaaacatattctccatattgtgacataataaatactcatgctggaagccagtatgtaaaatctgtctggccatccaagaagaaagaaaagtatgagccagattcaacagtaaaaggtcgcaatgagccttgtttagtcagatttaaaagggatagtggggaaacaccattttccgttggtcaagcaattaactcgcctaagttagtgtactttgagaaacaatttgagttggctgaagcagtaaaactgcccatgtttcttcacatgcgtgctgttggtgaagacttatgtgaaatcatgacacagaatttgcacagattccctggtggggttacacattccttcactgactccgcagaagatcgggataggctactttcttttgagaagatgtttatcggcaagttcttgaggtagtggctagaagcaaagaaatttctgacatagaag

SEQ ID NO: 26481 - DNA, 1664 bp, Zea Mays
cagagacggttatgctggagaaacaaagcttgagtgacttcattgatcacataaactctgataaagctgttattgtatctgtgtctccccagtcaagagcatcactagctgcattcttcggtctttctcagtcacaggttctcagaaagctgactgctttgttcaagtcgattggtgtaaaggctgtctttgacacaagctcgagtcgagatctatctcttattgaagcatgcaatgaatttgtttcacgttatcagaaaaaccattcatgtagtggccaagaagctggagccaatcttccaatgatttcatctgcatgcccgggttggatatgctatgctgaaaagactcttggttcatacatcctaccttacatctcatctgtgaagagcccgcaacaggcaattggtgcagccattaagcaccatgtggttgataaacttggtctaaagccgtatgatgtttatcatgtcactgtgatgccctgctatgacaagaagctagaggctgtccgggatgatttcactttctcagtagacggtaaagaggtcaaagaggtggattcagtactgacaactggtgaagtgttagacttgatacagtccaaatctatcgatttcaagacagtagaggaatcttcattggacagattgttaacaaatgttgatgaggaaggccatctatatggggtttctggaggttctgggggctatgcagaaacagtctttcgctatggagcaaatgtaatttacaaaagagaaatagagggtcctcttgacttcagaatcttgagaaattcagattttcgtgaaattacattggaggtggagggcaaacctgttttgaagtttgcactttgttatggattcaggaacctgcagaatattgttaggaagattaagatgggaaaatgtgaatatcactttattgaagttatggcgtgcccttcaggttgtcttaatgggggaggtcaattgaagcctgttcaaggccaatctgctaaggaacttatccagcaattagagagtgtgtacacacaagatatatcaatatcggatcctttcagtaaccctatcgcgaaaaaactatatgacgaatggctggggcaacctggttcagagaatgcaaagaagtatttgcacacagaatatcacccagtggtgaagagtgtggcctcacagttacagaactggtgatagaggtttcttgttgcactgggaactcctatgttcctcaagagccaagaggaacctgcaaaccgagcaaacatggcgacctgtccatgctaagcaaatatggatcacacaagaattaaacttactcaagtttttttggcattatggcgaagaagttttgttaacatataggttttcagctgctttctagttaaatgttgtgccagggaaacaacagctaaatcgcaatgtgtaaaatgaacgaagtaatgtgtaaaataaacaacagctaaacatggcgaccttttcattgtctggtacacgccctttgccacatttttttttttggtaaggaaggatagctcgttggttgcccgtatatgttttttagatgctcgggcatagtagagaagggaacgaaaaacatactcagtcccggtatattttagggattttaagacagataaaaaggacaacacaagagatgca

SEQ ID NO: 26482 - DNA, 3162 bp, Zea Mays
cagcggactacacccgatctgtgtagccctgtcgtgacctcgtcaaaaccaggtgaggacccgtttctccttgtgttcattcctcgccagtattaatacccaaaatcaagttattagatgctaatgttatctatatatgtgtgtgtaatgtgcgagatgtgaggaattccatatttgtgtggcgaggcaagccgtgcgacaagtgccagatgtacgatgaaatgattgaatcggagagcgtcaccgtttgtgtggattatcaagtcaggcaaataacggagtactatgtctgatcgctaaatcggctgtggtgcatatgtgttgctctatagcgacgttagggaagggttcctctctttttcctttgtatgatagtatgttgctcatgatgtagtgtgaaaagatatatcctatttgtgtggtggaacaaataatgcgtagaatactgattggaatgccttgctataaggtgctttatttgtcagaatcccaatttaattatgatggtatagttatgctagagagtataaattaggtacattctagttgtattgacatgataaagcttagattgaagtgtagtgtatgtatcaggtgttctagtggatgtataagtctagcgttagtaaattggtttgtgttatgtgaatgaaactattttcatgagtgtcttagaatctacatatgttggggttagttctacgctttagtggtcatagtacttatatatgcgtagtgtcattagagtagttcttcatttgcaatatgaaccttaggacgaagatgcaactcatacgaagtaattgtgtgcatggttatgaagtatactaatctatctatgtgattaactaggtggttttagctctaatttaggatgatgtgtcagaatagttgaagtaccaagcacatggtgattgtagaagccaaataggagctaaattgaatatattgctgtttagagctgtaggtacagttttaattgtgcagctaatttaacaaagtaaaccatgttttctgtggacatgttatatatgaaagttgtagctcacttctttatcttgcttgtgtaaaaatttcatgaccataggcttagcagtttagaagttatgattttcccaagtccagtttcagaatctgtccagattctgttctgatttcgaaaattgttttgtttgactaaattaaacttataataagcccttagtaattatagaagaattgtagtacttttcttaaggtttccaacaaattttggatcaccctttttggtgatctataagttaagttacagctgtttgaagtgcgatatctgaatctgtccaaatttggacagcagagcctttctcatattttctgaccttgatatatattgaattaacctgggatgtttataaattaattgtagacaattttattagctttctaaagagtctaggatcacctgatttggatgcctgaaactctaattatggatttttgaagtaagtagtcgaattctgtccaaatctgggcagaatttatgtttagttctgtttgacctttctaaaggtcgaatcatgttgtggtgataatataaaagttatagaggactttataagctttccaaaaagtcttggtttactatttttggatgaatatcatgtgagttatgaataaaacaactgattgctgtactgctgtccaaaatcggcaaggattaagatgattgcttggagtttcttttctgtgagtatggtgaccttagtaatacaaaggagttttagtagacatgtttacctagcattaaaaagttgattcagtaatattatgtttataaaggtaatgtaaatgtcttatgattaagaacagtgtgatgttccatttgatggcatgctatgcataataacctggcatgcaaatgttgaagcatgttgaaatgcttctattcattgttctaagttggggtccatattgatggtagtccctctttcttcgtatgttcataagatgggtcggcatctttagtgtctcacacgcagtggccacgggatttttcaggtcacttggtcgtggaagggcttcttattgcagtcatagtgttccagctctccaggaagagttacaaaccaccaaagaagccactcactgaaaagtgccgctggaccacatacgattgttgatggtaaagaagttgtgaactttgcatcagcaaactacctcagtttaattggcaacgaaaagattattgattcttgcatcagttcattggagaaatatggtgttggttcttgtggtccatgtggcttttatggaacaactgatgtccatcttgactgtgagtcaaagatagctaaatttttggggactccagactccattctttattcatatgggatttctacaatattcaatgtgatacctgccttctgtaagaaaggagatatcatagtcgctgatgagggtgttcactgggcagtgaaaatggtctccatctatcaagaagcactgtggtgtacttcaagcacaatgatatggcttcacttgcaagcactttggaaaaacttactcgtggaaataaacgtgctgaaaagattagacgctacattgttgtagaatccatttaccagaattctggccaaattgcccccttggatgagattgtcaggttgaaggagaaatatcgattccgtgttattctggaggagagtcattcttttggggtgcttggcaagtctgggcgtggccttgctgaacattatggagttcctgtgagtgtttggcctcagcttttcttaatgtttcaccataatgccccacctgtggtgtctgaccggggtgcgttgttacctagctcccaaacgaggcctaactgtttggtgaaatgcttgggacaaagtggccatcaagaatggagtcatggaacatcagcaggacactacaagaaactgataaatgagcctttcctagcgggcgatatctccccctctcgtctcagcacctcacgccgccggtgatcgccggtgaccacgggagcattacagcatcgccgagctcctccccggcgccacgttcagacgtccgtcgagcggtcggtgccgccgcgccgaggccgagtgttggatcctgggcggcgagcttctgggcgcggtcaccatggtggagcgagcgccgccagagaaaaac

SEQ ID NO: 26483 - DNA, 2542 bp, Zea Mays
ctgtgaagctttgagcaatcgtgggaaagttgagcgaagctgaaaccgtgtcccttattttgcaagggtggtgctcataaggaaccacccccctcttctttgctggtgggagaacaccaaatggcccagctgttgcaccatcaggattctgcattctacagcaaggaattgcacgggtgccggtggggtattcttcaattctttgggtttcgccgtcgcctacggtccacaaagatgctctctgacaagagacatggtcaggagaaaaacagccgtggaagtagacgccgaagcagctcctatgctccattgaagaacgaagacagtgcaattctggatgatgaggaaaacactgaggtatatcaggttacaaaaaaacagaaggcctcaaaaaggaattctggcaagtctagtttgaggtccttgattctaacgaagttatatggaaaggaaggccagaaagagaagatgcttccggttgcaccaaagctactccgcactatttcgatacactatctggaaagcaatgaatacgttcttgacggcgaatccacttcgagcggcgatggttcttcaaacagtactaagccgccgatgcaaaatgctggcgatatgatgaatctgcaccatgctacatctagcgtcccagatggctgtggtgtcgattcaagctcctcacttctcctaaagatagacgacgtccgtacgaagcgaaagaagagccaccgtagcatttcgatggacgggattcttcacaaggtcccctatgggaagaaggtgtccggagatgtgatcagtgaaggtctcccccgatcagcctctgccacgtacgatagggacggcgcgaaaccttactttggtggtgctgctgcaaagaggcatgcaaaccaagggtttcggcgttcacgttccctcagtgaatcctgggaaaactactcgcgcctacttgattccatctcgagtggtgagtccaaaagaacactggccagctctaagtctaccagggatcattccctagatggccctgtcgcgagtacttcattgcaaagaacttctgaagccttgaggtctcaaggtctgggtaaacgtgatgagaacctcgtgactgcagaagatgcgttggcgccacatgttcaagagaaaactggtgaagttgctaagggtcagagctccagcgatacgatggtcgctggtggctctgaaaatcctgctttacctgacgagcacgttgacgacaaagctgaagaaaacacatgcgctgctccttcaccttcagaagctgtcggtatctcagaagaacaggcagtgagtcgtgacggtaacagtcagactccctcacctgaagttggcataccagaagaacattctgcagaagcttatgatgatggtgatggtcagatccactcgtcaacacaggctgctgatgcatatgctgctctgtcttcagaggagaccaccgtttcagaagaacgtactccagtttctcatggcaaccaaacgcacccgttccatacttcagagccaacagaaggtacgttgttggacttggacccaagagttgtccattcaaatgacgctgacgcttcaaccggcatcgctgccgtagaacaagaaagcggcttcgacggcctccaagtagacccaaggcacgagaccgagttccgctacgtgaaggagatattcagaaagtcgagcttcagcaccgagacgctgttcgacgaatggtgctcacagaacatcagtgtcctccaggaagcggattgccagcactacgaggccgccgcggcgtcgtacgacctgtcggcggacatgtcggccgagcagctgctcctgttcgacctgacgaacgaaggcctgctggacatctacaggaggcactccgtctccaggtctaggctctcctggttctcgtctttcgaccggccgagacctgtggggagccgtgcgctcggggagctgtggtctgggctgagcctccgtctggacggacggcggccacgggccagcgtccacgtcgacgcggttctgtcgagcgacctagcgaagagcgacccctggacggatttcccgcggggcgctgagcgtctggggagcaggctggcggactctgtgtttgacgagcttctgagtgagctcgttcagcagctcgcggagctttgagtgcgggcaacaaggcgtctgtttttttgtgcctatttttcgtgtttaggggggttctatattgtaggtactagttcatttcttttttaggacaagataatctggggattattgttgttgttattaggtcttaggaattcaattcgtgtgctggaaaagttttgcctgatgcactgatgggtgctagtgtaagtgctgactgaaagagcaacatttgtacgtacaccttcgagagagagagagaaaaaaaatgtatgtatatatagtcttggaaatgaaggttacgaaatagaaatttgtggagcaggcaaaggtgaaagtgaaacgcgaaaagaaacgattgaaagtgaaacgcgaaaagaaatttctggtcccaagtcac

SEQ ID NO: 26484 - DNA, 912 bp, Zea Mays
ttagacgactaatatttacttgcatgaaggtttatgtaattgacttcgggcttgcaaagagatatcgtgattcagccaccaaccgccatataccttatagagaaaataaaaacttgactggcacagctcgctatgctagccgtaatactcatcttgggattgagcaaagccgcagagatgatttggaatcgatcggatacgttcttctgtatttccttaggggaagtcttccttggcagggcttgaaagcagccacaaagaaacagaagtatgacaaaataagtgagaagaagctttcgactcctattgaggctctatgtaaatcccatcctgtggaatttgcttcctatttccactactgccattctctgacatttgatcagcgtcccgattatagtttcttgaggcatgtctttcgagaattgtttgagcgcgaaggctatcaatttgattatgtgtatgactggactttgttgaagtgtaagcaatcccagaaggctaaggttcagcaaggatgctctcatgatgcaggcgtaagcagccgtccagttgcaacaaacgtggacaagcaccaagttggtgttgcacgcccaattaatgcttcaggtctgcttgaagcagaacaacgcccggcaatcagaatgcaattaaacagccgttccaataatctgcatcctgagagattgggagtgtctgctagtcataataatgtactgctgcaatccacgtcacttgacaatgctgatgctccaatggaccacgcgacacattcaaaagcacaggggtccattgatccacacactcgtggaagttatagtccagggccctctaaccgcacttaaccttttgcattgttcgtaaaagcttgcgggtccatgcagtaaacaattggttgcctgatgtagtttcatg

SEQ ID NO: 26485 - DNA, 3357 bp, Zea Mays
gcagtctcgtccgtttctcttctcctgtgtctatctccacctctcctccacccgggcgatctgctctttggacttcagcgaccccatcgttctatctctccgtcgtcatctatctgtgctccccacctcccgctcccttttcgttgcgcctcggggccgctgcgctggtgatttgcgtcgcctccccccctggggttaatgtgacggccctgccgacgatcttgcctgacgactagtttcttctctagctgggctactctccattcagtggttatggagcctcccaggaagaataagtccagtggcatgcaagtcaaggaggaagtgaagttagaagatggaaatgatttgttagtcaagcgcaggaggactgaacttccaggttccattgttcaactacaacagaaaattgaagtatttgacatggagaacaaagtgccagatggtctttcagttgaagattctactggcaaggatcccatggatgtgctcactagatatgcagcacagaactctggtcaagggaatagttgcagtaacgaacctgcaatctcgagactgacaaaaatatgcaaggcaattggctggaaagaaccatcatatgactttgaagaacaaggacctccgcataacagaattttgccccctggacgacatattatcgtttttggacccttagctcggcgccacaagccacgacgtcaatgtaacacgtctcggcgacgtgagttatggcatcgaggtaccgttccagcagtgctgatctgtgctgcactggcgcccgtcgtgacacctagctcggcaccataaatcttgacgctgagatctatggcgttaagctcggcaatattgccctgtgtgtgcttcctcttcccccgtgctagcttcttccactgcgtcgccgtgctaaccgccattgtcgcaacaccgtcgcagcacctcgcccctacgccgttctcctcgcccacccccgttctcagctgtcgtcgcaccttgacctggtcgccgcgcccccggtcctttgccgcacccacgccctaagcctagagctcgcctacaccgtctcggccctaagcttgcccgttgcctcaacctcaagctcgcccacaccgtcccgaccctaagcttgctcgccgcctcgccccctaacctcacccttggcccttgcgcatagtcgcctcgttcgccgctccccgccttgagttcgtcgcagtgccactttacttctcgccccaagacaacacagttccacttgttggaccctcactatgacgagcaccataggggacgactcatcgcagaagggcaggtgttgcccgttctgcggtccaggacccatgacaggtttctagacatgcggtacgacgacaggtacactcctctccttgagagggctggcttggacgtcgtatcgttccaggttcgccgcgggttgcccacaatcaacattgcggcgatcacagctttggtcgataggtggcggccggagactcacactttccatcttccttgcggcgagatgaccgtgacactgcgagacagccagaagcaacttggtctcagtattcgtgggcgtccagtgaccggtcaggcagcgcccggtggctggagacagagagtcgaggcctttcttggaagggaggttcccacagacacaccaggtagccacacatctggggtttctctcgcctggcttaggcagtcgttcggggagtgtccagctgcagcagatgaccagacggttagctactactgccgagcttgggtcctacacttgtttggctccgtcctttttccagacgcgacgggtgatagcgcgtcctggatgttccttccttgcctcactgattgggacatggcaggaggctacagctgggcttctgcagtgctatccttcctgtacagacaactttgtgaggcttgtcgtcggacggcaaagaacgcaagtttaggcggttgcgtgtacctactccagttgtggatgtggtcgcacctaccggttggtcgccctattgagtttgctcctcgaccttggttcgacgtcgtcggcttgcgactacgaccgacggcggcttaccgttgggaccaggtccaggctccgttcgcacgtcaccagcgcgcctacgtcgagtactcaaacgagctggacgcacttacaccgtcgatggttagctggcaaccatatgatgagccaccgttgccacacattcagttgagctccgcgtgcacgacagatgaagacatttatttattaaggtgtccactgatttgtttctatgccgttgagtaccacttgcctcatagagtagcacgccagttcggtctacgtcaggagttccctgtggagcccttctcgacatcggtagaactccacaagttcgaccgccaaaagcagaagaagatcactgactttgaggcgcaccaccaagtgtacattgacgaatgggaccaaatgcatgacctcctctaccagagcgatcagtcccacaccaactacaactttcgcgagtacatctcttggtatgtcggtgtaactcggtgcaagttgaagggccagtggacatcagcggactacgccgaactagagtcttcagatgacgaagacacatcctatgacctagttactcggcatgggacacacgtggaggctgcaccaatcctagatagagtgggcaactccatgatgcagtctgtggtcgacatcgagcatttctctaagaccacttctgacgacaggacacttgcctttctctcagctatcacgtcgcctacgttgtgctgctgctcgttgtggttgcaggattagcgccgtagttaacatacaacatactctgcagcaccatggtgacacctcgctaggacttggagctatcaccgttgcacagggctcgtcacgtacgacacgagatgcgtttgcgagccacaaggaggacgaggatgacattaagattcctctcgacaagattggaccataggatgctcctaagacaaccttcacagcctataccacgcagacgatggcgacgatcgcgcaaccctaacaccccaggcatcaacgctcttggggccaagggcaacggtaactagaaggatgcgagggaaacatgatggtgcatgtcttctgctttggcttttttgtgctatggactatggatgacgatatagactttctgcgttgtacactttggttgatgatatagattatctgtggtatgcactttgtttgatctagttgtgtgatgcgctatttagagatatatatgctcatatcatattagttttttttataattgtggatgttactaaaaccatgtccagtagtctatccatactttagctgttgttctgcactgtaga

SEQ ID NO: 26486 - DNA, 77 bp, Zea Mays
accagtgattgaactagggtagaaagaactctagtgcaggtaatcttacctaacttgacaaataaaattggattttt

SEQ ID NO: 26487 - DNA, 5704 bp, Zea Mays
aaaagaaaggactgcagcccgcgcccgccacgcctttctctcttccgtgcagctgcagactgccgtgccggtgcggtgcgccccgctcccgtccggccggaccccaaaaaaaaaccacccagaccgctgcgattttttacgggaaaggcttccccctgtttacggctttacgccaagcccgccagctcgcccgttgcattcccgtttcgagcttccgccctccctcctgtgtactatctctttccctctgcccaccgctcgcagtcgtacaccaaccacttcatttcggggccgtgagagagaggccgcgcggcggcgacgaggcccggagcgagggtggaggacgacttagggtttttggtcggctgatccatggacagggggacgggcccgggcgccgaggtgctctcccccggcgaggccgagtggcccccagagctccgcctcccgccgccgcctcctcccgtgccggagcccccagggccgcatccgcccgcccctgactccgcttcgatgcgaatgcccgcacctcatctacacctgcagcttcctcccgcggcggcggcgaggaaggacccgtctccgcctcgccacggggagggcttcgatgaccagctgttcctcggatcgctcatgggggctgcggccccgctccagcatcagcaccaccaccagcagcagcccgccgccgcggcaccggtgaagaggaagagagggaggccgccgaagaacagggacggtgcggcgccggtgcctgcgccggtcaagccggtgagcaagaaggatgaggaggtggtgtgcttcatctgcttcgatgggggcaacctcgtggtttgcgaccgaaggggttgcccgaaggtgtaccatcctgcgtgcatcaagcgagatgaatccttctttcggtgtcgggtcaagtgggattgtggttggcacatatgcagcagctgcgaaaaggcagtacaatacatgtgttatacttgtacgtactctgtctgcaaagggtgcgtcaaacaaggcaaattctttggcgttagagggagcaagggtttctgtgacacatgttatggtactatattattgatagaatccaaagacgatggtgcaaaggttggtgttgattttgatgataaaaatagctgggagtatcttttcaagttatattggttggatctgaaagggaagcatttactaacgattgaagagctaaaaagtgcaaagaactattggactgttcctactactgctggtaggagagagaaagaggagtcatctgatgaactatatgatgcaagcaatgaccaagatgctacgtttgacatttcctcaaagaaacaaagacagaataactcttcaggaaaaagaggacaaaaacgtaaaaaagatggtggcattacttcaaggaagcgtggaatctcaattaatagtgctggaagcttaccgaatggatcaacaggtgaagggatgtccttggcaggtgacacaaaatgggcatcatctgagttattggaattcattggtcacatgagaaatggtgatagttcttatatttcccagtttgatgtccaggttcttttgctcgaatatataaagcaaaataacctctctgatcctcgcagaaaaagtcagattatctgtgatgcaaggcttagcaatttgtttagaaaaccacgtgttggtcattttgagatgttaaagcttttggagatgcattatcttgtgaaacaggttccaacattgaatgcagatagtgaaagagcatttgattcatactcggcccaagtaaatcatggaggatataatgagttgtccgataaattaggttctgataagaggaggaaggctcatatgaagattgaaagagaatcgacaattaatccagaggattatgctgccattgacatgcacaatatcaatctgatttacttgcgccgcagtgttatggaggatcttattgatgaggttgctgttttctctgacaaaattgctggggcttttgtgaggataagaatttccggtcttggcaacaagcaagatatgtaccgactggtgaaagttctcggtacacataaagttgcagagcgatacactgttggtaagaagacaacagattatgctcttgagatatctaatttagaaaaaaaagagattatcacaatggacacgatctcaaatcaggatttcacagaggaggaatgcaagcggttacgccagagtatgaagtttggtctaactgcccggttaaaagtgagggatgtctatgataaagctaaaatcttccaatctctgcaatttaaagattggttggaaaatgagaaacagaggctgagccgtcttcgtgatcgtgctagtgaaaccggacgccgaaaagaattgagagagtgtgtagaaaagttgcagcttctgaacactcctgaagaaacagagcgcatgattaatgaagctcctgaagtacatgttgatccccagatggatccaagttatgaatccgctgaagaacccgattataagaaagctgttgattggaccatgcatcggaacggaccagatctattatttccaggaagaaaagggacaaaattgaattctgtggagaatcatacacaaaatagtctggatgcaagcggtcacattagcagtctacctacagaggatgtggaccatagattaggtgctggaagtaacattaatttaaacaatatggcaccagagcctgcatcacttggagttttatcaaatgacactgagccagaaaaagtttggcactacaaagaccctaatggaaatgttcagggaccgtttactcttttgcagttatccaattgggcaagttttttcccacgtgacctgagaatatggcttacatttgagagtgaggagaactcactactgttgactgaagtgctcccaaagcagcagaaagattttattcagccttcaacagttactaccagtgataaatcaatatgggcaggctctggtcaagatagaattaactcaaatgcaaataactcttcctcccctagcttgtctgctgagtgctatgatccaacaaaatatctaaagcctctaggtggaacgtcaccatcaagatctctgaaagattctcatgctttgcatgaggtccagaatcaggttaacgattcatccacaattctttcttcagctggttcatatgtaccaaccagttctcatgatgaaagggtctcaagagacagggttgatgagtggaacagtagtcaggacaatggtggcatttggaatccaaccatgaatcatagtcggaagagtaatgcacagcaacatcctgacggttttacagggaaggaccaaatgctaactgaatctaaatgtagttcacatatggtctcagttcttaccccacaacaatctgagagagaccctgccacttctcttagtactacaagtcgtccggagtgcaaaaccatgtgccggcaggaaggttcttcatggagttcagctacaaatgctggagttcatgaccttcagttaactattgctttaacaaagccagagacatgttctccaacaaatcctgttgaagacagagattcgagttctgcttctgcggtgtcttgtcagtcaggggctcctgcctgcattccccaacccgatccaacatctacatgtaattcaagtaagattgaggcaaccatggatctgcataaaacatgccagcctgacacatcaaatgaatcattcggccggcttcctgaacctcaaagtggctcactcttttccttgaaaactctaaatcttgagtccgagcaccctagttctacgccaaaactggaggggaaggaaacttccatgaaccagtcaggatcaacatcagtagcacatgagaatttagctacaaagacacgtgtccgcccacctaccagtaaaattgatagcttgcaaccacttaaggaaagatcatgtccaacagaaagggactcaatcactcaattagagcatctgtttgaagagaatgtggtaaagagaaataacgaagtggtcaatcctgtatctgatgctgaagggattgctgtatcagatgtgttggaatcgttaacagaacaagattgtgaaaaatacagtacacatggagcagattgtgaaaaatacagtacacatggagcagcgcctttacaaaatttggtgccagcttcagccgaggaagaacaaccacaatgctccagtcctattgcattgtccccttggggggaaccaagttactatcagggtgaagctgttgattctgctctatggggcgtccaggatggtaatgacatgtggtcaatgccttcaccaacacctggtctccagccttcatcagaggaggcgagagcggaccatggagatggtgcatttgtcgaaacattaccaagacaaggggacgaaaagacggaacatgcaaactcaagtgtctcaggttctggagtgccagaacaggtaaaaccaaaagcaagcactgcatcaggtccatctctagatgggagcacaaaagctttgggttggcaactgctgggctcatctctagaggggagtgcaaaagcttcaggctggaaaccgccagctttatcgattgaagggattgctaatgcctcaggttcgcaagcattgtatcctacgcaagggagcacaaaatcttcaggttgtcagcgatcaagttcatccccagatgggagtagaaaagcctcaggttggcaacagtcaagtacatcaccggtggggagtggaaaagctcatggctggcaacgatcaggttcttttacccagggtggtacaaaagctgcaggctggcaaccctctggttcttctacagatcggagtgcaaaagttgatggctggcaacgaacaagttcatctccggagggaaacagaaaagcttcaggctggcattcatcaggtcgtgagagctcaaagatcacatatggtgccagtgaaaaccgtaaatcattttctagccaccaagcgacgacaccaacagggagacactctttggcaaggaggcagggaagcagcgacaagggtgctgctggttgggaagagagtctaggaaacacttgggaagcatcaaagagacaacagagaaacagcgacaagaatgcaggctgcggagaggctctcggaagcaacaggacctggcacccatcgtctggtaaccccagtcggagcagccaggggaatcaccaacatgacaggcattctcacggcagtgattcgcggcggggtagctcaaactaccctcggaggtccgaccatcgtcatgaccatggcagtggtggttcgtcaagaccctcgtcaagagggcagccccagaggggggtttgtaaatactacgagaatggccactgctggaagggctcgaaatgccagtacctgcaccgatgactgccgtgaccgtgggaagcggaacgccctcacatttttgtatagcagcatatggtctcgtcgtagtcagtaaaaggaggaactgtgtcggcgggaccactagttcgtagtagtacatatccttcagagcaggagcatgactaaagattctccgctttggtgcaggaatgcgccccttttgttcagttaaacggaggtgtgggcatttgcaaacatggattttctccataagccagggtgttgtgcaatcgtacggaataactactgaagagctgcacgtccgattgagaatgacactacggaagag

SEQ ID NO: 26488 - DNA, 1874 bp, Zea Mays
tcacttgtcaccaaatcaaccataaagtattgattaattcctctccatctttttatctctatgtctcatttacattgtatttcaagaagtcatacggagcgaacgttactatagcacacggaggacctttcgagagccacgctgtaaacctatgcacacaaaaaagaagaaaaaaataccacccttgctcttaagcttcgcgtcagccaccctccgctattcgttctatctccttctccactgggccaactccgctctactctccaatcccaggcgaatccctcgtcttcttcgaccgcgtgtcggagcttcatcttctctggtccgcctgccctgatttgccgctccgctctcccccccttccgccggaaaggggggaaattgatggcgaggctagacgtttcacagtggcctgttgtcgaacctttgccatcatatggacgaggaatggaccttccaggttcgaggcatcgaagcttaataaacgggcagaatctagttgatgttgtaattacgggaaacaatggaacaatcgatggccagggttctacatggtggaactggtttcgttcgaataagttgaactatagtcgccctcatcttgtggagtttgtggactctgagcaaatcgtcatttcgaacataacatttttaaattcccctgcttggagtatacatccagtgtattgcagcaatgtagtggtccatagtgtcacaattcagacttcattggatgctccacttaatcatggaatcgttccagattcatgctcaaatatgtgcatcgaggacagcagtatcagtgttagccacgacgccatatcactaaaaagcgggtgggacaagcaaggcattgctttcgggaggccaacctcagacatccacataagcagactggatctgcagtcctcactgggcgccgctctcgcgttcgggagcgagatgtcgggcgggatctcggacatccatgcggaccgcctcctcatccactcttcgtccagaggcgtcttcttcaagaccgcgccgggacgcggaggctatatcagagacaccgtgatctcagacgtccagatggaagacgtcgacgtcgccatcgcattcaccggtgactggccaagccacccagatgaccagttcgacccggccgcgctcccggtggtcagccacatcaccctgaagaacatgactggaacaagaatctcggtcgctggcgttttgtcaggaatcgccggcgacccgttcaccgacatctgcctctccaacatcaacttctcactggccgattcggccagtcccacctcccactggtcttgctccaacgtctccggatactccgagctggtcttccccgagccttgcctggatctgcagacccaatcctcagacgcttccgtctgctccaccctccctagcttccacgccgccgccattgcagcagcgtaaatgcacagagagtacaaagtgtccatcctttttcctgttcccggtcccctgtacacttcagaggatctctcaagccgccttttcctcccccgacaattctttgaagctataggcgcgcccctgtcgttgaagaaaagaatcgttcaccgtttttctccggccgtcggcttcgagggctcagctgcatcgcctttcttgcgggaggcaagcctggcggcggacggtcgacatcgagctgttaatttgcttgtacagttatgatttcttcattcaatctgtaagaaggaatttttgtggtagtagagggttgagtcgagtccagagagttgcttcatacgattgtcgatttggtgaataaaacacatgatgaattcatgatccagtggctctgtatacatcctgtcatccttgtgggtacatccatccatgat

SEQ ID NO: 26489 - DNA, 828 bp, Zea Mays
aagaaccaggcgcatgtgataaggatggggtactgaggaaaaggcagcacggtgcaggtggtcaaccggagttgacaccagaagaagcagctgagcaggcagcagtaatgaggcaacagattcacctcttctggggtaatatgcttttcgagcgttcccaagtggagtttaagctcagtgttggtgactggaagacaaatcttgatgcatctgttgaaaggtttaagttggctggagcttcagaatcagatattttgacagtgttgaaaaatcacttttctaatgtagcctctgagtgtgaagagaagaaagtcatgacttcaggcacagaaatttcccaaacaaatgacaatgttgaggataagtgtgtggttgaaacctaagttttcatggttcaaggcgagagcttcaagcacactgagttttgtgattgccattgccaactggtgcagagtcgacatgctccatgaaatcttgataatttactagagaaaccaggtcttggcaatatctccctgctcacattgtttaaaatatcggacacatacttagtaaacacggaatgttacccatgactcatttattgtgccaagttgctgatccctacataatagatctgtattttagtttttgtgtatctattcttgccgcttttgcatccagcaatcgaaggcagttgtgcctcaaatgtggctgctttgtaagttgtaacatagtgtactttatgcactctacagtaccgaattattttggcactgtacatgtactgaattccttccgcagaaaatattcaaacaaaggtactggccaggttcagccaccattaaa

SEQ ID NO: 26490 - DNA, 2737 bp, Zea Mays
tttttttcaccaaaccagcgaggcagctaccgttttgtcgccatagcactcccgccgaccccctcgccgccgccgggaatggagaccagcaccaagaagcttagcagccttcgtatcacctccctggacgacgatgacgacgagaccgagatcccgcaccagccccctcaagcaggcctctccaccgctgaagcggattatgaggacgacgacgatgaggaggaagaagccgaagtgactcttggtgtccttagcaaaccgaagcacccaggcctcctcctccgccacttgttccccagcaaggccggtggcatcccggcgtggctagacccggtgaacttgccgtcgggaaagtccagctactgtggtttctgtggcgagcctctgcagttcgtcctccagatttatgcaccaattgaagataatgtagcagccttccaccgaacgctgttcatgttcatgtgcccatccatggcatgcttgcttcgagatcaacatgaacaatggaagcacaagtacgggaatccatgtagaagcgtgaagattttccggtgccaattgccacggaataatgccttctactcagctcaacctccaaagcatgatggctctgacaaaccactctgtccaggagctcctgtatgccactggtgtggtacctggaaaggtgataaaatatgtagtagctgcaagaaaagcaaggtactgttctgagaaacatcaggcactgcattggcgaactggtcataaaaatgattgcctccagataataagttctgctgcttcaaattcagttctgccagctgtaggaatagttcctgctagcatttcttggccagaatttgagataaaaatagactacgaaggtacttttgattctgatagtggtgatgaaaacaactcgaagtcattggtgatgcaaagacatgggaaacttgatgctatgatgcagtcgtggatggaccatttcgaggctgatgctgacaacaaatgctgggcgtcttttcaagaacgggtctcaagagcaccaaatcaagtgttgaggtattgtcgagaaccaaatgctaaacctctatgggccttatctttcgggtgcccgtcagatgctgatatcccatcatgtagctactgtagaggtccattatgctatgaatttcaggtaatgccacaattgctttatttctttggtgttggaaatcaaccagactcgcttgattgggcaacaattgttgtctacacatgtcaagggtcatgtgaccaaactgttagctacaaagaggaatttgcttgggttcagttgtaccctacaacaaccacgaggcggtaataatgtttacctattcctcggagtaactactgtccaattctgcagggaattgacaggaatcataggcaagtgcatacctcctttgggtactggaattttgagataggatgtggcttcaatgtttccaggtctattggtcgtgcagggagttttaagcatcttccgaccgtggcccaatgcttggtgctcgttacagtgcctttgatccatttaggcactatccttgggcccacgaatacgtgatggcaaatagttgcatacttccatttttgtgaaggaaattcctgcttgagccaattacagaaggccctgatatttgtcaaattgatggttgtagtgttaaattggaatacaagaggaggcaagtcaaatatggtttgtgtgacagcacgttactaacttactctactatatctgcatgagaaaggatgaaccctgtttgcatgtatactaattaatctacggattcattaatgtgtgaataagattttatttaattatgacagcaaacgtgacatgccattacaatttcgtttatgcaaaaaagtaagttgcttatagtttagcctttggtttcaatttgcactttatagaattatactggcagagctcctgacggagcacctgacggagctcgccacaggtaccaaacggcgcagcagcagttgatgtgcaacccgagtgtactgccgctcgaggaggccagtaagtgccaacaacatgaatagccaaagcagggaaatagggctggcgggggcacatgggtaacttggtcctggagcattggagaaggagcataccacaaggaaaccaacacgagttccttgcttcctgaaggcctcatagctcagattactgggttaacgaacaactcatactttgatggagcacatgaggttcgacattatgtcaggaagcattcgaatcttggtcgtattgtgcttgaagttgctaaggactcgcaaatcccccgccaagcaaactgctagaaatcttttcagaggtggagatgatgaagatgatagtgctgatgccgacacaaatgatcctgttgtaccttggtcattaggtagagtaggagttgggcatatggtgtacatctccggtttgacttgtgccttgagttcaacaaatatgaaagtgctgagagaggtggcatctagaggacgtcatgtcgaacgtgtgaagaatttttttagaaatatgtatatttgtgcgaaactttttagaaacttgactccattttattttctatgttactctcggctttgtttcctatcctttccaatgacttgctatgcatttgcactgtatttggcatgtttaaaactgctacacaaaacttgctatatattttgtccaaaaatactatatccttgttatgattgattgatctttattttgtctgct

SEQ ID NO: 26491 - DNA, 2398 bp, Zea Mays
aaagctctcgtttctagcttccttagaggaaagctctcgttcctagcaaccaagctagcgaatccaacccaacccgtccatttctccacatccccaccctccctccgtctccgcctccgcctgcgccaccctccaatccgcgccggcgcgtcgccaccctacccgattgctacctcctcgtggtgggcgccgctccgatccgcccgatccgcgccggcgcctcgccaccctacccgattgctacctcctcgtggtgggcgcctgctcctggagttccggcgcgcggcgggggcggcgtagtaatggaatccgaggacgacatgcacgacgcgaacgactccgctgaagacgatttctacagcggcggggaggccggtctcgccgccagcgacgacggagacgccgactacgactttgcggaccacgactccgacgactccgcggagctcatctcccacagacagcagcaaaattatagtatattgagtgaagttgatatacagcggcgccaagaggatgatataaatagggtttcaaccgttctttcaatttccaaaccagaagcatgtgttcttctccgcaactataactggagtgttagtaaggtgcatgacgaatggtttgctgatgaagagcgtgtccggaaggttgtgggtttaccagagaagcataatgaaatgccaaatgacagagaagtaacatgtggaatatgtttcgaaagttgccctcgtgggtcgatgagtgctgctgcatgtggtcatcctttctgcagtacatgttggagaggttacattagcactgctataagtgatggtccaggatgtttgatgttgaggtgtcctgatccatcttgtgctgctgctgttggacaagatatgataaattcactggctgctgatgatgataaggaaaagtatgggcgatatcttcgcagatcttacattgaggataatagaaagacaaaatggtgtcctgcgcctggatgtgaatacgcagtggaattcgtcatgggcagtggcagctatgatgttaattgcaactgttcatatgggttttgttggaattgcaccgaggaagctcatcgtccagtagactgtgccactgtttcgaagtggatcctcaagaacagtgcagagtcagagaatatgaattggatactggctaattcaaagccttgtcccaaatgcaaacggcctattgaaaaaaatcagggatgcatgcacatcacatgcactccaccatgcaaatttgagttctgctggctatgtcttggtccatggtcagagcatggagagaggactggtggattttatgcttgtaaccgctatgagtcagcaaggcaagaaggagcgtatgatgaatctgaaaggagaagagaaatggcaaagaactcccttgagagatacacacattattatgaacgatgggcagccaatcagtcgtcgaggcaaaaggcactgggggaccttcaaagcctacagaatgacaagcttgaaaggttaagtgacatacaaagtcaacctgagtcacagctgaagttcattgtagaggcatggttacagattgttgaatgcagaagggtattgaagtggacttatgcctatggattttacctgccagagcatgagcatgccaaaagacagttctttgaatatctgcaaggtgaggcagaatctggtttggagcggctacatcaatgtgcagagaaagaacttcaaatataccttgacgcagaatctccctcgaaagacttcaatgatttccgtacaaagttggctggattaactaggcccttccactagccatggcacatgcagcaaaagcgcaacttccaagagcctcggtggtaaaagtaagagtggcaagaacagggcatcaagcagcagttccaaatctggcggctcaacccgaggtgtggatgatagtaacatctggacatgcgatcagtgcacatatgcaaaccccaaatctgccagagcctgccaggcttgtgatcgccagcatcgatagcggtgtcagtcattgctagagatttggaccccatttgtcgagaattttctggtgttgcgccgtgcgatacacaacatacatgaaaattgaatattagctgatctctgggggtaggttttcgtgtatcatggattgtttgtcgactgactgcgcatgtgaagcctcaactcagcatccactcccatttgtgtatataagtatatccatatctgtaacaatgttttgttcaatggaagtagcggagctaggaggcgtctgctgccaaaggaactcaactgttgtagtgctgttgtaatgtaagatgcattggtcaaatttaaagaaagttagtcaccctgttacagaaattccaagggaactcttgttacatgtgattgtggtggttgac

SEQ ID NO: 26492 - DNA, 883 bp, Zea Mays
ctgctgtcgtcctcacattgagaacaatcatttcttcgtttactagttgacagcactgcaagtatgccctgtcctattaagtgttctgcggctcggtgtgccccatcattgactgaacacaacgattctaggaataatggcatccatgcatctagtgtatatggacatgatctcatgaagtccatgtctgatctccaggaagttgtattttcctcctttagcaaagcatgtcttctcagtagttgtatcatatatggtctaccacccagttgtatagcagaaccatgggcatccttgcaaagacaaggcaagtacaaggaagccataaattatcattccatggtgctaaacatctccaaggtgaccggagaggatgcgggtgtcactgaagcatacggagcaatagcggattgctacaccgagcttggtgagctcgagaaggcaggcaagttctacgacaagtacatagcaagattggagaacgaatgagaaaacagtgctgattggcaaatctgtgagagcagaaacaaagacaaggctaatcatatctctactcttgtcgtcatgtattctactatagatgtgcagttcccagctggaactgatgtttgttatcatgattcaagtttctttttggcagaattatcccagatgtttaggtacagatcagtatcatgctgtgcacgtagttgttttgttaattagggtctcaatggtccgtacaggcattcatgtcaatctgctagttgcgccggcttaattttatagttttgctatatcgtgcctaggtgaaaatctttcctccacatgtttttttttagtttttgttttcatgttttctttctaagtaacacgcatagaagggatttaaactaagattctc

SEQ ID NO: 26493 - DNA, 1207 bp, Zea Mays
gtacctatcatcatccactccaaagtccaaacccccaccgagccacgcgacgagccgcgccgccatgtggccactctcctacctgccgccggcaccggcgcagcagttgcgagcgcaccccggtcccggctccggccgcgggcccaggccgcagccgtgcgggctgccgttccccgacgccctccgcacggctgcggctgcggccgccgtctccctttctctcatctatggcaacggcgtgggcgcggccttcgcggcatcagcggcgcaacccacggaggtgtgccggaacgggggcgcggagatggtagaggaggtgagggccgaggcggtgactaacgagcagctcgtggaggaggcgtgggaggtggtcaacgagagcttcctccccgacgccgccagccgtccgtggtcgccagagatgtggatgcaaaggaagcaggatgttctccaaggcacaattaaatctcgtgctagagcccatgatatcattcgcaagatgctagcgagcctcggtgacccttacactcggtttctatctccctccgaattctcaaagatgtcaaaatatgacatgacgggaattggattaaatctgcgggagattcctgatgaaaatggttcttttaagttgatggtattagggctgttgttagatgggcctgcttactctgctggtgttagacagggtgatgagcttttatcagtcaacggcattgatgtaaagggtaaatctgcatttgatgcttcatccatgctgcaaggtccaaaggagacgttcgttacgattaaggttaagcatggcgactgtggtcctgttgagtcaatgaaggtgcagaggcaactggttactcgaactccagttttctatcgtttggagaaaagagaaaacaatgattcatctgttgggtatattcacattacagagttcaatgcagtggccaaaaaagatttggttagtgcgctaaaacgtctacagaaatcaggcgcctcctattttgttctggatttgagggacaatcttggtggactagtgcaagctggaatcgagacagcaaagctctttctgaataaaggagacacggtcatttatactgctggccgggatcgcctagtccaaaaggcaattgttgctgaaagtggacctatgattgctactcccctcatgttgctggtgaataataggacagcacgcgccagtgaaata

SEQ ID NO: 26494 - DNA, 220 bp, Zea Mays
cacaccccccacaggtcaagaacaggtaccactggatgaggcgcatggaggatgttgcgatgtgttcgtgagaggtctaggtcgtcgtctctcagtcaactttgggttgctggatcgttgtctccttgcgatgtaattatttatctattttgtacagaactcctattatatagtaaagttgtgacattcgtttctgtatcatgattcatcatatgtgtga

SEQ ID NO: 26495 - DNA, 2373 bp, Zea Mays
atggggcggttcggtcatgctcctagcctttgtctgtgcgtgccgtcgaggaggacatggtggcgcatgccacgcttaggttatctcaacgatgaggagttcaggtctgagatattggacaaccaaggcccgtattgtggcagcagtcggcatattcctacggagttggtggtggtgttgtgtcacctcgtccgcttcgcgaaaaacgctagatcccgatgcgaccttgtcacttcatatcccgctggacgcattgatgctttccgagccgagatccccattcaaatcctttttttgccgctccagttagagatcaagaggaagctcgcgcagaggtcggagagggtcaagtccgtggacctgcatcccacggaaccatggatcatgtcaagtctttattctggcagtgtctgcatctggaactaccagactcagacaatggtgaaatcttttgaagtcagtgagttaccagttcgttcggctaaatttattgcacagaagcaatgggttgttgctggtgccgatgacatgttcatccgtgtgtataactataataccatggataaggtcaagttgttcgaagctcatactgattacatcaggtgtgtggctgttcatccgaccctgccatatgtgttgtcatcatcagatgacatgcttataaagctttgggactgggataagggttggatgtgtactcaaatttttgagggccactctcactatgtcatgcaagtcacatttaaccccaaagacacaaatacttttgctagtgcttctcttgatcgtactgtaaagatttggagtcttggttcccctgatcctaatttcacattggatggtcattcaaaaggtgtcaattgtgttgattacttcactggtggtgaccggccatatctaattacaggctctgatgaccaaactgcaaaggtttgggattatcaaacaaagagctgtgttcaaacacttgaaggacatgcacataatgtctctgctgtatgtttccatcctgagcttccaataataatgacaggttcagaggatggaactgttcgcctatggcactccactacttacaggcttgagaatacacttaactatggccttgaacgagtttgggcattaggttacatgaagggctcacgaagagtcgtgattggatatgacgaaggaacaataatgattaagattgggcgtgaagcacctgttgctagtatggatagcagtggtaaaatcatatgggccaaacataacgaagttcaaactgtcaatatcaaggcagttggtgcggatgctgagattgcagatggagaacgtctgccattggctgtgaaggagctaggaagttgcgacctttacccacaaagtttacggcacaatccaaatgggaggtttgttgctgtatgtggagatggagagtacattatctacacagcgctagcatggagaaatagatcctttgggtctgctcttgaaattgtttggtcaactgaaggagagtatgctgcaagggaaagcacatcaaaaataaagatctacagtaaaaactttcaggagaggaaaagtataagaccagcattctctggagaacgtatatatgggggagtattgcttgctatatgtacaaatgatttcatttgtttttatgactgggcagagtgcaggttgatacgtcgaattgacgtgaatgtaaaaaatgtatattgggctgacagtggtgatttggtgacaatagcaagcgattcgtcattctacattttgaagtacaatagggatctagtttcttctcatctagatggaggggcatcagttggcgaggaaggtgttgaagatgcctttgaattgcttcatgagataaatgaacgtgtccgtactgggttatgggtcggagactgttttatatacaataattcttcatggcgcctgaactactgcgttggaggagaggttactacaatgtttcacttggatcggcctatgtatttattaggatatcttgctaaccaaagtcgtgtatatcttattgacaaggaatttaatgtggtgggttatactttactactcagtttgattgagtacaaaacacttgtgatgcgtggggatttggaacatgcgaatattattttaccatccataccaaaggaacaacacaacagtgtggcacatttccttgaatcacgtggcatgttggaggaagcccttgatatagccactgaccctaattacagatttgatctggctgtgcagcttggaagcctcgaagttgcaaaggaaattgctattgaggcacatagtgaatcaaagtggaagcagttgggggaactcgctatgtccactggaaaggaccattctgcttttccaaccggacacaag

SEQ ID NO: 26496 - DNA, 3122 bp, Zea Mays
gaccgtccccgcgtcggcgcgtcccgcacaccgcgctcccgctcggccgctcctgcctgcgcgctgcagcagctcggctgctcgcggtcgcttgtcccgtgcgcccggcggccggctgcttgccccgccgacctattcggctgcttcctgcttgagtgcttgtcccatccggcggcccggctgcttctgcttgtgagtttgtcccgcgcttgcacggctgcttgtcccgctctgcacttgatttccaccgcgataaaggtgttctatgaaccacctgcagaactactgaaggactcagaggttctgggcaagcatgtttgttgcgttgggtgcttgtgcatttgttctgattccagtagaatatttcctattcggattagctgctgggaagcttctggagcgcgtacgatcacttgattttcaaaacgatcaaagtttaatttgttctctaagtttgatgtggataagcttgctcgactcgcggatatatatcctgatgatttttcttttaatgattgcaagactataaaagattagataagaacttttattattcatgtacgaagaattgaagagtacaaagcttattgtgatcttgctacaaattgttttaaactatgtcataattttttttaaactgtgtcataattttttttcttcgttgcgtcagcaacacttaaattttttggcgtcctccgccactgtgcacggccggcactttctaggtgcagtgttggccctccctctcccacatccgattgaagcttcaagtgcaagctggttaataggggtaaaaacggtgctgtactaaggttagactgttaaataaataacagtgagttaatctagcgagaaacatttagctattgataattaaaagtattttagctattgacaatgtaggagcatctgcaagtgactcttcatttttacctctctatttaactttctatttcttttttcataaagattacattttatatgtagcatttcactccaacatgccatatatctagtttcgctagttagagtggctagccaaatttgactagttaggggatcaatttgaaaagttagatagattgacgggttagatgattaatctgttgaaaagttgttttgctgttgagtatttaaaatttaaattaacaaatcatttagctagtctattgaagatgctataaacgagcggcaatgtaccggtcgacccaaataagcaaatttgcccagctccgggcccaactgagtccaaacgtccaagtggacgcgaaccactcttctgaaccctaaaccctcgcgctttcgcctcccataccgccgaaactgacaacccatgaccacctcgcttcccctccttcctcgtcctctttggttggactgaggtgtggattcatccatcgctggtgaggacgccgggcttgtttttgttgttttttccctttctcttttcgtttatcgattttgtgggtcttcaaattcaatgtattgtttattggattggcgcttcagtttgtggcgggtttattttcaggttcgcttagtatcaatccaggctctgatttggtggctgaagctctgtttctccatggcgcttcgtttcgagatattaggaagattcaatcgcgcccgcgcagctcgcttaactcttcccccactttacttgtcaaacaccactttttatgcctgttggaactcaaggtacaataaaagggttaaccactgaccagttagaggagataggttgccagattatacttggaaacacctaccatcttgaattacgtccagggtctcaacttattgatgatttgggtggcctgcacaaatttatgaattggaaaagggcattgctgactgactctggtggtttccaaatggtttcgttgctgcatttggctgatattactgaggaaggagttacgtttcagtcacctgttgatgggaagcccatgctcttgacacctgaggaatctattcatattcagaacaatattggagctgatatcatcatggcacttgatgatgttgtaaagaccacaattactggcccgaggataaaagaagctatgtatcgcaccattcgttggattgacaggtgcatagctgatatgcaattggtggtcttgctggtggcgaagacaaggattcattttggcgtgttgttgcccaatgcactgctggattgcctgaaaataaaccacgatatgtcatgggtgttggctatccacttgatattgtagtatgcagtgctttaggtgcagatatgtatgactgtgtttatccaacacggactgctcgttttgggactgcacttgtgcctgagggtgtcctaaagttgaaacataattcaatggcgactgatgaacggccaattgatcatacgtgttcatgcatggtctgcaaaaaatatacgcgcgcctacttacattgcctggtcacaaaagatgctatgggttctcagctgctgtcatatcataacttatcatttatgatgcggttaagtagagacctccacatgtctattcttgaaggacgatttccagaattcgtgcgaggattcttgagggtgcagtttccaacgggagacgttccgcagtgggttcgcaacgcgatggaggtcgctggcattgacatatccgagtgctgtgcttccaccaatgtctgacaccaagcgtataggggccacctttaactgtaccggttgactgcaaatggagttgtgccgagttaagactcttcggcaagcaaaagacgacgacaggctttcacaaagaagtttttttccgtcatacatgtagggtctcacacggattcagcataggattttccaatagtatgctgaagcttggcgacaggttttgttagtgttttgtgttgtgtttggaaaccgcagaggtatgctatgctattcttctggggtctaggttatgcttcgtcttaatcactggatgtgatttttagtggtacggtcagatcaaaggaaggtgtacccaactctgacgaatattttttgttataacgaaaagaatgttatagtccttgcaatgatctgaacctgactggctgactgggtctgcagcatgcagcagctggaacagtccagtcccggcgtgctgctgctg

SEQ ID NO: 26497 - DNA, 2790 bp, Zea Mays
ctagcctcagcgcagcggttgccgcggctgtttctgcttgctgtcgccggccgcagtctccgccgcggctcacggatgccctgcatcctccttcccgcggccgcgcttaatcgaagccttcttctgcaccaaccttatcctgtcagctggaaacgccaaattctccaaaccctagcgccaaaatccccattctgatcgctgcaaccggagccggattctcttggtttacgcctggcgctcgtatcgtgtctccgcatgatgcaacgagcacgcgcatgaactcgatggatgaaatcaacctgctgcggcaggcgcagcggcagcatcagcatcatctcatggtgcgcggcatcggcgaggagatcgacctcgagatcggccctgtcgacgatccctctttttccggagcttccttagtggccgttacgtccacgcacgacactgtcgttcacgccgacgaccacaagagcctcctcatcccgtgttcgcagcccggcgcggcggacgggctggcgccgcagcagcacctgtcgcagggggaagagcatgacgggatgctcaggtcgccgtcggggcacaccaagaagaagaagaaggtggtcaagaaatggcgggaggagtgggcggacacctacaagtgggcctacgtcgccgtgcacgacaccaccaccaggatcttctgctcggtgtgcaaggagtacggccggaagcaccgccggaatccatatggtaacgagggaagcaggaatatgcagatgagtgcgcttgaggagcacaacaatagcttgttgcataaggaggcgctccggttacagatggcctccaaggagaagttgcagcctcccgagattgaggggccggtctatgtcaaagctttatcgaaaacagcagcatcaatacttgaatgtgtcctaaggagggatccccatgaagctgaatatatacagtcgatccaggaggtggttcattccttagaacctgttttggtgaagaatgcccaagtgccatggattgatgacagaggtgaagcacacgtcaatagaggtttccgtgtgcaattcagtcaggcgttaggtccatgcaggggtggtcttcggtttcacccatccatgagcttaagtgtggcaaagtttctggcctttgaacatactttaaagaatgctttgtcactatataaacttggaggtgctgctggaggaagtgattttgatccaaagggaaaaagtgataatgagataatgcgcttttgccaaagtttcatggatgagctgtatagatatttgggccctgatcaggattttcccgctgaagatattggtgttggtccaagggaaatgggttacctttttgggcagtatagacgtctttctggtcattttcaggtagactggtggttctgaagtccatatccagaatttagattatgggaaatcgtggatacatcctcagtggaaattttacaggacctaaaattttctggtcagggtcaagttttcgaacagaagctactggatatggtctggtaaagtgctaccttaattttcgtttggctggagatagtgtgttctgtgggtgctatagttgtttcacaagtaatatttctgttgcatgtgttgactggaccattgtccttgttcaaagtgaaacactatatgaaatcattctatctatgcaggtgttttttgcacgtcttttacttgctgaaatgaataaagagcttaaaggattaagatgtgtgatcagcggttctgggaagatagcaatgcatgttttggaaaagcttttgccttgtggagccattcctattactgtctcagattcaaagggatatttgttagatgaagatgggtttgattatatgaaatattcacttctaagggatattaaggctcagcaaaagagcctcaaggagtacttgaaatcatatccacatgctaagtatattgatgatgcaaaaccatggagccagcggtgtgatgttgcatttccttgtgcatcacataatgagattgaccaaggggaggctgttgcaatcagcaactctggttgtcgtgttcttgtcgaatgttcaaatatgtcgtgcactgttcaagctgttgatatcctaagaaaggcaaaagttattgttgctccagcaaaggcaactgctgctggtggggtagcacttggggagattgaattgaatccagagtttaatttgatgcaattgtcagtggaggattttgagaatagaattcaagatgcaataaagcaaacatatgaaaggtcggtcaaagctgctcaagattacgggatcatgaaagaaagccccgagtttttggtccatggcgcgaacatttgtgctttccttaatatcgcgcaagccatgactgaccagggatgtgtttagttaggcctggattctgtcaagaagcttcaactggagctttctgcaaccgcgagggaaaaaactttctgacaactagaggtgctttgatgcttaaactttgagtagttctgcacaaatcttgaagccctacaaaacagggagtaactaggatccatttacccctgtttatgctagaaatgtgtacagctaaggtgtaggaaaggcaactaggatccatttatgctagaaatgtgtacagctaaatgtaaatggaaagttctacattgtatgcaaagcctatatccgcaccatctgttacaccaatttgatttcattgttatgaacgacatattattctagtgcaaccacgctaattggtgcaacagtgcaatcaagataagacacgacaatggagttgagag

SEQ ID NO: 26498 - DNA, 1914 bp, Zea Mays
cctccatctctccctcgccccctgtgcccccgcctcacacaccacagcctacagcgcttctgctccagcgcccgcctcgcctcgcctcttctcctcgttctgccgcccgcgcgcgccagcctggtgctcgttccccttcttggctcgtcgagcccagaggttggtggcgtcagggatttgtattggagcggaggagaagggggctttgccccgaggagatcggggacgcgggagggcgcggcgctcgagccgagctcggttcagcgggatcacttggcgtggccggtcctccggggcccatgccgtgagcaaagccaggctttgttgcccgggggagagatcttgcgcttgcaagcggcgcccgcccaccgccatggccggcagcgacgaggtcaaccgcaacgagtgcaagggtgcggtgccgatccacacatgggtgctcatctccaacttcaagttggcgtacaacatgctccggcgggccgacggcaccttcgaccgcgacctcgccgagttcctcgaccgccgggtgccgcccgacgcacgggcccaggagggggtctcctcgtccgaccacgtcatcgacacgtccactggcctggaggtccgcatctaccgcgccgccactaacaacggcggcgcgggcgcggccgcggtcaccctgcccatccttgacttcctcggcggcgggccgtctccggacccgttcccggtgatcctcttcttccacggcggcagcttcgcccactcgtcctccggcacggccatctacgacaacctgtgccggcggttcgtgaagctgagcaagggcgtggtggtgtccgtgaactaccggcgcgcccccgagcaccggtacccgtgcgcctacgacgacggctgggccgcgctgaagtgggccacgtcgcagcccttcctccgcagcggcggggacgggcggccccgcgtgttcctgtcgggcgacagctcgggcggcaacatcgcccaccacgtggccgtccgcgccgccgacgccgggatcaacatatgcggcaacatcctgctgaacgccatgttcggcggcaccgagcgcaccgagtcggagcggcggctggacggcaagtacttcgtcacgctccaggacagggactggtactggaaggcgtacctgcccgaggacgccgaccgggaccatccggcgtgcaacccgttcgggccgaacgggcggcggctcagggggctccccttcaccaagagcctcatcatcgtgtcgggcctggacctcacctgcgatcggcagctggcgtacgccgagggcctccagcaagacggccaccatgtgaaggtcgtgtaccgtgagaaggccaccgtgggtttctacctgctgtccaacacggaccactaccacgaggtcatggaggagatcggcgacttcctcgcggctaacctctagcagcacatgcacacaaacttcacatgttatagcaagaagatgggtgctgcttgatgatctgcgtcgtggttgatggagggaagcctataatttcgccgtcaatcatctaacattctgtgtacagtggtggactgatggaccaacaaggaggtggacggccttttttttgttgctgtgtctgatgtagtagtatttctcatctttttatggatcggatgggatggtgcctgcctttcattctatgatgaatcgtactgtctgtctatctatctatctacccaatgccgtcgtggaacatgtttccaatctagtactactactactaggctagatgcagaggcataagaaaatgtgctactacacctctactgctggtgtgtggcttttgtctcttttcttgtccatctctgtatacaatgctgaactgctgctaaatatattgttgtaaccttgaatgcctctggttggatgtcggtgaaatgtga

SEQ ID NO: 26499 - DNA, 3042 bp, Zea Mays
caacggtcatctccctacaggctacagccaaacctcaaaccccagcggtcggtccaattcaaaaatcgaatcctgcgctccttccccaagctattcccaaactgccccacgtctcatcctcgcgagtcgcgacctcgcaagcctctccgacccccagctcaacgagatcgggcgagcgatcccctcttccccgaccaccagatcgcagcaatggagccggatccggtcgccgctggggcatcctcctcgccgccgccttcaccagcgccggccacgtccccgccgtggcaaacgcgagatgacgatgagccgggagcggtggattgcgcggatcccggaggagacctgaatcccgcgccgccgccgtcgcttcagcaggttgagaacgccgcggtgggcagcgaggtggagcaggaggaaccaaagaaggaggcgatggcaggagtaggggagactctccgcagcttcatggaggagtttggggatcaaggagaggactccattatcttgtcaccgcggctgaaggatattagtactcctgaccgccccgctgccctcggtttcctaggggagaagtataacaacctcatggagaggtacaagaagtacaagaagcaggtggtcaagtgttccgaggagtgtgaaccaagatataatggcctgaagaagaagtacacagacgagtgtgcagagaggcggcgtctgtacaatgagcttattgagctaagaggtaacattagggtgttctgcagatgcagacctctgagctccgatgaggtcaaccgtgggtgtttatctgttgttgagattgacccatcacaggagagtgagctgcagtttgtgcccagtgaaaaagaaaggaagccctttaagttcgatcatgtttttgggccagaggatgaccaagaggccgtcttttcagaaacagtgcatgttgttaggtcagtgatggatggttttaacgtatgcatctttgcatatgggcaaacaggaactgggaaaactttcacaatggaaggggttccagaaaataggggtgtaaattatcgggctttggaagaattgttcagaacgtcagagaaaagaagtgcatctgttgcatacacattttccgtaagcatcttggaagtttacaatgaaaagatcagagatcttcttgatgagagcaatgatcaatcaaaaaggttggatattaagcaaaatgctgatggaacacaagaagttcatggtttggttgaggctccagtttataacatagatgatgtgtgggagaaactgaagtttggtgctcaaaatagatctgttggctcaaccaattctaatgaactcagcagccgctcccacagtttggttagggtcactgttaggagcgagcatttggtgacttatcagaggagcagaagccacatgtggctggttgaccttgctggaagtgagagaatagctaaaactggggtagaaggagatcggctgaaagagtcacagttcatcaacaaatcactatctgccttgggtgatgttatatctgcccttgcctcaaaaaattcccatattccataccggaattccaagttgactcatttgctccaaagctctttaggcggcgattgcaagactctaatgttcgtgcagataagtccaagctctatggattcaggagaaactctcagttcactcaattttgccagtagagtccggactgtagaacatggccctgctcgtaagcaagtggatccagctgaaagtttgaagttcaagcagatgactgaaaaacttcggcacgaggaaaaggaaaatgcacagctgaaccaaagcttgcagctgatgcagctcaagtacgcttctcgtgagaatgtcttcaggacactaaacgaaaaggtgaaggatgctgaacaagcatgcagaaattatcagcaacggattagagagctggaaagtgaattaggcaatgagaaaagggtttctagggattctgctagatcctcaaggccgccacttgttcctacgagacagaagcagcctcacggaaggaacgcgccaccttcaggcccttctagatggaggctcaaagcccccacaatccacaacaaagagaacattccggtgatgatgaacaaatcaaatcctggggatgaccctaataaggctgttggcagagcaaggcgcgtttcacttactccggtgattcgacaaatccccatccagcccaagaggcggtcttcgatagcaatactaccatctgtgagagagcatctttctgtgctaaacgaaaagagagcagcgtctcgactgtcgcaagtcaacatgccaagaagatcagtcgcgacctttggtttgaatttgggtccaggaacaccccttgcaggacatggtggacctgttgacgccaccccagacggagcaaagttcaggagatttgatctaggaagcagcagcagcaagttcacgagccctcctccgaatgtcaccccgcagcggaagatgggaatggcaccggcgggaggtcctccaaacgcagccaagctgtgcttcagcatccagaaaagagttacgcctgcacatgttcgggcaaaacctggtatgggcatctttgacccagctcttcgtgagaatatggttgtggggagaaccggcaacgcgctgcgggtgctcaacggcaagaggagacagtccgttgtctaactctggtactgcaaacgtttggacgttcgaacggagctgcagtgtggtgagaatgatggtgcctttcagcttgttcttagtgaaaccgtgttaggacagaagatattcttctcagcatccgtaaatggattttgattggctcttactagttgataagaaagctatgttaacattgcccatggaagtcgttgattatatttgttcgtcacaaagaaagctatgttatggaagtcgtcgattgtatttttcgttactaagaaccgcttgctagtgcacttctaaaccatgttcacggaacacacccagattctgccgccgacataataataatgtttgttagtgatcgatcacaggttatgg

SEQ ID NO: 26500 - DNA, 1650 bp, Zea Mays
cataagtcgtctttctccttgaccagccattagcgtcgatcgatgatttagcacggagaggctcaaggctgtccacacagtatctacagtagcctcaactgcgacagtggtagtaatcgtcgccctcatcagaaggtgccgcgtcgtgaggaagaagatgaagaagaaaatcgtgaagaaagtcctggaggagattgagaaaaagaaccgcgagatgcaggccagcaacgccgtggaagatgtggcgatcgaggtcgggccagtggagacgtttctcaaccagatcctcaacgagaagccgatgcgtttcagctccgagcagctggcggcctgcacccggaactactcgtcggagctagggtccggcggctacggcgtggtctacaagggcgagctgccgaacggcctgctggtggccgcgaaagtcctcaaggtgtcgtccatgaacaggaaggtccaggaggcgttcatggcggagatcggcaccatcggccggacgtaccacgtgcacctcgtccgcctctacggcttctgcttcgacgcgagcaccaaagcgctagtgtacgagttcctggagaacggctcgctggagaagtacctttacggcggtgacgagggcagcacgacgagcacgaggctggagtgggggacgctgcacggcatcgccgtcggcacggccaaggggatcaggtacctgcacgaggagtgccagcagcggatcgtgcactacgacatcaagccggccaacatcctcctcacggccgactacaccccgaaggtggcggacttcgggctggcgcggctgggagagcgcgagaacacgcacatgtcgctgaccggcggcggccgcgggacgcctgggtacgcggcgccggagctgtggatggcgatgccggcgtcggagaagtgcgacgtgtacagcttcgggatggtgctgttcgagatcctgggacggcgccggaactacgacccctgccttgagggcgagagcaaggagtggttcccgagatgggtgtgggagaagtacgagcagggtgagatcgagcacgtcgtgtcctgctcctgcgacgggatcgtcggaggggcggacagggagaaggcggagatcatgtgcaaggtggcgctgtggtgcgtgcagttccagccgtcggcgcggccgacgatgagcagcgtggtgcggatgctggagggggagatgcccattgtcccgcccgtgaacccgttccattatctcatggaaagcggcggcggctcaactagctcgggattgtggagcggcacataccagagcagcagcagagacaccgccggcgcagagttgtcgcctgtcggatagctctgctgccaggtcaatcggcgtcgacgcgccgtgatcgaagatgttgagcggactcgtggggggtcgtgttgatgaaacagagtttgtagtcctgtagtacacattagttaatgctttaaaaaacaatgaaggccgtggtttgtaaattagcatcgtgttttggaggactatataaaagataaaagattcgcgcacgacaaaaaaaaatcgtgcatgcgttgagtgaaatgtacttgtaccggcaggtaccaaaagatagaccattattttaggggaaagttaggtagtatttggttatattgctctgtttt

SEQ ID NO: 26501 - DNA, 1169 bp, Zea Mays
gggtgcagaggacggcctgccaagtttgttgtaacctgacgcatctacccgctctccgcggcttctgttgcaagctccggcaagtggcaatcatacattctggtatagggtcctcgccgccgagctgaggaagagaaaagacctatgtggcgtgcgacgtgacgcggacgcgccactcgccgccgtagccgttggcgttgcggtggtggcgtgcaagcaaacaagcgtcgagcagtggccgatgatggattggaatgggcaggcagatgcaggaggacccctaatgatggcctcggcacttggcttgcggtccttggtcttggggtccaagaatcccctataaaatcgtctccccctccgctatgcgtatttctcgaccatttcccgttcccgttgatcgaaaggagagaagggtgaaaaatctcggcacaagtgtcagtcgttcactacctggcagtccgtagtcggtccacttcacctatcactatcagcttgcgaggagaggaacaagggcgtcttctccaatcctcggctgtattgccaatggctttccgcgcaatacttgcctgactcgacgatgcgttgttgccatttcttgatgtttcgtccgcttcgcctcttcgcgcttgtcatggggtattaaaggtctggaggggttgaaggcttccgctaatgcggtgggtatccaccgactgagcagtgggtgggggatatcgagcggttcttgttcctgcaagaaagggggccatggcgcgagcgccaagcatgccggcggcgacggcggtagggatcgtggtcgtgatgctgctggccgccggcttccgcggcgcggaagcaggccggcctgacggcgccgggaactccctacggcgggtgggagggccctggcatccagctccggggacacttcgttgggcattacctgagtgctactgcaaagatgtgggctagcacacacaatgacactcttaatgcaaaaatgtcatctgtcgtcgatgccctctacgattgccagaagaagatgggcacagggtacctgtcggccttcccatcggacttcttcgattgccttgaggccatcaagtctgtctgggctccttactacacaatccacaaggtgaactggtgaaggggtgcttccgtttctttttttagatgataaaaacaaa

SEQ ID NO: 26502 - DNA, 620 bp, Zea Mays
cggggtagcatacactagccaaatgctctgtaacagctactttcttgtaggaaatattgaaattgctccctccagtcaagggcaaataatattgaccctggtaccaggcaaataatatatgtcaacagtgtgcttcaatcccaaagaaatggtcagcgaagagcacctcaagtcaacggtcggggtggacgcagtagtcaaaccagcggtggccgcggacaggggagaggccgagggcaggaccggaaccgcacgcccatttctgcttcagatcttgacgccgaactcgacaagtaccatgcagcggcagcgaaggaggaatgaggctctggcgttctcttctactaatctatttacacaggatcttatttgctgctttgtgggcacgaatattgagaacaactggaaaccgactttgttattgtgtccgccctggtcctgggtctgttctgttgtattttaagtagttttgggttgcctaccgaagacatcaggcaaacatattccggagcccaagagtctctgtgttctgtcttgatgttttacaattgtgcctttagtctttctgcggtcctctacttgctttatttttaaattgcaagtcttctacttgctttatt

SEQ ID NO: 26503 - DNA, 3637 bp, Zea Mays
agaacaaagggtaacatccgattccttccttcccctgatcccctcccctcctcgccgaaagggagggagaaggatggacagctcagggctgcgggctccggcgccgattcacatggccgggggatgctgtgaggactgaggaccttggatgggcgttcgtcccgccggccgagcgcccgcgcgagagagaaggggacagaaacgagtcagaaaggccggccggtgaagctccgtccgtgattgctcaggtccaactgctgctgatctccctcatgaactgagcaatcaacagaagaaacaaaagggccgtttccgctacagagagaacgaataaatcaccggaaatgggaaggcgaggccacggggggtcagcgtcacaagacgacgacggtgtgggctgtgcatggggcctcatgcgcatgctctacttccgccgagaccccaagctcttgctggatgcaaagcagttgagtgggaggcatgcgttccgtgaggtcagtgagagggggcattcagcaaagaggtccaaggattttgacgagatagaagaagatggtaaaccaacagtcaaaaaccttatggaggatgaattgggaaaagtaaagctgctgaagaaaaatccaaatgatgagattcagagaagattagtggacctgggaaatgatgtctctcttggtaggagttcagagcatacaaataaatcaatagatagatcatatcaccaggcaggaatctctacaccttcaattccaccaatggattctggggttttgaattatgctgaagaatatgatcttgaatctgtcctgatgaatttcctaggtgaaatttatagttgtcacgatgaatgcccacacagtgattgcaagaataagaatgaattgtgtccttcactgaagtccctaatccataaaaaggtcaatgaattgaataatcttcctcgcaatattggctgcgcgcaatctcaagagggtaatgatgctaagctatctgaccagaataatctttctaacaccatggcagcccgatccaaacaattcaaggatgcattggaaatactgggttcaaacaatgaacttttcatgaagctgcttcagaagccaaaccaacatatagttgacagtatccaaaagcatgaaaacagtaaggtggctgccggattagagcccaataaaattcatggacagaccaattttctggtaggaagaggaggctcaagacagcatcctttggctacaaaggagcaggctaaagagagaaaatatatgttcttctggaggaagggtaaatcaaatagaaggcagatgcttgaggcaactgacacagatcagactgttaccaaaattgttattctgaagccaaatccagaaagagggtttaatcagaaagcagctactgcaagaactttacatcaacagccatgtacatcgcatgctcctgaatgtggtggaattgataactcaaagttttcaattaaggaagttaagacaagattcagatttgtgaatagtgagagtagaagagaaagcaatttagcacctgcagaggaccttcaaggatacccacggaagttcaaagattcttttgttgcaattaataaagattttagacatttcccagaagggagcttggcaaacaagtctggatcagacatcaagaatgcaatcaaacctttcatcagcagtaagcaaaatgggagcataagcggaaacagtggtcatatagtagcaccaaaaggtgcatctatcttctatgaagaggccaggaggcatttatcagagatgctaaaggataatgactgttctgtaaactatccagcagttcaaatctcaaaatccttggaaggcatactttctctgcctcatggcaatgtgtcaacccctaggagtagcctgtggggaaaggattaccttggcccctcacctggagaaacagatgtttttgttgcatgtgaggttcagagagaagaatgcacacaagagagaagccaatcacaagaggattttggaagcattgctcgatgtactagtgcagcagttgatgatcaggtgacagttcgagatggatattacacgaatgaagcacaagaaggatcaaggcatgctcagaatgagccaggccttctgtatactgaaggaattcacaaattcatttgcggcaaaaacatttgcgacgaacagtccgttccagcagaacaaagtagacacgatgtatgtcaggaaatactagaagaaataaaacaaggaaaagaacatatcaaaatgtccccaacctctgctgaggggatagttgaaacgttggggcagcaagagccagaaacaccagaaccaagagcatcaaccgaactaatctcagatggttctcccgagcaaagcgatgaaaagcaagagaggcccagtccagtatctgttcttgagtcattctttgaagatattgacaatccagactgcataaacaagaaagaatgtgagctgcatggtctccaaaggaccctgtattttccagataatgaaccagatgttagcctccttggggaggacaggagtgtcagagtggattacataaagttggtgctagaactctcggagttgtgtgcagaacaaaatttagaggtatggtacctagaggacgaattaatcagcccctgcttgtttgaagaactacagagtcagggcgatcaaacggatgatctaaagctcctatttgactgtatctgtgaggctctaacagagatccaagagagatattttagactctcttggctaactttcctaaagcaagacataaggacacctccgattggagaaaacctcatcacagaagttgatagatatgtttacgggtatatccaacatagtcttccaatcactctagagcagataatcaagagggacctggaagttcagacgtggatgaacattagatcgaaaactgaagggattattatggagatgtgggagtttgtattggatgagttgatagatgagactgtctttgatttgtggatttgaagttctgattagatctcgtccatggtgccttgtggcgagtatagtgagtaggatacgtgagttttcgtgctgacaataaccagttgtatgcggcagaataacatgatgggctactactagtcaagtgtgtaactacagtggaaatggttctcgtggatgaaaacaaaagtttaggttcagcaaatctccagaattgtgcagtttgtgtggatgaagttggttggggacggtctgtcaccagaactctcagccatgcctctcaacagcgaattgtacagcagatttgagagtttgtctgtgcatgtgtgatgcgtacacttttcagcgtgatcagatcacgcttatcgtataggtttgttttgtgtgtaaatgtgcaaaaaagtaatcatacatgttaatcaaatggcatgttttgagtatgcttgagcattatttgaaggaccaaattcgttaatcagaggaagggaaatggtataggtttgtttttgtgtctaaatgtgcaaaaaaaaagtaatcatacatgttaatcaaatgacagatttcagtatgcttgagcattatttgaaggaccaaattaggtaaccagagaaaggtaaatgagaggtaataaaaaattttggtctagg

SEQ ID NO: 26504 - DNA, 566 bp, Zea Mays
catgtactccatttataacttatattaagtctgaggtttgatctcttagttatggatacataaaaaacaaaattgtcctttcaaagcatctctaagaagattgacctaggaagattcacagagctgtgcatttaaaatgtatagaactggctgagaagaaactaaattttagggaataactgaaattctaccttcacactgtgaaccctcaaaatagtttccttgattggttatagaagtgaaggatacacaacatcatcaactaattctagaacactgcaagtgaaacagacagaatcatcaccataagtaacatcatgcaatctacaaaggtgaatcatcatgtgcactaaattgtatagatgaatatttcagccatagggctacagacagctacacatcgataataatatttgtggaagtatagaaatcaaatcacttaatacaagcaaacagtagtttgcagtgggatatcagacactaagcaaacaattatcgaatatggcagagccactaactcaactgacaatgcatgtagaaaacaaaaacaataagtatcatcaatg

SEQ ID NO: 26505 - DNA, 1170 bp, Zea Mays
ccgcacaggcaggcaccagcgcgaacgcatggacgggcggcccctgagacgtgccgcccagctggcccgctgcgcccacacgtggcgcggagctgcgcgcggctcggccacgttataagccacgcgcgctggccgtcgccgcacctcctgactactgcacactcgtctccgcagtttgaaacgaagcccgcggctactgcaagctactccgtctccgtagctaaaggagagggaagatgtaccacgacatgagcacggcgggcggcctggtggctgtggcgctggcgcacgcgctggccctggccgtggccgtggcagtggccgtcaacatctcgggcgggcacgtgaacccggcggtcaccttcggcgcgctcgtcggcggccgcgtctccctcgtccgcgcggtcttgtactgggtcgcgcagctgctgggcgccgtcgccgccacgctgctcctgcggctcgccacggggggcatgcggccgccggggttcgcgctcgcgtccggggtcggggactggcacgccgtgctgctggaggccgtcatgacgttcggcctcatgtacgcctactacgccacggtgatcgacccgaagcgggggcacgtgggcaccatcgcgccgctggccgtgggcttcctgctcggcgccaacgtgctggcgggagggcccttcgacggcgcagggatgaacccggcgcgggtcttcggcccggcgctcgtcgggtggcggtggaggcaccactgggtgtactggctgggccctttcctcggcgccgggcttgcagggctggtgtacgagtacctggttatcccgtccgccgacgccgccgtgccccacgcgcaccagccgctcgcgccagaggactactagcttgaaaattgtattgtggggtcgtgtaagtggttaataaggggggcataggtacgtacttgtctgtcgccccagcgtgtgttggagacggtgaatcaggtgatgtgtacatgctgcttcactgtagtgtatgtgtatgtgtatgtagtaaataattccaggtatataaggcacgacttgtgtagtatcatatctggttctgacttctgattatctaaagggaaggattcgaatgtctggatttggatgtctgaagattcgaattaacatcagaatgtttcctaatgaagtgctaata

SEQ ID NO: 26506 - DNA, 1645 bp, Zea Mays
tacattcaaagagctgtctgcaaagtgctttcaagaacttcttctaaaagatcaaaaccaccccgctgctctggtgaactatgcagttcttcttctgtgtagatatggatctttgtctgcaggggcagggggcaatgtcagcacaggtccttacgtgcatcagaaagaagccttagttgttgcaaaagagtgcttgcttgcagcagtgaaggctgatcctagagctgcatcagtttgggttaatcttgcaaatgcatattacatggatggtgagcataagaactcaaagaggtgcttggagcaggcagcaaaattggaacccaatcatatgcctgctcggtatgctattgcagttcaccgtatcagagatgctgtaaggtcacaatgttctgatgatcaacttctttgggctgcaaatgaaatggcaacagttctaaaagaaggagacccttccgcagttgacgccccaattgcatgggctggattggcaatggctcacagggcacaacatgaaattgcagccatctatgatactgaaaacatcaatcttaatgatgcagaagagcgagctcaatatacactaaaacaggcaatccaagaggacccagatgatgctgttcaatggcatcaacttggcctgtacaatatttgcatgacccggttcagcaggtctgtaaattttcttaaagcagccttagcccgttccccagattgcagttatgcttggtcaaatcttggtattgcgttgcaactatcagacgatccatcctctgaaactgtatataagcgggcactggtactatcatcaactcagcagctgcacgcaatcttctctaatcttggaattctttatcggcaacataggaactatgaatttgcaaggaagatgttattaaggtcgttggaactgtgtcctggatttgcaccagctagcaacaacctgggtcttgtatttgtcgctgagggccgttgggaggatgctaaaagctggtttgagaaagctctgcaatctgatcccctgcttgatgcggccaaatcgaacttgttaaaagtcctcacattgtctacgaaacagtagaacaagagaagacctaactcctaaggaaattgccactgaagcctcagagttcagacacggaagcgcggtcaccaaatctctgttctgaagtgtctcaactgccagctcaaaattgatgcttggtgcctctagtctactgctcattgctcacagagtcacaggtgtaggaagtttcagaagtgcggcttcgaagactgcatttgattttgactgagttgctgcctatatgacaatcaaagctgcacaggctccgaagtggctgtgatgtgttcttaaagagtcgcatcagcgcaggaagagcccagattttgaagttcatgtgtagctaaatttcgatataagcttgaacggcttcccttagctgatgtatataaataaatatactccaacttgaggtgtactccaagttgagcatgtgcaagttataggttcagtgttccagagcaacttatggttctgtgcggtgaaactaacagcatctaaacctcaaatttggcagcaatttcactttggagtcaaaagggcgtcctacgagtgtataaaaatggagacgttaactgattaaca

SEQ ID NO: 26507 - DNA, 901 bp, Zea Mays
atgatgaaaagctccgtgacgcatgggtcgtcgcaacctgtcatcttcccagatgatacgagcacctctgagcttcgatcttttttttttttgctttctttttttctccggccttgcagacaattttggtccgttgatttattttaagtagtccaaaatgccaatccaccgcagtcgcaggctcgcagctgcccttgcccgccatgatgcctccaccgccgctgcgccttcacctcctcttccgctccgaaaccctaatccctctactccggcaacgacccagctgcgacgcgccccattgccggaccaggaggtacatctccgttcgcgcctccgctgcacagctcgccgccgcggacgtctcgacggcgcagcagcctgcacttgaacttgggttggaggcagcggcggcgggcttcgtcaccggtaagaggaaggccaccgaggtagcccacgcgtaggttctggagaaatattgttcagaaaggggatacggtggtggatgccacatgcgggaatggcaatgacacgctcgctctgctgaagatggtggctgatgaaacaggccgtggacgtgtttatgggatggacattcaagattctgcgatagagaatacttcctcttttctgaaaatggccgtggatgatgaacatcagcggggactggtaaaactgtttcctatatgtcatagtagaatggaagagattgttcccaaagatgctcctgtcaggcttgttgctttcaacttgggctaccttccaggaggagataaaactgtaatcacagtgcctaggacaactgagttagcattgcgagctgccagcagaattctcagttctgggggactcataagtgttcttgtatacattggacatccaggtggaaggtaaacaccagttg

SEQ ID NO: 26508 - DNA, 151 bp, Zea Mays
cagcgccgtctgtttgccggtcatcttctgctcctccccatgtcgcatgtcggtgatgttctccaccaccgctcaaatttccgtgctcgactcgtggatgcctcggctccgcggtattcgttgggtctcatcctcgacgtcggtcgctcct

SEQ ID NO: 26509 - DNA, 4139 bp, Zea Mays
cgtgcacagggtggacgttctgcccccgacatcctccccttagctccgctccctgaagccgtgatcgaagccgccatcaacgccctccaccccctccgcgcgcggcagcggcagccggcatttccagcccctaaaatcctatttccctctcccacaccaggcgccgcgcccgtctgattccgcccgccagccacgcccgcagatctcgcttcggcgccctgattccgtcgtatgcaaggtcacagccctgccttccatcgtcgcccccatgccacgctccccttccatcctcgctcacttccagccgcccccattcccagttgaaggagtcgtccaggaaccaggaaccccatcaccggatcaggagcagctgtgtcgcgagcatggtcgttgctgagctcccgatgaccgcccgatggtgtcggaccccgcaccgccgtcggcaccgcgctactcggcgtactcgctgccgtcgacccacctccccggagaggacatcctcttctgcatcgacgtcgacctcgaggtccacgccaagatgaagtccgctgccgtagcgtcctcggatccacgtccaccgcgtcgccgcagtccgtaggagctgatggtgccccgacggtggggagcatcgagccatggctcaagtgcaaggatcagcccccgcagcagggcaaggagatcccgcagaccaaggccgaccgggccaagctcgatggcatgtacaagtgcatcctctgcgcctgctgctccacctcctgcccgtcctactggtggaacccagaggagtacctcggcccagccacgctgttccacgccaacaggtgaacagggcttcagcagggacgctggtttagcaatggaggcgatccattccttgtctgcttcaaaatcaagttatccaatggttgatctcacccaactcttcaaacaacaaaatatctccttatgtgtgactgaatttttcatgcactctggttttggatccatccattatgttcctcataatgaagtatttcatgcttattcagtagcaaaagacgatattttttcttgaaaatcctcttaattaacacgtgcattttcttgtatgaatcgttacctattccttttaatcatgtatcttggtaattaattgcatttgcatcattaaacctggcttgactcttgtgttgcttgatagttcatttgttttgtctataaactatgtgggcgtcagctctgtataggtccatgtacaattttccaattcttcctatcaagtttacaaaaacaggtggggcctgtccagctgtacctgactatgatttggggtgggtggggtctgaatctttttctttgttcttataatctcatggtgtagaatttctgctggttgggcctgatgacatttggaatctgattacttctttacaccattgtgacattagttgactgtcatttgttgctttttatttgagttgcctggattgaattagtctcaggacagacataggataggacctaagatcgcattagcaaaagctaaaatggtctaggattagaagtgttataccaaatcttccatgaactccagatagcccagagtcttttataatgccacacacaaagctttcatgtgttggaaaaaaatcataggtcaaccgaactaagttatcacaacatttactcaaaccatatcagaaggcacatatgcttacataaatttcattttagttgataccaccggtcctgggtttcatgcttacaactagaaaagggttctattttttcagattatgaacataccatggaaacatgaagcagggttttacttttatatatgctagcaattgttatctgttgtgttgctttacatttctgttacttactcttttgcaggtaaaatatacagactgtggagttagtcctcaggatctacatcatgtattcacaaagtttgctcatcctcaaagtggaggaaaccgagggtttaatggtagtggtcttggccttgccatatgcaagagccatcccggtttctaggattccatgtcgtcccatgagaatataacgaaggaaacaagaagcacattatagaagtagcaagatcacagtacatatcagcatgacattcatgaagccatcccggtttctaggattcttgttttgctctgtccatggcacgccaccaacattcatccctaaaactgacatttttttgcaacataaatcaggtaaacgagagccctggaaataacaggaattaattcaggaaagtacacgagcaagcacccgaggtcaatgagcttacctccattgacaatggagataggaaggaatatcatgaagagaaatgaaaggtagtacaagctcttgtttatctgctctgatttttgtttatctgctctgattgccaactgtccaggctagcctgaagtgtggtaactctatttgtaatgaaccctaggttttctttgagccttctgaggtgacctatcagaccttcaacgactgttatgtctccggttgcgatccagttcttgcatgcacatttttttcacaccggggaatacttgttcaccgtgagaaactacctacacgaacaaaattgtagcgtcgagtctgtgacttatgttccatagactaactggaatcaagttggttcaagtgaacagcagcatagctcggttttgttatctatgtttgttgcaaaattcaggatcttatcagcagcagtgctgttagctaaatttttttattggtatttcatttttttgaagaaatggtagttggtgtttttagccattttactggtagttgtttgctcaccttgcgcttgtttcttgtacccatcagatagtttttttggtctccagttgctctacacagcaagtctatgaggaaggagcaaaagaagttgctctttcagttgtcagcggaattaatttaactgtatgcacaaagctgttattgtatctgtgtctccagtcaagagcatcactagctgcattcttcggtctttcccagttacatgggcttgccatatttgttcccctgtcagaatcatcaccctttattaaatcacacataatataaatggaaatattcgtccttttttcatggcaggaccatataattccaagaccctgatgatggccacaactgcttatattgatgattcctactcggagattattgatcctctaaagactgaggagagattaaaatcaaagggattgagctacaggagagttgcagtctgtcgttcttttccatgggtgtgattgagactgaaacgatgggtaccagagtgaaggagtcgaagacagttttagtagagaaagagctcgaactgatcgacgagcctcagattcaagagagccctccagttcgtgcattgttgcatgatgaggtggattttgctgaatcgtcacttgctattagagaatctgacattcccgtgaagaaggtgctgataatcgtgacaatcacttttgtttggccacaacagccatattacttgaagcccatgttttgaaagctgtattggcacttcttctatggttagtggtggaatagcccgaacagtcctatgaaacagcaaaaaatctgttacagtccacttaggtggaagaggagtcactacttatagaaaaagcttgttcctagaggtggtttctcccggcaatgcagaatcttgaagcacgtctaaagtggcttgatgatagttctaaatttcaactccctgtcattaccaggtgccagataggctgctggtcgattccatcctgaacaagttgcgccaaagattacatgaatattgcgtgccgagatctgtcttcagtaatgcgatgccatcctgaacaagttgcagcgacaattaggataggattttcccacgctttttagtcttgtgtattccttttatgctcttcatctttttttctcattatatccaccaattagatagtcatgtagactttcttttaggcgcttttgttttttatactttgtgttaccttgcttttgttttcatactttgtgttaccttacagatgtaaaaacgctcccctcccgtacattgcactatttatgaggaaaggtaaaatagcgtcatttagctttttcagtcgaggaaatgcactaatattttgtcgaat

SEQ ID NO: 26510 - DNA, 4616 bp, Zea Mays
ggagaacagaacagaacagcagcggaagaggccccgcaccacgtcgcgtgattttctttaatccgctagcaacacagcgccccgcccctcgtgaaggcctccagtccacaccagccttcgtcccgtcctgccccccaccccatcctcgcctccggatctcgctccgccggccgcggccggacgaggcgcctgcgacccggtccgaccctccctccctccctccccctctcccgccgaccgcgcgtctgtcgggactcgggccggcttacttataccgctcgcattgccgggtgcctgctccatttgtccaccccactcgccgcgcgcgcggactccgtgccccgggcgggccactcgcagcttcgagctagctcggagcttctgagcacgaccacgaggaggagaggtacaggctactacagttctgggagatggcggccggcggggtggggcccgcgcagcaccaggcggcgaacggcgcctctggcagcgtcagcaacggtggcgccgccacgccgctgcacggctcggccgccgacggctacgacagcgacggctacagcttcgcgccccccacgccgtcaactttgtccatgtccatacctcctgagcttgctggagctattccgttaattgatcgatttcaggtcgagggctttctcaaagcaatgcaaaagcagattcattcagctggaaaacgtgggtttttttctaaaaagtctgttggaccacaagctcgtgagaagttcactttggaagatatgttgtgctttcaaaaggatcctattccaacttcattactgaagataagcagtgaccttgtaagccgctcaattaaattgttccatgtcatattgaagtacatgggcgtcgattcaccagcaataataactttggatgagagaatagaacttgttgcgaagctctacaagcatacgttgaagcgttctgaacttcgagatgaactctttgcccagatttcaaaacaaacacgtaacaatcctgataggggttggtcaataagagcttgggagcttatgtacctgtgtgcatcatccatgccaccaagcaaagatattggggcatacttgtctgagtatgttcactttgttgcccacggagccacaactgattctgatgttcgagttctagcactgaacacactgaatgcattaaaacgatcagtcaaggcaggtcctagggttacaattcctgcacgggaggaaatagaagctcttttgacaagccgaaagcttacaacaattgtttttttcttggacgaaacttttgaagaaatcacctatgacatggcaacaactgttgctgatgctgttgaggaacttgctagcattatcaaactttcagtgtattctagtttcagcctatttgaatgtcggaaggttgttaacggatcaaagtcttcagaggttggcaatgaggaatacattggattagatgataacaaatatattggtgacttgctatctgaattcagatcagctaaggatcgcaacaaaggagaaattcttcattgcaaacttgtattcaagaaacgtctcttccgcgagtcggatgaggctgtgactgatccaatgtttgttcagctatcatatgtccagttgcaacatgattacattttgggaaactatcctgttggcagggatgatgcttcacaactctctgctctgcaaatcttggttgagattggattcatcgacaatcctgagtcctgcgtcgaatggatatcacttttagagagatttcttcctagacaagtggcgattaccagagcaaagcgagattgggagcttgacatcatttcacgctttcagttaatggaacatttatcaaaagacgatgcacggcaacaatttctcagaatcttaaggactcttccatatgggaactctgttttctttagtgtccgtaagattgatgatccaataggattgctacctggaaaaattattctgggaatcaacaaacgaggggttcactttttccgtccagttcccaaggaatatcttcattctgcagaattaagagacatcatgcaatttggtagcagcaatactgctgttttctttaaaatgcgagttgctggtgtccttcatatctttcaatttgaaacaaagcagggcgaggaaatatgtgtagcacttcaaacacatataaatgacgtcatgctccgcagatattcaaaagcacgctctgctaatagtgtgacatcgcaaaatgatgttaaccatgcatataagccaccaaatattgaaatgtatgagaagcatgtccaagaactgacaaaaacagttgaggaatctcagaagcaagcagatcagttgcgagaagatctacagttgaagacaaaacaagaaacagagatgcaagaagagttggaagggctaaaagacaccttgcaatccgaacgacaaagttccaaagaagtaaaaaatgagcttgataagctaaaatctctatgtgatgagaaagaatctgctttgcaggctgccctgatggaaaaaagtagacttgaaaccagattgacaagtagccagggccgtgagagagatactttgacaactgtaggcagcgtcaatagtgacattgagatgcttaccaagcttaaggaggatttgaaatcataccaaaaagagctcgatgcatcaaaacaggtctcgaagaagctcatgtcagaaaagaatcttcttgaccagaaggttcaaaggcttgaaagaatgaaaaatgaagagaaaagcacaatggaaaaggtttatgcggatgaatgccgtaaactgaaatctcagattgctgaattggagcagaaattggaagatgcaacacaatccttaaatgtggctgaatcaaatcttgctgtaagaaatgctgaagttgatagcttgcaaaatagtctgaaagaccttgatgaactaagagagttcaaagcggatgttgaccgaaagaatcaacaaactgctgagattcttaaaaggcaaggggcacaattggtggaacttgagaatctttataagcaagaacaagttctgcgaaaacgttactataatacaattgaagatatgaaaggaaaaataagagttttttgtcgcttgcgccctctaagcgacaaggaactttcttttgaggagaaaaatatagtttgcagtcctgatgaatttacaattgcacatccatggaaagatgagaagtcgaagcaacatatatatgatcgtgtttttgatgcaaacacaagtcaagaagaaatatttgaggatactaagtacctggtacaatcagctgttgatggatataacgtttgcatatttgcatatggtcaaactggttctggaaagactttcactatttatggttcagataacaatcctggtcttactccaagggccacatctgaactttttagggtgataaagcgcgatgggaacaaatattcattttcattgaagacatatatggtggagctttatcaagataatcttgtggacctattgttgcccagaaatgtgaagccgctaaagttagagataaaaaaagattccaagggtgttgttactgttgaaaatgcgacagttgtgagcatttcgagtattgaggaactgagggctataatttcaagaggctctgagaggaggcacactgccggaactaatatgaatgatgagagttcaaggtctcatttaattctttcagtcattattgaaagtacaaatcttcaaacccaatcatatgcaagaggcaagctaagttttgtggaccttgctggttctgagagggtgaaaaaatctggttccgcaggaaagcaactgaaagaagcacaaagtataaacaaatctctttctgctttggctgatgttattggtgctttatcttctgatggacaacatataccttaccggaaccataagttaacaatgcttatgagtgattctctgggagggaatgcgaagaccttgatgtttgtgaatgtttcaccagcagagtctaacttggaggagacttacaactcgctgatgtatgcttcacgcgttcgatgcattgttaatgatacgagcaagcatgcaagcggagtgatgaggacgagctagaggaggtaaaggaagagaggatctcaaaagagagagcagacaatcgcctgactggctgacaacttgacacaaccactgaatgctcctggttccgttcttccattacctggagaagaggtgattgatgctgatgagcatttgcaactgccacgagttctgcgatcgctctctaacagaatgttccgatatcatctgacctgtacatacagtagctacgtattatatactatggcagcgatgcccgtttgtacaaagaggaatgtagcacacattgatagaaagggaaaaggttgtgtgactgggaggcttgatgcgccctaagcctataacagctggatcatgtctttttccccccttggagcaggtatttaaagcataatgtgagcgtccttacccaattctttcttatcttgtgtaaaaatcgggtagccttggatgtcaattaaacacgtaaacttcaccttggactagactacttcgattttggaccaagagagtgagatgtctatgtggtgtcat

SEQ ID NO: 26511 - DNA, 1448 bp, Zea Mays
cttacagttacacagcagtgaagattgagttgtagtccttcttcctagtacatgtagaaactttgatcctgtaatttgctactgataaaggttgatgaggatggagagctattactgaggcatacattgagtggccatcaaaagtcagtgatgatggttgcatggagccctgatgattgtcagctcctcacatgtgggcaggaagaaaccatccgacgctgggatgttaaatctggcaaatgtcttcatgtttacgagaagtctgccactggtttgatatcatgtgcttggttcccagatggaaagcaattatctggtttagctgatcaaaacttttgcatttgggatttagatggtaaggaagtagattgctggaaagggcagggatcaacaggaacatctgattttgctgtagcaaaagatggaaaccttataataagcatgagcaagcagaacacaattcttctatttgatagggagacaaaacaggagagaataattgaagagggtagtacaattacttcattttgtctatcagaagacggtgatttcctgcttgtaaatcttgtaagcgaagagattcatttgtggaacataagaaatgatcctgttcgtgtcaaccggtacaatggtcataagcgcacccggtttgtgataaggtcttgttttggcggatttgagcaggcgttcattgctagtgggagtgaagattcacaggtctacatatggcatagagccactggcgatctcattgagactcttgctggtcactcgggcacagtcaactgcgtcagttggaatcctgcgaatccccacatgctcgcctcagcgagcgacgatcacacagttcgtatatggggggcaaagaagtccagtcttaagcgcaaggatgttgggagcagcaattgcaacagtaacggttctcgctcgaatggcaatgcacataacaacgttttcgttcaaaagtgcaacgggaacaacaccaaatgatttgccagggcaatgtatccccatggatggttgactggcgtctgtaaatccccctgtcctttacttccctcgtggaagaagaatcgccaccgccatagttaagacaacaacaacaaagctgcagcacaaagtgtggggaacctgctaggtttcgtgcgctatctttcccttgttccttcatgactgtcatcacatgtatttcttaattcaagctgggatggaattatggtattactttgcatctttgatatcttgatttgccctctctgattgattgtaactgcattttggtggtgatggttgttaactcctcttattgcattttgccttgagaagaaacaaatgttggcctaggatgctccgtctaaagaacgggacggaacatcttatcacaaatttaagtagattcatggatcatttatttccaatgaattaagtggtctgtttgattgtcatat

SEQ ID NO: 26512 - DNA, 7843 bp, Zea Mays
ctttctccgtcttcctttggtcggtggggtcgactccgcctcctcacccgcaaaacccctcgtgttcgcgagacgatcagacgaggcggtcagggagggggaggtagaatagggtttcggcagggccgtgccgggccgcctcctgctgaccttcctcctccagcgccgtgcaagcactcccgtccctgccaagccctagctagggtagctggtgcagcggattccaggacccacaaatctcttcttctcaacccattgccggtggagcgtggctgaggtagtggcctcgggttgttggggttcgggctcgccggcgattttgggggacgagttcgctgccggtgccgcgggcgggggcgtgattcgcacctcggaggaacaaacggttgaactgacccaggtgttgatctgctgctgctactactgatccatggctaatacccggtcaggaggaggaggagatgcccctccccccccttcttctcctccagctgctgcttctgcaactgccacaaggaagcttgccgatggaagggagaccaggaacaccgcagctgccagtgctcacacaccaaacctcaggaggtccactcgagaaaacaaaggaaagcacaaatctagacttgctgacacaccaccccttcacagatctgctaaaacgcccaccaaggatgccactgcaattgctacccccaaatccacacccttgccaaacaaccccaaagactcaacaaaaaagccctccagagttaggaacacaagtgtttcaccttctccttcaaaacaagaacctaatgaaacctcaacgcccgcctccaccaaaagaaaaacccaagatgatgctctgactgcctctacaccgtccaagaagcagaaaaggctcctgcatgcgaagagctacattgcactcttcaatataggagaagaatctgtgcttgctaccctcagggaggatgaggaaaaagcttctgaggtgcaaccggaaggagatggtgctgttttggtgcatgaagaaagtaatgcaccggaacaacccaaccaggaagcttcaaatgttgttgctagtgaggtcttgggaggtcactcttctgacttgcatgaaattgaggtgatattggagggagatggattgaagattggatcccatcagtctgatgttgttttagagcgttgcattcttactgagacgcgctcactaaataaggcagtggaaagcatccccatgttggaaactggagagcaagctactggtggttcaaatcacttctgtattgcagccagaaacctctactagaattgccaaatagcgcttgctctactgctcatcatgaagaggccagcaagtcggtggaagatggtaattctattgggattcaaggtgcatgcacttcaaggaatactgaagctatccaatgtgatgaaacatggtatgatgacaacatttgtgttgtttgcagaagtagggaaatctcagatatcctgaagtcttgtggtggaaaaggatgtaaacgacattaccatctttcgtgtatggatccttccttggacgtgtccctaggaatatggctttgcataatgtgtatgaaaaagaggattcagtttggtgtatattcagtcagcgagggaattgaatctttatgggatgtcaaggaaggagtggtgaacagcaagcaatatttcgttaagtataaaaatcttgctcatgtacataaccagtgggtttcagaaagtgatatagttgatagcaccccgcaaggttctgatcttatctccaaagttagcaagaagattcataaagaaaagacaataaggtggaagcaggaatgggctgaaccacaccgtctgttgaagagaagattgcttatgcctcaaaaagaagccgaagttttttttaattcactaggtgataaatttgtatactgtaatgtcgagtggctagtgaaatggaaggatctgggctatgaacatgctacatgggaactcgagtcctcatcctttttatgtactcctgaggccgaggagcttaaaaggagctatgaggaccgctttaaaactgcaagaaaagcatctgatccttcaaaagtagacaaggctaagggggggatatttcagcaactcgagagactgccagatggttgccctcctggtttagacgatgaccatttgagatcacttaaccagcttcgtgagttctggcacaattcttgtggtgctattttcatcgatgatcaggagcgagtaattaagaccattctttttgtggcatccatactgcctcacatctgtcaaccactcctcattgtgtctactactactactctctccttgtgggagactaaattcaatcgcttggcagcatccatcaatgttgttgtgtacaatggagagaaagatgtacgcaaatcaatacaagatctggagttttatcaggatggttctgtgatgttgcaagttctcttgtcccaccctgatgccatcttagaggacatcgaagtgattgaacgaattaactgggaagcagttatagtcgatgattgccaaaactctagagtttcaaaatggcttgaacaacttaggagacttcctaccaattttaggatggttctattgagttcctcactaaaggaaagtattgctgagcacatcagtctgctgtcttttctcaaccctgaagaaaatggtacattgagtgtttcaaatggtgtttcttttgatacagctggcactctagttgttctgaaagaaaaacttgcacgttatgttgcctttgagcggaagacagattcatcaaagcttttagagtattgggttcctgcccgcctttcaccagtgcaactagagatgtactgttacatattactatcaaactccccagcccttagatcacattctaaaacagatagtgttggtgctcttcgcaacattcttatatctcttcggaagtgttgtgatcacccttatcttgttgatcaatcgctgcaaagcacacttaccaaggatcaccctgtaactgatatccttgatattggagtgcgttcatgtggcaagttgctgcttcttgacagaatgctccaacagatcaggattcaaggtcttagagttcttattctttcgcagtctggtggtgaatctggcaagcctatgggtgacattttggatgactttgttcgtcagagatttggttatgagtcatatgaacgtgttgaacgtggattgctactgcaaaagaaacagacagcaatgaatatgttcaatgacaaaactaaggggcgatttatttttttaattgatagtcgtgcatgtggtccaagcatcaaactatcatctgttgatgccatcatcatatattgtagtgactggaatcccatgaatgacttgagagcccttcagagggtcagcatggagtcacagtctgaacctgtgcctatttttcgtttgtactcgtcttttacagtggaggaaaaagctcttattcttgcaaagcatgaccatattttggatagtaatattgtgaatataacccctagcctgagccattgtctgctcagttggggcgcatcatttctcttcaatagacttgaggagttgcagcaacatagctactcaaatgtctctggtgatgagcttttcatggataatgtagatttggagtttttgacaaaattactcagcaaggttgaactcagaactgaatcaggcaatacagccatatcacaagcttatctgtgtggatctttctattctagggctattgttgtagcgggtgagagggagggaattccatcagttgatggtgacctgccaaagttctgggcctactggttaagtttacttaatgggaggtctcctcagtggcagtatatatctgagccagtacaaagaagccgtagaaagataaataacatggaacaacaattgaaaaacacagacaaacagttgaaaataactactgaagaaactgatgaagccagagtaaagcgtagaagaattggtgaaatcatggattcatctgcaatagactcacctggcaaaaacaaggacaccatattgccaggaaacaataccccacctagttctcatcaaatatcagttgaagatacatggcaggaactagagcgaagcaatcttcatgccacacaaaaaggtctacacgttcaactcaagccagagatttcgaagttatataagttgctgcaactgccggagaaggtgaaatccttatgtgaggaatttcttgagtatattttgaagaatcaccaaatcagccaggagcctaagggcatactgcatgcattcaatttggctctgtgttggcgtgctgcttctctctcaaagcataagatcaatcacacagaatcactcgcacttgctgtaaaaaacttaaactatgagtgcaaagaagaacttgttgattttgtttatgggaagctaaagatccttaagaagaagtttgcacgtagagcaggggaagtgagcaagcaaaactatatggtttcagtgagcgacatatcaacttgtgaacaggtcacttctgttagattgagaaatgatgagttagtccctagccaggtaactttaactgatggtaactttgagaatggttcacatcacgaggctacaggtgacttttggaccgaggagatggtttcgggagagaaagaactgctacctgacccagtaactcatgaaggggaacacttattgagggatgaacttctcagcaaaataatggacaaaagaattaaattagttgacaaagttttctctctgagaggaaggagtatctatgataagcattcaaatcaggtttcatttttagacatgcataggcaaaaggtagtggataaactcagaagagcatgcagtttagttgtggagcatctacgtagtagtcaaaatcacattgctcaagaggacagagatgggaaaataaagctaataattgaatggtttactatgctgctgtatgcttttctggaacacatgaaatgccaacgtaacaggcttgatatgcagcaatcagcttccaggatcaaggagtctcaattgaaggaagaaacccttcaggcagcaagatgtggccaattagatcaaaattttgatcaacatattccttcaccagattttgaatttgctatggaagaatttaggcacttcagggaagtagttggtagctgctatgttgatccagctgctctggtaccagagtctttggatgacaattcagcaatggaaattatgttggttcaaagcgcaactgatgctgaagtcatcgaagaagtgctaaatcgacctactgaagttcttgttcaaggtccagcatcagaagttgttggtccatcagttgatgtgatttgcaattgttctgatggcatcaactcccaaagagatgcatctctggctgttcattcattggaaccttcaagtgacgaccttagaagtactgaccatgttgaggagaacacagttggctcacaaatacagggtggtacaagcaaacatttaggtgatgctgcaatggaagttgaaactggaaacaggaacactgctttggctgattcacctcactttgacaaaccagctttgactgctccatccaggcaggcaacattgctggtttctcgagaaaccgagatgctgagcaatcttgtggaccaatgtgcacaacagagtttagtgtcagcacaacctttgcaggatgagtcggaacaagcagatttgtctagtgcagcatcaactcaacccttgcaatctgagaggcaacaattaatctctgtttccaataatctgcttgaaagagcacagcttgatcagagtcaaccaaattatcagacagatgcggcacctggttgtgcgcagtctacagaactctttccagtgacgtcaatgatgtttaatcacgcacctattgattctgaaccactgaaaaatgagttgcacaaattacgattacacatggacacactcaataaagtccatgaaatgaagaaaacccaacttcagaccgcatgtagccaagaactagagaaggtaaagagaaaatatgatttgttaattaaagaacatgattccactcatcttcagcaaaagaaggcacttggtgatttttatgagaaagttcagcgcaaccaatcgctggctgaggattttcgggccaaattcatatcactgtctgcagcacaaggtgcagcaaaaggccatacccctccagttcgtcacacacctcaggctacccaagtggtgtcctccacatcatcaattgccctgtcatcagcttgtcgaccaccagtgccgaggcctagggttcaagctccacaggtggaccaaccattattgtcattgtcgcagttctcccgtccgtctttgcaagtggtccaacctcccaacctggaactaggcaatcttttcagagcaacgtcaacgactcttagtcatatgccacctcaacgtgggagctatggagttcagagtgaattggctcctcgctcacctgctcctcatcttcagttcagatcgccacgggcacattccatggcacctggaaatcagcagcaatcgccagcaattagtgtggatgcaatgtcctcaaggacacaaccagtgctggcggcaagcacatccccatcagatatacatgtgggacccctagcagcctcagccttgtcaagtttacactctgttctcccttcaacctcattaccctcaagcttgcatcctagtcacctggcacaacgtgtgccaccaactcctaacccaactttacaagccggggcaccgaaaggctcgaatgcaacaatgccttccatccctacaggcatgcagctgccagattctggttccctatcgctggatgcatggcttacagctaatcttgggttgaatgatgcgtctacagctcctgctaaggatacagccagtcttgggttgagcagtgatgcccctagggcagctcctgatacaaatacggccagtcttgggttgagcagtgatgtgcctaggggtacggctcctgctacaaatacagccagtcttgggttgagcagtgatgtgcctaggggaacgactcctgctacaactacaaccagtcttgggttgatcagtgattcacctagggtgattgctcctgccagcagtaattcgcctggggcgattgcttctgctacaaatggtggttccgagatagatgtggtatgcctgtcagatgatgaatgatgctagcacgtgtacaaggctgacagttatagatgactgcttgaaaggactaggcattattttacggctcccttgagtccgttctgacaaggtgggaatgttgtttgtgctgtgaatggctggtaacagcaatgacagttttattaagttcattgtaaatgtgtattatgacaaatgcctgccaacgtttgctgtaaatcgctaacctctggggaatgtggatattaacctctgagatggagttgggtttcaagcgctatgaggtttctgtacatgtttgtcattgattagttccctgaggtgttcgttgtaggccggagtgctagctccgtgtatcgttttggttctacgtatgtttcttttttttagtttgacttaaaaaaacagtagcaacaaaaaacagtagcaacatctccatgatagttattatgtataataaatgctgaaattttcttgtatatatttgattgaaacggcgggagtatgtaacagagcaatttagaccaaggcggtcacttcaacgttgtattgtatttctcttcttggtgaaatacggcagcactgtcctatgttaagttttatatctatatagctagctatctatgtatctgtatttatacctgttctatat

SEQ ID NO: 26513 - DNA, 1106 bp, Zea Mays
ccgagccgcaaggcacggccggactcgtgtgctcacattctcactagtttcaaattttcatctgttaaaccctacccacccggcgaatcccttgacaaatccaaccagcttgccggaggaatacaccgggaggtacgtcaaacggcggggagagggaggagtaggtcgctgagggagggttagagctgggcaaggccgtcgctgtcatggaggcgcaggcgacggcgacggtgaaggaggcgcttgcggcgctgtaccaccacccggacgacgccatccgcaccgccgcggaccgctggcttcaggagttccagcacacgctcgacgcctggcaggtagctgacagtttgcttcatgatgaaagcagtaatttggaaactctcatattctgttctcagacccttagaagcaaggtacaaagggactttgaagagttaccctcggaagcttttcgatcattacaggattctttatacgtattgctaaaaaagttcaataagggaccacaaaaagttagaacacagatttgtattgcaattgctgctctggctgtgcatgtacctgtagaggactggggagctggtggaattgtgaattggctaagtgatgaaatgaaaactcatccagaatttattccaggcttccttgaactgcttatagttttgccgcaggaaacttctagttataaaattgcggctcgtcctgaaaggcgcagacaatttgaaattgacctttgttcgtctgctaatgttgctattgatttattaactgcttgcatggccattgatcagctgaaagagcaggttttggagggattttcttcttggcttcgtttctgtcatggaatctctgcctctgaactcgcatcacatcctttggtccatctggcactctcttcattgaactctggtcaattcttggaggcagctgtaaatgttacatctgaactgatacatgctactgtatctcatggcgctggtactatggctgagcaagtgccactcattcaaattcttgtccctcatattatgggtctgaaagagcagctcaaagatccatctaaggtcagttttcgagttgaataccctgaggactaccacaccttt

SEQ ID NO: 26514 - DNA, 2095 bp, Zea Mays
tccctggttccctgcctcctctgtatactaactctcctctctcccagagtcccggtcagctcgactgctccagttcttcccatttcccagccgccgcggcgccacgcagacctagcagagaaacacccacccgagatggcgatggctctgcgccgccttgcgggcgtgtccggatcgccgtcggcctcctctgccgcggccacggtgctactccggtcggcgctgacccgcccgatctccaccggcttccgcgaggagcgcgacaccttcggtcccatccaagtccccaacgacaagctgtggggcgcgcagacgcagagatcgctgcagaactttgacattggcggggagcgtgagaggatgcccgttcccatcatccgtgcctttggcgtgctaaaaaagtgcgccgctaaggtgaatatggactatggccttgatccaacaatagggaaggccataatacaggcagctgaggaggtcgcagagggaaagttggatgatcacttcccacttgttatctggcaaactggcagtggcacacaaagcaacatgaatgccaatgaggtaattgcaaatagggcatctgagatccttggacacaagcgcggtgagaagtttgtgcacccaaatgaccatgtgaataggtcacaatcttcaaatgatacatttcccactgtaatgcatatagcgacggccgttgagatacattcgaggtttatcccaagtttgcaacagttgcatgattcacttcattcgaaaactattgagtttaaagacataattaaaattggacgtacacatacccaagatgccaccccattgactcttggccaagaattcagtggctacactacacaggtcaaatatggaattgaccgcattaattgtacattacctcggatgtaccagcttgctcaaggtggaactgcagttggaactggcttgaacaccaagaaaggatttgatgccaaaatagctgctgcagtggctgaggaaacaaacctaccctttgtgacagcagagaacaagtttgaagctttggcagcacatgacgcttttgttgagagcagtggtgccgtaaatacaatttctgcatctcttatgaagatagcaaacgacatacgtttgctaggaagtggtcctcggtgtggtcttggtgaactaatcctaccagaaaatgagcctgggagcagcattatgcctgggaaagttaatccaacccagtgtgaggctctgacaatggtttgtgcacaggttatgggtaatcatgttggtgttacaattggtggtgccaatgggcattttgaactgaatgtttttaagccaatgatcgcagccggattacttcgatcattgaggttgttaggggatgcatccgtgtcctttgagaaaaattgtgtcaggggaattcaagcaaaccacaagagaatttcacaacttttgcatgagtctctgatgttagtgacatctttgaaccctaaaattggctatgacaatgctgcagctgttgctaagaaagcccacaaagaaggaaccacgttgaaggaagctgcattagaccttggagtattaacggagcaagaattccatgagcttgtcgtcccggagaaaatgattggtccttctgattgataaccccatgttcactatgtttctttgaagcattcaggttgccacatccgcgagttctggtggccctgtgtttccaagttaatgattctagcgcacccataaataaagcaaataatttttcatatggtcattaggtcctcaccgtaccgcactagagaaatgatttttgcatggcggatggtatctgagaaaacagttgtattcttgttcaaatagggagcagtgcactttgattcatgaggcgccttccattatcttggcatcagtcaaccttttcttgccaagtagctagtgctatgtaacaagtgacatggcaaccatgtatagaaattatttgcatgggtttgtgttcttgccaggtagctaatgttatgtaataagtgacaaggaaacaatgtcatgaattatttgcattgggttttgacgagtgaaatagaaatatacgccctgttttagtttaata

SEQ ID NO: 26515 - DNA, 710 bp, Zea Mays
tttttatcattcacttgcacttcaagtcctcctcctcccctggcttcttcttcttcctcctcctgctggctgctgctgctcttctttcttcctcctactcgatccgtctccaccacctcacacgtacggtactcatcatctcccatccgaaacccgctctcccctgccagagctagctagatctatatagcctgcagtcctggagcttgcgagcaaaggcatacgtacatacatacatacgcgttcgccgtgtcgggccgtacgtacgttgtcgtgcgatgggtgcggcgccggcggcgaggaggtgcgcgctgctcttggcgctggtggtgctggtcgcggccgcgggcgagcgcggtggcagtggtgccggcggtgaggcgggggcggagcaggttctgaggctgtggtcgtcggcggattcggctaggggtggtgaagccgtggacgaagaagaccgcttcttcaggtgggagtgggaggaggaggaggaggacgacgacaacaacgacgaggaggagggggaggaggaggacgaccacgccgtcgtggtgcagcggaagggcgcgtgcaggaacgtggtgaacgtcgacagcttcggcgcggcgggcgacggcgtcgccgacgacacccagactgcctcaatgtggttggttgatgccgatgacgccggcaacgcaacgcaattacgcaatgtatggccatggcgg

SEQ ID NO: 26516 - DNA, 2580 bp, Zea Mays
cccacccactgcgggcgctcgtcgatcgccactttcggccccggctaaatcaggatatagaccagtgagggagcgacaagaggcggaggaagaggaggtggtgccggtggtcgtgctgctgctgctgctcgtggtggtggctgtgcaggtgcggagatcgtcgatcgatcgctgcggttcgtcggcggcggtgtcgagatgtcgatggacttcggtgccccggcggatgaccccaaggctttccgcaacatctgccgcgaccggatactgaaggacctgcttaagcctgacaaggataaggagaccaaaagctcatggaaggttcttataatggacaaattcacggtgaagatcatggcttatgcttgtaagatggcggaaattaccgatgcagggatttcgcttgtagaagatctgttcaagagaagggagccaatgccttcaatggatgcaatctactttcttcagccactgaaagaaaatgtcataatgcttctatctgacatgtctgggagatgcccactttacaggaaggcatacatcttcttcagctcaccgattcctaaagacttggttacttacataaagaatgacagtagtgtaataccacgcatcggtgcactaagagagatgaatttggaattcttcactattgacatgcagggctttgtaactgaccatgatactgccctgattgatttatacggtccaagtgaacaaaattccaaaaagttcaacgatactataagcacaatggctactcgcattgcgactacatttgcatcattgaaggaatttccatgtgtgcggtatcgggcgccaaaaggagatgcttccacaacaactaaattcgatatggttccaaagtggcttgctactgctgtttgggaaattgtgtcaaaatataaatcaactattcctgaatttccccagaaggagacatgtgaactgctaattgtcgacaggcccatagatcagatagcacctgttattcatgaatggacctatgatgcaatgtgccatgatctactcgaaatggatggcaacaaatacatttatgaggtatcaaagatgggttcggaacctgaaaagaaggaatctttattagaggatcatgatcctctttggcttgaacttcgccatgctcacatagctgatgctagtgagaggttgtacgaaaagatgaacaattttgttgccaagaataaagcagcacaactttcaagagatggtggtgaagtctcaacacgggatctgcagaaaatcgttcaagcattaccccaatacagtgatcaagttgagaaattgacgctacatatagagattgctggaaaaatgaacaggtgtatcagggagtatgggctccgtgatattgggcaattggagcaggatttggtttttggagatgcgggagcgaaggaagtcatcagtatcctcaggtcaaagcaggatatgagcccagaaaacaaaatgaggttgctgattatatatgcaattgtatatccagagaagtttgaaggtgacaaaggggaaaagttgatgcagttagcgaagcttccacatgatgatatggatataataaattgtttaggatacttggatggttcaaatacaaaaaaatcatcaaggacgggtactttctctctcaaatttgatgcccaaaagaagaaaaatgctgccagaacagacaaacaagatggtgaggaaacatgggctttatcacgttttttcccacttattgaggagctgattgagaaactgagcaagggtgaattacctctaaaagagtacccatctatgagtgaaccaagttctgcttctgcttctcaagatgccacacaaactgcatcatcaactgcacgaccagcacaaaatccacaaccgatgtctatgagatcaaggaggacaccaacatgggcaaaatctcgtaattcggatgattcttcaagtgattcttcagtcctgagacacgcatcaggtgacttcaagaggctaggcaaccggatttttgtcttcatgattggtggagccactagatctgaactgcgcacggtgcacaagcttacaatgaaaatgaagcgcgaaatcgtcttgggctcttctagcatcgatgatcctccgcagtttatttcgaagctgaagtcgataggtagtgctaccaagacctagcttgtatgccgagcgataaaatgaattctcaccttatagtactcagtataagcttacacattatacatacttcaccaatgaacagctctacattttactaggatgttgtcggctgtcaccagcgacccattgattatcgtcgaactgatcacagttattattctcttaatttttttttaattgaggaagtgagctggcttgtctggatgtaaaataagaaatacgtacacaacgttttgtttgttatttgatgttcttgttgacaaacagataaagagagaagtcattaggaggttttgtaaaaaaggcctaaaattgatggttatatgatatagaaactgtattgcacggatctataacagaatatggataaaattgattatggagggacacaacttcctttgcttgctc

SEQ ID NO: 26517 - DNA, 1268 bp, Zea Mays
gtttgcttcgcttggtcatcttccacggcgttttgagtttctgttgccagtgcagccatgtccatgttcaacaggatcttcgggaagcccaaggagcaggccaactccagtgccttggccacactcgacaagttaaatgagactcttgatatgctggagaagaaagagaaggtgctggacaaaaaagcagccgctgagcttgagagagccaaggagttctccaaagctaagaataaaagagcggctatccaatccttgaagaggaaaaaactttatgaacaacaaattgagcaactcggaaattttcagttgagaattcatgatcagatgatcatgttagaagcagctaaagctacaacagagactgttgatgcgttgagaactggagctgcagctatgaaagcaatgcaaaaagcaacaaacattgatgatgtcgacaagaccatggatgaaattaatgaacagactgaaaatatgaaacaaattcaagatgctttgtcaactcctcttggagcttctgctgattttgacgaggatgaactggaagcggaacttgaagaactggaaggagcagagttggaatctcagcttctggagcctgttgcagctcttcctgtgcatccagtgcatgtcccaggcaacaagcaaccagctcgccctgctccacagaaagctacagctgaagatgatgagcttgctgcactgcaagctgaaatggcactgtgatcaggtttccactgaagaggtgaaatgtgtatatgaattgcgttatgctgaaagctgagtcaggctttattgtatttgccatgtgtgtataatcttggtggatatttggcaaccgtcaaccgaagcagcgaaaggccgctacagccggtatttgtttcagtgattgggctctgttttctttccacagacaatttagttaatgtcgcccggttaggtctatgctaactattcaggtcaccaacgtgcattgtttgtcacagtatttttcagttacccatattgtttggagccatgtaagagtgttggaacgtttaaagcctcagggttcatatttgatgtgacggagggagtattacataaagtcagttgttcggatttgcagctgtaatctgtagagacaaaacactgtaagcagtagaagctgatatggattaaagtcaagcgaataggctctaatgcatagagacaaaacgacggttgaacacataggcagtaacgcatttgaaatataatggtgcgtttggttgtaatgacaaaacggg

SEQ ID NO: 26518 - DNA, 1826 bp, Zea Mays
tgttggctccggcgcctgtggtcttgcagatcttcactggtcaactgtatagctcgatctgaagggggcagcaccagtgcacaatctgcatgagtagagctctatttcaaaaggggtggcgttggccctcaatctgggaggtgtgctcttggggcagccaggcttgtcgttgctcaaagacggcattggaaaggactgatgtaaacaggcaaacagcatcaagtgaggaattggtggattagggattgaggggagagtgtagggtgttgctttatgggctgttgggttaattgggttctaatgagttagtggggtggctgctaatagttaatgtggcccatcgatgcttgtatttacctcttattctacattatatatcttactacatattttatgttccatatcatttactttttcaaaaaatgaaacatatccctatattgagtaactgtgtaacatgcaattatcttcaaagttttttaaaaaacatacaagatacacttacaaagtgtatgcctgattttgcggagattctgtaattatattacttgtataggagtgtatgaaaaacagctatccatgtgcctaaacctgtatggtttcaactctagcctatcccaacttacttgagactaaaaggctttgttgttgttatttgtaattatattaccaatggctcattctttatgtggtctgactaatcaagtgatgaataactaaagcatactaaaattaggaaacaggtcaattagggtttttttggtatcatcatcatcatgagttacgaattaaaagcatacctaattaactgaaggatacctaatcaatcatcatgataggctcatgtatcacatcatgtgccttagcaaggtgcgatttgaggttgtagtggcagcaggctagcgcctgctggagaggctcctagtttgacacgacctgaaatgcacattctgcagtcagcaatctggcaatcacatttagcctagacagctatggcaactgagctgcaggaattgctaaatgactagaacaggtgccaagctgattatttaccagggtccaggggagggggtcttaataaccctgaaaggcattgtgatttacaaagcccgtggaaaaacagatccattgtgcggggaggatgggatctttcggattatattgcgcactgcaaggccagggtagcagcacctatcaaagacaataagagcaaacagccgaagacgtcttgtattaaccatggatgatctttctaaagctttgcgcgagcacggcgtgaacttgaaacacgcggagtacttcgcagacagcccttcagctggaatggctccttcgaccagagaggagtagactggattaggccaacttgtacggaactagggagggatcgcgtggaatggatgggcatgttggcattcttgcccgatcagatcgatgggatgtattactattaagtactgctactatgactagtatatttctcaattaccattgtcactgagagaatccagacacaagtcgttttgcccatgcgcttttatttgtacaaactgtcaatcatctgtaaccctatggggcccaaggatgattgggcaaacatcatgagttttttgttttctacataccattctaaaggaggcagctcaccttccctgggtggcgaattgtcaaatcaccccctggccctaggagaacatctctatggacacttctctaggtcccttgtttcctccatgttgacaaagtgatcagtatgtacttaccacatgaccacactgattaattgtgtccttgctttcgtctatggcacaccaccagaaatctgt

SEQ ID NO: 26519 - DNA, 784 bp, Zea Mays
ctctctcaattcttgcagccaccaaaccctagccgccccccctctcaatcccctcctcccaaggtgccaatccttgccgctcggatcatcgtcgtcgtggtgcgagtcttcaatcgttttggtggagggaagaagggaggaaggaaagggggagaatccaaggtggtgggcttccggatcgtacttgggatttgcccgaacttccggtaaaggcaagtaaatacagtggtggttgctaccgtttggtttgcatcctattccctgtcattgagtatgcataagttttaattatgttaatcattaaattctatgatgaagtttatttgtttggaagtattaattctcaattgtctaacattgtggatgatcataatttggtaatgatatatgtggttgattcccatctggatgaagttgaagtgtctttttgaatcatgttatatgaagtgttgtaggcatgacatgcacatcgcatcatccatcttgcattttgaagttatgtcgtgatcttatggtccgaccgtaccggtacatttttagcatcgtacgttgcccgaggaggggtacgatgcggcttcatatccttagaggtatgaaggcagaagtcatccttgcatttgcagacatttgcactcatgaggaatatatgaagtgtgacattactatgttactattgatgtttctacctgcgaggtgtggtaactaggtgcgttgtacgttgtatacgtgctgcaccttcgtaataagaaggttgtggaattaagtggtggtaaaacaatgttct

SEQ ID NO: 26520 - DNA, 271 bp, Zea Mays
ggcaggtgcaggtccgcccgtgccgcccctgggcggccgacgcgggggagacgggttcgtggctggttctgagatccttcagcttcttaagtactcccattgcacccggccatcagtataacgtgtaaaattatggcactactactagtattttgcaagtgcgttgccagttgccacacaggtgaaaaaaagagagaacatatctagtatatatgatgcacatattaaatcaacatccctcattttatatctaagatctatagttgtttgt

SEQ ID NO: 26521 - DNA, 197 bp, Zea Mays
tcattatattcatacatatgcatcttgcacctcatataggaccgagagatgatgatcgagctagtgatgtggtgccaaccacaaggtgcagttggtggacgacctgaagaatgatggacataactagtagatgctcgccaagcgagtaccctcccccagcaaacactatctaagtgttaaattaaaggcaagccccg

SEQ ID NO: 26522 - DNA, 4292 bp, Zea Mays
tgcccgtgtgccaggcgaaaaacgtagcctcgcactctcgcaggcggcggcgcatcgagaaacagggctgcggctgttgcttcttccacctctccggccatccggcggtccatcgttccgtgccggcggcctcccctcctacgcccctgccgattcttcaatcttcaccaacgtctgcgcgtagcaggctagcagtcggcacggcttcctcagatctgccggacgacttgctgttcgtcaccgactcaccagcaaccaacgtcagccatcagccggcagcaggggaagctgggcggagggtcattgcggcacggcgtccaggcgtacagaaggcaccagcaacagcccatggcaaacgccgcagatgaccctatggcagatgaagccggagtagaagatgccttcacacaggagatcaatcattcgtacgtccctagataccatgtgttgagttggatggaaactgtggaggggatggtggccggtgtggcgtcgcttccgccggtgtatttgatactgaacagagatcttcttgagacgggatggggatggaagaggctggtgccctacagacctggttatgttgagttgcatgtgttcaagaaataccttggggactatttcgaccataatcgtgaagcttttctttgtgccgagcagaagcctgatccatttggatggattgttgctgaaaagagtgccctgattgctgcagccaaatcgtgcctcaagatggagaaggcacttctcaggtactgtgctagctttctcactcctgacgacaaaaggctgatcctccggatcaaggaccaggcaaagcaaatgatccaatcagagggtgatcaatctttgattgtaactatatgcttggagtgtattgcgaaggaggccgagttaatgtacaattatttgccttgtgattttgacaccaccgaagaagtcgccgtctgcaataaggttcggcggtctgccttgaatcttatgctctacaaaggttctgaatctgctgttgctgctggtgccatgatggtgtgttcctgatactctctccattcattttataggctttattttgactatgcaaaaaccaatattctgctgtaaattctccctatagtattatgttggtagttacaaaatcatagtcagtagcaagtgcttttaattaggaattgttacgtaactcacattttatgggactaatgtctggtcaaagcatgaacttggatagtcaaaccacaccttataaatatgaatatagggagtaattgtgtattttttaatcctctgttatcctgtcaagcttctttaaccaaactgcaaaaacgatgtacttgaagggtatcacaacagaggctaagtccatttttgacttgcttagtcgagaccatgacgtggtcatggaagtttttacttgtgagagtataagggaacatacagcatcagttctgacccagcttgggaaggaatttgcttgcgagactgctactgtgaacagctcatcagcgcggcctatgggggtcagtgatgttagagatctgaactctgaagtatctggttcaatggaagactgtacgagtatggatggagcaaggttttaaagtcggctagtcgactctagtcgcctaagcaccgataaggtgactaatcgcgattagtcgtcgattagctcgattagtcgatcctagtcgactccctagtcgtcctatagtcgtccatctataacaggaccatatatatatatatatatactagattgcaaatctattgacaatattacaatgaaactgtagaatgaatgaatgatcatgttttcactaaaaggtaaagatcacttagacacttaccttggattggagtatacaacagcacactgcaagattagtaggacaacacttctggtatatctccagcagccttactagtgcaaaacgtcatatatctccaacaaagcaagcagaggagggcgtccagcaagcagaggagggcggcggcgcttacagcagcagcaagcagaggagggcggcgctcagagcagcagcaagcagaggagggcggcagcgctcagagcagcagcaagcagaggagggcggcggcgctcacagcagcagcaagcagaggagggcggcgctcagagcagcagcaagcagaggagggcggcagcgctcagagcagcagcaagcagagaagggcggcgacgctcacagcagcagcaagcagaggagggcggcgctcacagcagcagcaagcagaggagggcggcggcgctcagagcagcagcaagcaggggagggcggcggcgctcagagcagttagcagcaagcagatgaagcggtggcgctcaactccagctaggttaaagactgtaacggcattggcacagtttcaggcttttcagcccccctggtgggccggcccaaatagaaaagagcagcctggagcccaaaacaaagcacctagtcgagaacaaccctaatcggacgactaatcgccgactaatcgcgattagtcggacgactaggtttctagtcgccctaatcgcgtcggtggccctaatcggccttgcagcagcgataagtccgactaatcgcgactaatcgcgattagtcggacgactttaaaaccattccgatggagacaatggaaacaatccagttgttggagggggtggctaagaactcgaagaatttaaagttggtggagaaccacgaaaacgagaccagggttgccacgtaagagaagactgcatcagcatcactacttgcctgttttgaaatttaatgtacctttcacggaagccctcactaacattaattgtttgtatgtttcatctcagcttgatgactgaaaataactagggccttgcagggaaaccttcgttgacttctgaggtactgaagcaattgggaaccagcaggccctctgtccagacgctggtgctttgtgctccgttgttgtgctgctgctccactggcgtttactagttctagtgccttttcactgatttgtccgcacagggatcctggtgctagtgcttggctgattgctgctgcccctgtgttctccctcaattcgtactgctcatgcaattcctggaggccctaggaattggttctgcagttgtacctgtaggctgtagctgccaatttagttcgattttgaatttggcaggtagttgttgtgcttgtttctagatgcaagagtgcttattgtttgtggtgtttgttattggaaattttggttggtggtagttatttgtccggaaaggttaatgcaatgctgtggcttgtcttgcttttagtcaatggtagtaagttgagtaaaatgttcatgtgtatgtgcagcttgtggtcggcagtgtgaaattttgacctctaattatttgttagtaatgtaattttctcagcaggaatccaattcatgatgatgagctacattattcaagtttagcaactattgattgtgtttcccatcatgccttggatgtgtcaaaacttgaacacaccaatttgaagattatcataccctgcttatctatccacatacaaccaaccaaacaaaaatctgctggatcatcccatttgaaaacttgcaaccaaccaaacaagaatttggctcatgcaatccgtccaacctaatgagctaatacatgtaggagcatcattctatgattctatcctaaatccatggatggccctatcccatccaaccttgcctctccaacccatacggccatacaaacttgtgaccattcattgtaattctcatttcattgtcataagtgcgcctcgtttgacactgttgtttctctcgtcatcattggctttgtgtcggacacgttcatgataatttatctgcagcaacggtcaaatttatgaagctacaaggtgcaagttatgagctgctgtaactaaaaggatctctggtttcttttgagcagctgtctgttgtgtcaagttatgtgctacttgtaacactaaagtaccattttaccttatgacatgcagtgcttggttgttctgtcgtagttaaagaccgtgttgcaataagtgctagttctgtatgtttcctgggtttatgttatcaaatggttgcctggtttgcccactaatgtcatgttgctataagtattcctagctgttgagaaatgcgtgcgcgcgtgccgatcgttgtatcattgggtgcaacatcataggtcattgtagccaagggctatgaagaggggagtttcagatagtccaaaaacaccagggtacatagcaaatacgaaggttcttaggaaggaacagaag

SEQ ID NO: 26523 - DNA, 1978 bp, Zea Mays
acagtgccgcagtatcccaagtcccaacaaggtcaagtcgcgtggattcgccactagcgggtattgattaccttgccgccccttgaccaaaccaaataacacaagtccccattgcttgcaccctacagctcctcacacccaaggtatggaggaggcaccaacgagggagccgaagaggctgcgccaggacgccgcggttacttccgccgcggcggcggctgaggagcctcagtacgtgtacctgcctatcgccgacgccatgaaggttcccggcgtccgggtttgcctcttcgccgttgtctccgagatcggcatcaccgaccgcagccgtggcacggatttcactcttaggttgaggattgtggatcaatcatgcatggatggaatctctgtaacagtttttgctgacaaaactactctattgccttgtgtcaagtcaagtggagatgtgatcagtctccataacgtcatgataacgatgcatggggagttctttgtttcatttaacaaagaagtttcttcatttgcgctatttgaaagcaaagtagctgagtgcagcccatatcagacttctgtgaaatatcatggcagcaaacatgacaaagaacttttaacccagatgagaacgtggcttgcatataatcctctaggtctgaaagattttgaattgcagttaagaagtttaaaatctgattctacttttgatctagtatgcaaggttgttcatgtccatgaagataacgacaaattgatattttatgtttgggatggaactgatacccctgctgttgagtttcaggcaactttggatccaaaggcagttgaatcaccccctctatttgaagggccacctctacccagggaggttttgtgcacaatgccaattatcggaactgttttgaggattttttcagatatgcctatcaaggaagtatcccacatgcaaaatagggtttattgggccagattctgtaacattacttgcaaggaagagtttggcatttggaaaggcattttgctggcctctagtaaagttcggcttttatctcatgaagatggtagcgttgttgatcgtcgaaagatgtatgccattcgtaaggccaaccaagttctctgccagccgatggcaagctttccctctaatgttactgatgtagaatatgaggaagaatggcactcaacgttaatgcagtctttaactcataaagaggtgacacacaaactcaaaaccttggcccgtgttgtgggagcgtatccatgtcaagctagtggtctccgtttgctgtcaactggtaacattcatctgcggttgactcttgaggatcctacagcgagaattcatgcgtacgtccataagaattatctggtccaattcttcggtggttttctgacagaagaagcgataacaaagaagatgaacaagctacttggtatcccagaaccagaggacagcgaggaaggtgcccccttgactaggaatccaccttggatatggtgctgcttgacatcattctatatggacaaaaacaatccctgggacagcagaaagtaccgaatctttgccacagagatgagggattgaggagggatgctgctcgaatatgcaggaacggccttgcaaatgaaccgaactgattctatgtagtatttctgtgtgctctcgttggcattttgcttggaggggcatcttgctgggatgcagcgagacacgctttagttgtagcctgcgtactgtcagtattattccctagatgcaatgttgttgcagtgctgctgctgaccttctgctccatccagaacactggtagcagtctgtatgcgcgcccacgctacagaactctagattatcttgtgaaatgttagtgcacacagcaccaacttttggcttggaagttggaacgtggcaagaaccccttttcttgttcggcgccttgcagttctctcggtttccacgaaatgggtatatgttccttgtgaa

SEQ ID NO: 26524 - DNA, 3256 bp, Zea Mays
gcgacgcctccacctcctccaccgtgtccgctgccaaccaacggggctcttccgcttcctccgtcctcaccttccagcaggccatccagcgcctccaggagtactgggcctccgtaggatgcgccgtcatgcagtgtagcaacaccgaggttggagcgggcacaatgaatcctctcacatttcttagggtcttaggtcctgagccatggaatgtcgcttacgtggagccaagtataagaccagacgacagtcgctatggggacaatcccaataggcttcagcgccatactcagtttcaggtaattctgaagcctgatcctggaaattcgcaagatctctttctgcacagcctttcagcaataggtattaacatccatgaacatgacatccgcttcgttgaagacaactgggagagtccggttcttggtgcttggggactgggctgggaggtttggatggatggcatggaaatcacacagttcacatattttcagcagtcaggaagccttccattgcagccggtttctgttgaaataacatatggacttgaacgtatcctcatgtcactccagatgctgtgacaggaagttgatcacttcaagaatatactatacaccgaaggaatcacatatggagagctgttccttgagaacgagaaggagatgagtgcatattatttagaacatgcggatgtcagtcacattcaaaagcactttgacaattttgaagaagaggctcgatctttattatcactggggctgccaattccagcgtatgatcaggttctgaaggcctctcatgctttcaatatattagattctagaggttttgttggtgtaactgagcgtgcaagatattttggtcgcatgcgaagccttgctcgtcaatgtgctcagctttgggtggaaactcgagaaaaccttggacatcctttgggtgcttatgaagaggataaccttatctatcctcatgtctccaaaaaaactcatagagaggaagtgctggtacaaccacgtgcatttgttcttgaaataggaacagaagagttgccaccccgtgacgtcgtagaagcaactgaacagcttgagaaatctctagttaatacattggagaaacgtagattgacccatgggaaagtgcacacttacgggacaccaaggagattggcgattgttgttgaaaatcttagtatgaagcaaacagaggtagaggtggaactacgtggcccaccagttgcgaaggcatttgacgaagaaggaaaccccactaaggccgctgagggattttgtcgaaagaataatgtctctgtcgatcacctatatagaagaatagatggtaaaacagaatatatctacgctagagtcagagagtctgctcgttttgctgatgaggtcctaactgaagatttacctactattgtttctggtatttcatttcccaagtcgatgcgctggaactccaatattgtttttagtcgtccaatacgctggatcctggcacttcatggcgattttgttgtgccattttattttgctggcatctcaagtgggaatcagtcatgtggccttcgtaactcttctttggctaattttaaggtggaaactgcagaatcatatttaggtactgtggaaaaagctgggatcttgattaatatgcaggagcggaaggaaaaagtcttacatgcctctactgtattggctcaaggtgttggtggcgatttcattgcgcctgatagcttgctgcaggaggttgtcaatcttgtggaggcacctgtgcccatccttggtcgatatgatgattccttcttagaacttcctaaagatgtactgattacggttatgcagaaacatcagaagtattttgctgtaatctccaagtccactggcgatctgctaccttattttattgctgttgccaatggtgcaattagcaaggaagttgttcgcaaagggaatgaagctgttctcagggcaaggtatgaggatgccaaattcttttataagatggatacacaaaagaaattttctgaattccgaggccagcttagtggcattctttttcatgaaaaacttgggacaatgctcgataaaatgacacgtgtcgagaataccgttgctgaattggcccttattcttggaataaatgagagaacggtcccaattatcaaagatgcggctgcattggctatgtcagatcttgccacttctattgtcacagaatttacttcacttgctggaattatggcacgccattatgctttgagagacagcatccctgaagagattgcagaagcactatttgagataacactccctcggtcttcgggtgatgtgtttccaagaacagatgctggtatagttcttgcggttgctgatagattggatagcctagttggattgtttggagctggatgccagccaagttctaccaatgatccatttggacttcgaagggtctcttatggattggtccaaatattagttgagaacaaaaagagctttgacctcagacgagctctcaccttattggcaggggtgcaacccatagcaatagagagtgatgttatagatgaggcagtacagttcgtcacaaggagactggaacagcttctggtggatgagggaattaactgcgagatagtccgatcagtgcttatggagcgtgcaaactgcccttatctagcagcacaaacagcgaccgaaatggaagcattttcgagaacagaaacatttcaaaaaatcgttgaagcgtattcaaggccaacaaggatcatccgtggaaaagaaattgagtctgctttggaggttgacccacacgtatttgagaaagatgaagagaaagttttgtggagcgcctacttggaggttgctgataagatccatcctggtgttgatattaagacctttgtggatgcttctcttatcctgatacaacccctagaagatttcttcaatagtgtcttcgtgatggcggaagacgagagagttcgcaacaaccggctaacgttgctgaggaagattgagagtttgcccaaggggattgcggacctgtcagttttacctgggttttaagctgcctattccagccagggggtgtgagcaatagccgtagcggagagatgattttgattttacaagtatttctgattaaaggaaaaaaaaacgtcgtcgcagtagggcacggcaatcccagtaaacgctgtacttgtaattctgattaatacagtcaacaaacggaatcatatctcaaatcttgt

SEQ ID NO: 26525 - DNA, 2782 bp, Zea Mays
cccaaccatgccattgccatcggccgcccagagcgctctcgtcgtggcggccgtcgccatagccaccgccaccgtcctcctccccttcccacggacgccgccgcgggaccgcttcgccgacatggtgctggccaacggcaccatctacaccgcggaccccgcccgacccttcgccgacgccatgtccgtccgcggcggccgcgtgctccgcgtcgggacctacgagagctcaagggccctcgcactcgtgagctgaatctcagtgggaacgtggtgctgccggggttcatcgactcccatgttcacttcatagacggtggattgcagctagcgagggtgccacttcgtggggtcagaagcaaagatgacttggttgccagggtcaaggaagctgtcagaggtagtgtgctagtattttgttccaatgcattttcctgccacaaactactgctgtgatgcaaagacaggttcggttacctatgcccaaattcagttctgaatcatctcattctgtgtagtaacaatatccaaataaacaagagtagattctttgtcagagttatgctctgcttggtgttctccaattctacgtttgaatagacactatgcaatatgttctgcttgggtatggcaatctattcgaatgcccgtttctgtatatcatgctcccaacataagtttggttagtatctaactgcttctgttttatcaagttaacgggttagtgttgccaaaagctttctaccaatattactaagatctattttcctaacagataagcaacctgggcagtggatcttgggcggaggttggaatgatgattttgggggagatggtctcccggctgctgtttggctggatgatatctcacctgataatccagtctggctctctcgcatggatggtcatatgggagtagccaactcattagctatgaagattgctgggattgacaaaaacacaaacgatccaattggtggaactatcatacgaacaactgaaggaggtaacacaactaattaacatgggtcttagccctctgattgtaacttaatcagtgaagtgcacttgaaccaaactcaatcacttcagtgagcatttgaaagctatttacttttaaacatagatatgttctcgatgtaaaaataaatcaagaaacttgaaagcaaactgcatggtagctcatccgttgatctaataagtagctacaatgatcagaaggacctaatcataagctttgtatacagtttgtaacaatattcttgtactttatgccttatggtactgcaaaggttcattgaatcttgtggttaggaatgaccaactatctggcctctgttattacttgtagagcctactggtcttctagttaatactgctatgaaacccatatttgatgtcattcaaaatgtttctaaccatgaaagaagagaggctcttcttagagcaagtagacatgccctaatgaggggagtgactactgttgttgatgttggaagttacttccctggggcctcagctgagaaaacgtggcaagattttgcagaaatctataaatgggctcactctatggaaaaatgattttgagagtatgcttattcttcccaatgcccacatggtctcgtgtttccgatcttattagtgaacatggtcgatcgctaagtcagtggatccatctaggtggtgttaaagctttccttgatgggtctctgggttcttcaagcgcgttgttccatgagccttatgagggtgatccggataattatggtctccaaatgacagatttagacagcctacttaatagaacactagaatctgacaaatctggactccaggttgccatacatgcaattggggataaagctaatgacatactactggatatggttgacaagattgttgatttaaatggagcgaaggaccgtagattccggatcgaacatgcccaacatctggctccaggtgcagcaaaccgctttggcaagcatggtaccattgcatccgtgcagccagatcatctactagatgatgccgaccatgcttggagcaagattggggtggaaaggtctgagcgaagctcctacacatttcgatcactgttagatggcggtgcgcagctagcttttggttctgactggcctatttcagacatcaaccccttgcaagctatccgatccgcagtgttccgcaagcctcctggatgggaggtcccctggatccctgcggagcgcttgaccctggatgaatcactgaaagcgcacacgatgtctgctgcctacgcctgcttcctggaccacgccgtgggcagcctttctgaagggaaatacgccgattttgtggtggtaccttctacatcgtgggacgaattctccagcgatttgccggggcatgtcctggcgacgtacgtgagcggcaggcaagcttatccatgacagatagcagttgtgtaagtgttggagaccaaaaagagcagcgcggacagtccggccctgaggccggaaggccggacgatccgcggtccggacagtccgcggtgatggcgcggacggtctgcgcgtgcgcagagtcagttaggatttctagtttctcgcgggatttgttacctaaaaccgcgggattaactcggaaatctgttggaagcggatccagacctcccctttatatcgatgaagggctacggccgattgaactccccaacaatcgaacaaatcaagtctatttctcgtttttaccttacgcattaggaatagttctagtctagttctagtttagcctctcaatc

SEQ ID NO: 26526 - DNA, 228 bp, Zea Mays
catataattacagagtgcatagagataaatgtaattattacatagcggaagtctacaaaataaatgataaatataaaacgaactaaatcttatttccctggcaccacaaagctgactgagagacgcctcctagattatgtcgtactcctcgttgggcggctcctcttgaaccacatgttcttctcctgtggggtgtgtgagacagcaagggtgagctcacatacgttc

SEQ ID NO: 26527 - DNA, 2029 bp, Zea Mays
gaaagatcctagctttataaacttgtagatgcatgtcatgcggccattccatttgatttgctgacgaacatctctcagcgataggatacactactgttcagttagccataggttgtttcactacagaactcagtagaaatggagttcttcacagagtacggagaggcaagccagtaccagatccaagaagtcattggtaaagggagctacggagtagttgctgcagctgtggacacccgcaccggtgagcgggttgctatcaagaagatcaatgatgtgtttgagcacgtctcggatgccacacgcatactgcgggagatcaagctcctccggttgcttcgtcacccagacatagtcgagattaagcacatcatgctccctccttctcggagggagttccaagacatctatgttgtttttgagctcatggagtcggatctccatcaagtgatcagggcgaatgatgacctcacccctgaacatcaccagtttttcctgtaccaacttcttcgagctctcaagtacatacatgccgctaatgtattccatcgtgatctaaagcccaagaatatactggctaactcggactgcaaactgaaaatatgtgactttggacttgcccgtgcatcattcaatgatgccccttcagctatattttggacagactatgtggcaacaaggtggtaccgggcacctgaactatgtggttcctttttctccaaatacactcctgcaattgatatttggagcattgggtgcatatttgctgaacttctcactggaaggccactatttcctgggaagaatgttgtacaccaattagatattataacagatcttcttgggactccatcatctgagaccttatcccggattcgaaatgagaaggccaggagatatttgagctgcatgcggaaaaaatatcccgtgccctttactcataaatttcgacatgctgatcctttggctcttcgtcttctagagcgtttgcttgcatttgatcctaaagaccggcctagtgcagaagaggctctagctgatccatactttgcatcccttgctaatgtggaacgtgagccatcaagacacccgatttctaaacttgagtttgaatttgaaagaaagaagctggccaaagatgatgttagagaactgatctatcgagagattttggagtatcatccacagatgctggaggagtacatgaaaggcggagaacagattagcttcctctatccaagcggagtcgaccgcttcaaactgcagttcgctcatcttgaggagcattacagcaaaggagaaagaggttccccactgcaaagaaagcatgcttccttaccaagggaaagagtggttgtatccaaggatggcaatactgaacaacaaattaatgaccaggagagaagcgcagattctgttgcccgcactaccgtgagccctccaaggtcagaggatgctgacatggatgatgtgaaacccacaagcttaagctctcggagctacctgaagagtgcaagcataagcgcttccaagtgcgtcgttgtcagaaataaacacccagagccagaggatgatggaatacctgaggagatggaaggcaccgtcgatggattgtctgaaaaggtctccaggatgcactcctaaggcaggactgtccatggcgacagcaatctcgacacaagatttctgtctggtgcactgtaatgccgacgacacactgtttggatcttgtgtacacccacagctagttcaactaagatgtagcactagttcgtccatggaggaagcagaatggacgatgaagtgtggtcagcctgtcgaccatgaggtgttttcttccaatggagtctagggtatgtttgagttctacaacggcttgtgccgtacgaagtgtcagcagtgtacgaggaggaggatatcgttgtcagtacacattttgcctgtctagaaaattatgagtactttctccgatcacaagtacatgtacatccatgtttgtcttaagataaaaaaagaaaattcacaaata

SEQ ID NO: 26528 - DNA, 1002 bp, Zea Mays
caaaatcacttctattgaaaaaagcaaaccctaccccctcttctccccttctctcgacggcgccaccatgccgcctccgccctcaaccctagccgccagggcaacaacagtagcaccgcagggcgtaggtggcagagcagggacgcggattccgactgacacttcgtcgtcaagctctcgccatttgtaactccttgctccgccgacctcgacgcaaactacaacttctcgctcgcgcctatccaggatccgctctcgccatggttgcagggacggacccaaataggggaccaagcattcccttagagtttgcacgcttgctgatgcagtgcaagcctgcaacatgcagaggtgcgctagtgccaggtgcggcgagtcagcagatcaaggaaaccgcccgcggccgccccaggggtccaggtctcctcacggcgacgggagagcgcgagccaatgtggagcggttagttggtcgctgctgccaattgttctgcgcttataaaatttcaagaatgttgcatttgacaaatgactactctcaggcctgcaaactgcacattacaacgtgaagttggttattgaaagggcgcccatagctgcaaacatagctgtgaccacatgatgatgacgatttactacagcaggcacttgcaatgtcaatggagggtggtgcttcaggatctgcagctgtgactgactctgctatggcagaagctagtgcagttgaccctgacttagcgttggcttcctggtgttgatcccaatgatccatctgttaaagatttgttggcatcattgcacaaccagggagagcaagagaagaaggaagacaagtaagacaaaacagaagacgagaagaactgcttcaagctggagtgatgtcgctgtggtgcttttgtgactgatcatctctggagcttttgtgaatgatctagctagctatttgtaaatgatctagttgtgaatgatattataattgtgatacttttgtgaatatataatt

SEQ ID NO: 26529 - DNA, 1688 bp, Zea Mays
cagcccacagggaggaggcctgcaactgcaacggtccagccgcacccgcgctcggcatacggcgcctctcggcctacgttctccgtgggccgtggcggcgtgccgcccatccgccctctgccctcgccccacccggccacccgtcgacgacggtcctccgccctcgccccacccgtcgacgacctcgtctcctccgtgcgcgggcctcggctagctcctgcttggcgctgggtagcgggctcgtcggtgctgggtagcgggctcgtcggtgctgtgcagatccacccgcgccccgccttgttctgtgctgccgcttggcgctgcgtcactgaccaagtgcgtgcctgccagccgaccgacggccagcaccacatttcgcagagccgttggtgctctctcttggctgtcagcaccagaagcacagcgcagagtcgccccagccccctgcgcctgctgcatagtctgccactgcccctcagttgttgtggtggccaagggacgaatcactctctcattctcaatgtggcacagtttcttttcgatgcaccggatagcctctcgctcgggtttgcttggtaggagatgttacagctatgccatgaaagggggcacttcgatcgccggagtaggcgacatcattgctgtcgcatcagggaaaggaggcgtaggcaaatccaccactgcagttaacattgctgtagcacttgccaaggagtttaagcttcaggttggtttgctagatgctgacatatatgggccatccattcctacaatgatgaacctccatgctaagcctgaagtaaatgaagacatgaagatgattccagttgagaaccatggtgtgcgatgcatgtccattggttttcttgtagacaatgatgcaccaattgtttggagaggtaatgagtgctcttgagaagatgacaaggggagttgcttggggggaccttgatattcttgttgttgatatgcccccaggcactggcgatgctcaactatcgatgtcccaaaggcttcggttatctggtgctttaattgtttcaactcctcaagatattgctcttattgatgctagaagaggagccaacatgttccgcaaagttcaagttcctattctgggattggtagagaatatgagttgttttaagtgcccaaaatgtggtgagaaatcttacatcttcggggaaggtggagcgcagagaactgcagaggaaatggacatgaaattacttggtgatgtacctcttgaaatcagcatcagaacaggttcagatgaaggcagccctatcgttatatcatcacccaactctgcatcagcacaagcgtacgtaaatgttgctgagaaggtgactcaaaggctcaatgagctagcagaggagcggcgtatgggcccagaaatcttactttgagacattcaagccacttttctacacaccttctcctgtttgacggtacggcgcaacaaaaaaaaaatgcactgataaatagtgttgttggaagtaaacttcaagttttatcagttgggttggaaattttactcgaataaaacctctgctgccaaccttgtctttgtcacgcatgtccattatctagtattctagtctctgcattttttcatgactcattgagtgataattatatactagtgattggcatggctctgctccatcccagagcagttctactct

SEQ ID NO: 26530 - DNA, 2756 bp, Zea Mays
cctaaatacaccctcgctccgcccaccttctcccacccactgcctcgtattctattcccctgcctccccatctccgccgtcctcgccttctccaatccactagtcgacaccgcacgcgctcgcctcctcccgcggcgtcgccatagggttagggttccggcgacttccctcctttccgcgtcgcggcgaacgccttgggagacccgccccatgtcgtccgacccatcgccccacctcccctcgccggtggccccgccgggcgcggcggaggcggatccccatcacctgccccaacccgccgagccacacgaggtgatgcaccggacgagggccgtcgacttcctcgggcgacgcacgcccatcgtctaccagaacgacaacgggccctgcccgctcctcgccatctgtaacgtcctgctgctgaagaatgtgatcagtctgaaccctgacgctggcgaggtgtcgcagcagaagctgctctcgctcgtggccgagcgcctcatcgaccccaacattgccggacaggataaggacgaggagtatgtttgcaaccgggagcagaacatcgcggatgccattgatcttctcccgcgccttgcaacaggcattgacgtgaatgtgatgtttaggaagattgatgactttgagttcacccgagaacgtgctatatttgatcttcttgatatcccgctataccatggatggatagtggaccctcaggatactgaaactgctaccgctattggatcaaagtcctacaatgctcttgcttctggacttgctgaattcaagtcaggtaaaccaacagaagaaaacaaatatgtggaggaagaaactgttgattttgctgccgcaacaactgcagctttaaagattccatctcccagtgtttctcgtgggagatcgtttgatgaacatactctctcaaactcatcaactgtaccacataaaaggcgaggtgaccttgaggaagaagaggaactgatgagagtcctcaatctatctaaagctaaaagtggggatgtagaagtttcttttgacacttcacatagtcattcatcctccaatattgagacaccacaaaatgagagttttcagtcagaagcactcgagttggtggtggcgacaaaaaaagaggaatatggtaatcacgctacgagtgatcatgtctctatgctatcagtcacaaatgttgctattaatggcagcgaagttgtacccgaagaatcccaagaaaatttgatatctaaagaaccagaggacaatggaataaagaaccttgatatacccattcaattttcagaaactactccttatccgtctcatgaatcctttgctagcagtgaccaccaacctgctattcctacccttgttgaaggtgataaagaaacctgcaaagaacagttcgatgtacaaattcatggccagtctaatgatactgaggtcgcttgtgactcatcagttacaacttgtgaagctgttccagatcatgctacaacagaactggatgtgaaaagtgattctttagataattctcagtctctaccttcaagcattcaggaatgtgaaccaatataccaaggtgaagagcacatacttggcaccacaaatatggtgtatgaaaatcaagagccagtgtatgagggggaggtggttcttgctgagcaggctgacaagattggggaaagcagttcttctggggatgacaaggccacagaacatcaatgggaactgattgataattttctgctgaccactgctaaccagctgactgtctatggtctcttctgtttacaagagggacttaacgaaagtgagctttgtgtcttcttccgcaataaccactttaacaccatgttcaagtacaacggaagtctatatctcctagcaactgatcaaggttttataagccaaactgatttggtatggcaaaggttggatgaggtgaatggagatggcgtttttcttactagcaacttcacaccatttaatgctgaaactccaagaaatgattcatggaatgaacagcaagctatgacgagattatcttgctcaatttgacaactccacttctggaaactctgatcttgagctagctatagcactccaacagcaagagtttgagcggcaaccacaaaggtttcaagctccacagccgcagcagcaacagcaacaacagcaacaaccaccacctcagacgcagtaccagactcaatctggccgaccaggacttgttgttggtccaaggaggtccaacgccccacctccgtccagaagtgaatcgaagaaagagagatgcatcgtgatgtaaaaataccttcaacagaaatgtagaagaaaaagagagaaggaactcattaagtcattatactgtaaagaaatgttttcttctgcggaggcagtgtctgcgtttagtcaccttgagccatctcccatttgagctttttttttggttttactttctctgatgtatgtaaataacctaaacgaataaagtgtagaaacagatgctgtcaaagtgatggccccatgcaatgtgatttcattcatcgccccgtgcaatttgattttttttcgtagccctctgaaatcgattgattctatttcacttgtcacaatgtaacgctaatttttgaattctaaaattgtgggttattttgataacctgtttagttgtatttattttcagaaaagaactacatatttacttttcacgataaatgaaagtttcgtaaaaataaactaaaaataaaggt

SEQ ID NO: 26531 - DNA, 3891 bp, Zea Mays
gaacgtattcaattcagtcaactgagctatagagaggacgaggagtccgggtggtggggagggagaggaccaagaggaaaaaggcacacagcagcaggtggtggtgtggtgccctgcgagtttgctttgcttgtcgatttgagctgccccgcgcgggaagggaagggaagggaaggcaagggaaggaggaccaagaacactgcccctggcccctgcacctgcagcagcatgcaggaagacgccaatggcgccgcctagtattccgaccgtatctacgctgtctccccattccaatgccgagtgttgatctctcagcaaggagggagaaagcagaaggaccggttttgatcttctgagcggttcatggttatggatcgcgcgggttggctctggaggcgcaagtcatcggacaagagccccgggggcagtgacagctctctgtccgtgtcgtcacattccgagcagtgctctgatgatcagggtcaatatcaatcccctgaagccttttcaagaagtaagtatgattacagccaagaaactggagtagcaagatccttgaatggcaagctagcagcaggggtcaatatgaacaattttaatccagagcatggtcaatcatttgaacaacatatatcctccaatgttggagatgaagagatcaaggagaccttggagagtttgaactacaaactttctgctgcactttcgaccatcagagcaaaagaagacttggtgaagcagcatgctaaagtcacagaagaggctgttgcaggttgggaacaagctgaagctgaagttactactctgaaggggctacttgaagcttcttgtcggaagaatgcttctctccaggatcaagtcagccacatggatgaggccctcaaggaatgcgtcaggcaactgcggctggcaagggaagaacaagaggacaaagtccgtgaagtcgtttcgaattctctggtcccgcagtctgaaaaccctgagctccaaaaccatatcgcagagctaaaaaagcggctggaaatgaccagattagaagcgtcatcttccatgatattacagcatgatctacatgaaaggcttcgggcgattgagagagagaacttggaccttaaggccaaacatcaggcaattgagaaagagaatatagatctcaaggccaaactgcttgtacagtccaaggacctgaagatactgatgttggaaagagatctgagcaatcaagtagcagagacagcaagtaaacaacacttggaaagtgttaaaaagattgccagggttgaggcagaatgccgcaggctacagcatctaacgcggaaaacaacactgatcaataattctagatccacacaaaacaattgctgcatggaatcactgactgacagccagtccgaccatggggagcatatggtgggcgttgataacgatctgcaaaattccgattcatgggcattagctttgattgctgagcttgatcagttcaagaatggcaaggatggttcaagaaatattgtgaacaatcctgttgagattgacataatggatgatttccttgagatggaaaggttagctgcattgcccgaatcagatggcacaagctctaactttgaaatggaaacagattctgacaaagctgtcacaagaaacagctccttgaaggtcaaaaatgaagaattgcaaaacaaggtcgcaaatttgcaggaaaagtttgaagcaattgcatgcgagaaaagggagcttgagctggcacttgtggaagttagagatcagcttgagatttcctgcgatgcgctagtggtggcaaagaacaggctggttgaaatgcagatgcagttggactcagcaaatgattccaaactttctgctttggatgatgtggagcgtttagactctgagaggaaggctttggaattgcagctggagtccaaatctgtagaagtcgaggagctacttattgctgtagcttcattggaggaaaatgcagagcagaaagagttggagtcgcagttagaactgatgtccgcacaagctacagaacttcgcctgactgtggcatcactggaagagagaattcaggctgagagagatctttctgtgcagcagaaacaaaacgcagaagccatgttgaatgctaaagaagaactggaagcacagctgtgttcagcaaacactgaaatggggaaactgcgtgacattatcaaagcactagagaatgaagtcaaaaaggagagagcactgtgtgaagaattaacagcacagttacagataaaggttgaagcagctgtcaatgcagttaaagaatcattggaggcacagctgtgttcagcaaatactgaagcagggaagcttagagatgttgttaaagcactccaggatgaggtagaaaaagagaaggcattacgtgaagagcttgcagcaaacctagaagtgaaaacaagagcagcaagaactgctgaggttgttaaagaatccttggaggcacagctgtcttcagcacacgctgaaatgcacaaactggaagagatcacaaaacaactacagaatgaggtagaaaaggagaaggaattctcagcacagttagagatgaaaattgaagtagagagagctcgttctattgagtctgctaaagaatcattagaggaacaactcctgttagtgaactcggaagctgcaaaactgcatgacatggtgtctgcgcttgagcacgatgtggaaaaggagaagtttttttctgcagagctccagatgcagctagaagctctagaggttgtcaaaaaggtattggagtctgaggcggagtctgcacatcaggatgccaaaattctcaagcagaaggtagagtcattggaagcaaaactcgaggagcagatgtcatcagctgacgaattcactgagactttgcagtcagagaggatggttatagagcataaacttaaaacagcagacggggaaatattaaaacttacaaacaaggtgagcttgctccatagggagatcgagcaggagaggttgctgtcagaagagtatgaacagaaatgccaaaagctggaagctcagatgtcaagagatagccgtgacgcaaagctctggcgtcttgcaaattcgaatggagatctgaaggttaagaaggagctcgctaacgcagctgggaagctcgcagaatgccagaagacaattgcttctctggatcgtcaaatcaaatcactgacagatctcgacagtgtggtgctagagcctgaaaggcttgaatccagcagggacatgccactgccactggacttcagaaatggcgatgctgaatttgctatgtttgcggatgacttgtacgactttgaccttccaaacaacgacacaagcttcttttctccacccccgtcgtcgatccagccctcgtctccaccctctgagatgtcagtatttgcaggggggctctcgactcttagcagttacaggagcaaaagagcaattagaaggtgatgaaaggaaggctgcccaaatgccatgctaacaaacagtccatggatgccgccatatgtgtaggtaggtcgatgtacattacagagactgattgttagatttgtgtgatgaacatccattccagcaagctcggtttttgtagcctgcttgatgaggtcttactggtggtcgtttgctgtaaaatgtaaacatggttatcttgtgtgattctagttacaggaaagcaccgagcaagtgcatatttagtgtccactagttaggtaccccgtactagaatatttaatttatttaaatatgaaggaagcatgtcacttatttctctaaatttacaacaatagttaggccctgtacgttgatacgatttctatatattacataaatatatcttattttaattagatagttgtttaaaca

SEQ ID NO: 26532 - DNA, 941 bp, Zea Mays
gcaagaaataatgcttttgtgctgatttcagcaagctttcattagagctatattatgggcctcgaggcccatcgccctcggaataaggcgcggacttacagttccgccgtcggcaaggaaggaaaaagagagcagagaaccctagctagagtttggcgagtggtgcggaggcgcggctgctcctgctcgtcgcgacgtcgaatttcagcgccgcccgcgcgatccttggtctcttcgcccgagaggcgcgacaatggctgggaaaggcgggccgaccaacctggagaaggagcagatgtttgggatggcggagaaggagatggagtacagggttgatcttttcaacaggcttacaaagacctgttttgagaagtgcgttgaaaaaaggtataaagaagctgagctcaatatgggtgagaacagttgcattgatcgatgtgtttcaaagtattggcaggtgactaatttagtaggtcagatgcttgggaaccagcctcagatgtgaaccgagatgcactagttccattttgtagcagaatcctattgctctgtttattctttttggttggtattagaatcccgccacctgctattaagtacaccaatacagcaccagacttgttaatgcgtggatcgctctgaagaaaaatcacggtgtcttgctctttccagtgatgtgcattatctttgaatcatgaacagggaacatgcctgtaataaatttatagagctcgagagtgatcctgtttcgaaagcttgttctctttggtacgttggttcgttaaattctggatgtgtgctcctccgagatgattagagtataatatttttttttctttgcgaatcaagagtagtctatgtatatcatccacagtaaggtccctaggatcgttttttgcctgcgaacattggatgatttcagttattatatagtgtcaatt

SEQ ID NO: 26533 - DNA, 5488 bp, Zea Mays
ccaagttgagattctgtccccagccggccagccctcgcagcagtcttccctgaccgtccacccatcacctcactggctcactcatcactccctcagcacctcggccctctgcagtctgcgtctgccccctcttccaggtcccagcgctgtctagatccagatgggagctccaccgctgcccttctccctgccccacgccgctctcctctgatcccgcactccccgaagtccccactgccggcgcgatccccgcattccctaccgcctgctagccccaccacccgctgaagccgtccatacaggccattgcgctgcccggaatcccggcgtgaacagccgttgctgcagtgcggcctggagctccgcctgttccccgcttccgcccgccaccgcctttcataaaaacagcccctcctcctgcgcctggagtgcggagccgtcaccgctgtctctctccacgggacacgccgccgccgggagggaagaacccgactcccgggcttgaagttgccgcacccccgccgtccgacgtacacagtgggatgtactacattggtctgcttggacagcagttctctttttaatttgtaaatatctctctcgttcttcagttatggccactatagttgaagggtgtgttggtcccagtgagcttcacctgaagaaggaacttattgccttgagaaaggcacgtttcttgcgtgatcccgaaacatgctcatcctggaggtccccgttaagctctaaatcattcttgtcaacttctggtgttataaatcataatgaggtaggcagtagtttgtcagaaaagcgcacagagccagctgcagcaccagtcaaaagtgaaaagaaaagaaaaaacgtttatctctacaactggagacatcattctaacaaatctagtgaaagtggagtgaagttagatgtggacgatagacaagcctcagtagactgtagtctggaaagcccgtgtatttctaacggtatggactctaggagtgacacatgtcttgaagttcctgtcagcatatacagtgttcaaggttctaattcatgcactcctgttaaaagaactgttagaagggtaaggaggagttcattctcaaagaaaggagctatgagaaattctactgtttcaaagttgctagatctccatgtgaattctgctgagcagtctgaggatactgagaactacaactcagagactcatgagcaccttcagaaagtagggtatttttctcactctacatcaccactgtttgctgcatcagggtgttttagctcaacaaatccttctaagctgttgagagtgccaagaagagaaggatcttccttctcttgtactccggtctccactagctcctattacaggtacaaagggaggaatcctagtactgtaggttcatgggatggaacaactgctgcttcacttgatgacgatgggctgaaccaaccagaactgttgacaaatcagaggtgtggtattccttgttattggtcaaagaggagtaaacacaagggatctgaaaggagttgttctccttcactttctgatacacttagaagaaaaggcaccagtctattgtgtgggagtcaaactatgcatgggagaaagaaatcatcaggctccaataaatatggatatcttaaaaaatcttcccaaggtgtaccactgttgggtgatagtagtcattttgcttattcgtcatttgattcagctagtgatgaagtttcaaccatctttggagaattagatctggaagctttgagccgtttggatggcagaaggtggtcaagctgtaaaagccaggatgggattgcactgtctgtgagtggagctgatcatgtagtttcagatcacagaagcttgagccaaaaatatcgaccaaggtcatttctagaaattgttggtcaaaactttgttgtacagtcacttagtaatgctatcgcaagggaaagaatagctccagcatatctgttccatgggccccgcgggacagggaaaacatcttctgcaagaatactttcagcagctttaagttgtactgctactggagagaccaagccctgtggagtttgtactgagtgcagtgactttttcactggaaatggaactaatctaattgaggttgatgctaccaacagaaaaggtataaacagagtacgccatttgattgaaaatataccagcatctgcaacttcttcacggtacaaagtatttgtcgtggatgaatgccatatggtatcttctaaagtctggtcggcatttatgaaatttcttgatgaaccattacctcgcgttgtcttcatatttataacaatagaccctgaaaatcttccccgttctgtcgtatcacgttgtcaaaagtacatgttctccaagatcaaagacattgacatagtatgccggctgaggaagattgctatgaaggaaaaccttgacgttgaattggctgctctagatttaatagcactaaattcagatggatcattgagagatgcggagacaatgttagatcagttgtgtttactagggaagaagataacaccatcacttgtaaatgatctggttggggttgtgtctgaggagaaactccttgacctattggagatagccatgtcatcaaacactgctgaaacagtcaaaaggtcgagagagctgatggattctggtgttgatccaatggcattaatgtcacaattagctgggctcataatggacatcattgctgggacctatagattggcagaccctacatgcggtggagatggaattggtggtcgaaatataactgatgctgaattggaaagattacaacaagcgttgaggattctttctgatgctgaaaaacagataagactttcaagcgagcgttcgacatggttcactgctgctttactccagcttggttccggtcacaattcagaaataactcaatcaagaagcagcagtaagcaaagcgctaaggcaaccagcgaaaccatgatggaagcaatgagagaatcttctgcaagcaggagtacagctcatcatttatccacttttcctgattcaaagaaaatagtggatctgaaaacaaccagtgggcactccagtcctcatgcttcactgtcctccaggatgagacacaatgaaaacatgatttatgccgagcatatgtctgttgatagagcattattggattctgctcaaacaagtatttcttctgagcaaaagggtatgcatagtggaatctcagataaccttacccgaatttggatgaagtgcatagagaattgccactccaagacattgcggcaacttctctatgatcatgggaaattaacatctgtcaaagaatgtgaaggtaccattgttgcttttatagcatttgaggacaatgatataaagtttcgagcccaaagatttattagcagcatcagaaattcaatggaaactgtactgaaatgcaatgtggaagtcaggatttgtttgatgcaagaatttcttgctgggggactaaagcatgagacatacccagatgagacagctgaatctgatgtcttgagttgttcaacgaacagtgaacgtcgaaagggtgttctgaatctatcaggtgctggtggagtgcagccaaacaatgttcccatgatcatctctgaggaaacttcaggaatgcatagaacaagagggcaggatgtttctattgaacagttgaaggtatcagcttttgatgaacaaaggttagagagtgcatggctccaggctgctgaaaaacccatgcctggtatgttaaatcaaggtagacctgagagaaatcaaattcttccacaaaatggtggtcagcatcatggtaggtcctcaatggccaccgttgttccgtcaaggcatgttgacaaggatctatctaatgaactgaaagccttaaagatcagtgacagtcatggaccccataatggtcaagatgtacagatggagagtggttatgccatttcaccaagccttttgcatagaaataaccatttggcaaattgtgacaatgagagcgttgtttctgagtccggagcacccggttgccatgggctgttcccatgctggaaaactgaaaaaacgaaaaggagaaagggaaaagggcagacacggttgaggtcatcttaagttggcaattgacgacgataaaaggagcattgtggccctggattgtagaggaacatttgaagagatgcacgtgcctcacgaaactgccttacttcatttcttctagaggatttatgaagaccaattcgttattccatgcatttaatgctgccgctgagggttcagcattctctacgcgtggactcagcagagggtgataaaaagttgcagagatgttggacatgcggattttaacaagccattctgatccatctatgcttcttgtacagacatttggatgctgaggcgtatacgtgaagcggtcagcaaaattaggaaacattggttagcgagttaatgaggcgcaattatttttcagcatttttagtactgtgtttgacagcatttgaatttactttgcatttgttattgtaccaattcctttttttttgttagaacaaaggaagaccttgcgtcgataagctgtggttttatcaagtttgtacaaaaactggttagctcctgcatttgtgtagacttctttgtcatttcgtgtcggttgtttaaaaccctctattctactactatgctaacactggatattctctatctaatctatactccaacagcaatcaactgtggtgttgacgttgctgtaggccctatttgtttccttgataaggtgataatggatcacaatccaaatatttattgacaataagttaaagactttaaataagtttagtttaaaaataaatggaaatagaatctgattctagatccttaaattttatagtataaaatttataactcattaccacctttatttttaggattatataatctagcttgtgaattatttaagtacctattgacctgcttatggattatcatagtttagatatctagaatacataattcacctaataatctgtgttgtttatttacctttcaatttatttaaactagattatataatctagaggttaaacagggccttaataagccgtgtttatctcaccataaaacacataatatatatgttggggaccttcggcgtccgaaggtcctcaaaaacatgatttaatagtgtttctggagtataatgtgcaaacaggtatcttcggactcgaatcggtatcacagagggagaagctcaaagcatacgaaggttgatacagcaccgaagctgtgagcagaaaagcttcggcatggtggcaggaaaggaaaccgacttaaagatgaaaaggctattcggacctcgatggattactatagagttattgtcagatgtaaagggcataaatgtaattttgtaagggctgtgtcccgtgtctataaataggtgaacagtatccccgtactgttcac

SEQ ID NO: 26534 - DNA, 1021 bp, Zea Mays
ggccgttacgctctcgcctcgctacccccagtcccccacccccacacgcaccactgccatcaccccatttcaaactcgaaccacatcgcgccgtgagtccgaaaagatccccgcctcgagcatcgatcgaccggaaggagaaggcaagacgccgggacgttctctgaatcggaggcgaggcggggaggggatagaatcggatggtggaggctggcgcgagcttcatggataaggtcgaggcggcggcggacgacgtcgtcatcgacggggcgggcgtgggcgtcggggacgcaggggaggaggaggaggaggagatggcgcccgtggagcccctcccggagcctctcgacgactgcgggcccgtcgcgtggcccatgccggacttctgccctctcacgatcgatggggcgctgaaggagtcgttcctggagactctacggaaggacgcggcggaggtcgagcggcctgcgcgagaaggggcggaggagggggaggaagcgctcagcccggactcgcggccgtcgagcagcaagcgccaccgcgcgggcaccgcctcgccgtcgtccaggagcagcccctaccgcaacatcctgcacgtgttccagcagtgcaggcaggacgccgtcggggagactcccaccaagaattactgaagcagacgagcgcaacggggcaggatcaggccgcggcgcgatgtcacggccacggcttttcgccgcttgcttgctcaagaataacgcttgccatgttcgtttagtagccagccgtttgcacattgttcttggtgtggctgaaaaggggtaggggagttcttaattcttgtgtaaacatcggatatagaagttacaggacctcagtaaaaaacgtcatgagaaatgcaacttgataattttcactagttaggctagttcgagcagcttacttattcttatcttatatttcaaactccactttgtaacactttataaacaatgagtgttttacaagatcatatacatgatctactactatagccttacaa

SEQ ID NO: 26535 - DNA, 1391 bp, Zea Mays
cttctgtcctggagaagccaatctagtctgtctggcggcaagcgcttattgatacttaacttccactacataacagtggatcacactaaccgtgaactgatttttctgaatggtatatgtataacactggagcatagaagtgataaaatgttaggtatccagaccgtattaccttaatacgaggaaaccatgagagcagacagatcacacaggtttatggattctatgatgagtgccttcgcaaatatggctcagtcaatgtctggagatattgcactgatatattcgactatttaagtttgtctgcacttattgagaacaaaatatttagtgtccatggaggcctttctcctgctatcacgacactggatcagataagagtaatagaccgcaagcaagaagtacctcatgatggggctatgtgtgaccttctatggtctgatccagaggacactgtagatggttggggactaagtcctcggggtgcaggattcctctttggtggaaatgtggtctcatcatttaaccattcaaacaacatagattacatttgtcgtgcacatcaacttgtcatggaagggtataaatggatgttcaatagcaagattgtaactgtatggtctgctcctaattactgctacaggtgtggcaatattgctgcaatcctagagctggatgagaacctgaataagcagttccgcgtatttgaagctgctccacatgaatcaagaggtgttcctgctaagaggccagcaccagattactttctgtgatgctacacagcgaacgcttgagcttactgtgctttcaagcgctggacctcatgttgcaagaagagctcaggccctacagctttccagccaggaggtggttttcaggatgtgtaaattgagtgtcatcttctcccttcaggtccatgatttgtaagagagttggattttggcatccagttttttcacagaacatcacccatttgagctggagaaatacgcccttgcgaaggggtttcatgtgatgtgctaaaagtacacgttgtaagatttttttgcgattgcataccccctagaaaaaccgttcctggaatatgtggcaatcaggaaatgtgtcgatgctctggaaagtgtaggagatttttgtagtagtcatttgcgcgtgctgttagggactagggagcatgtggtcaggggacactagcactagcttgtcggcatgcaatggtgtattgtaactgtctttatgcagcatctctaattcaaatagctaactacatttgatgtcttcttctgagctgtcgtgttcatataaattcgttttattggatataaaatatatgatttaataatgacacttagatgttcacaaaatccatcgtcgtatgctcttctgtgtag

SEQ ID NO: 26536 - DNA, 1087 bp, Zea Mays
gagctgcaattattctttggttgagtcagtttctgaatgaacatgaaaaaaacatatagagagaaatgtcagtagctctacatagaaaatatggggatgggggattgtatcaaaattagtaagggaggcttacctttgagtttgtctgttggacttggtgcaaaaaaatatagaggcagagctaaaccgactaatacctttcatactacatacttgatcagaaagatgaggcatcgttctgtgtgactagggatgtgaccctaacagggattggctcattaaacattattcttctttatttctgctttactctctagaaaacagaatggctttactctagctgcccttttttgtccgtgattacaccaatagatttttttcctgtagttgggtgaatgttgttcatcacatataacacgcgagcaataagtttatgaacatgttcattatcagtttatatgcatcttcattagtattaactttgtcagtgcttgtgatatgtgatggggactccacgaggtcattttccgagcgctgatgtgagctacgatgcctactgcaatggtgcttgtgtttggtgtttcttgtgatgcatctacattcagtcaaataggtgataggggtcagtcttcaaagttgttaatactatctctgacttgatgacttggaacttcatctccttttttttcctcaaagtgtgaggtgatgactctgcatgttcttaatgctgagtattttagttgttctgtatcatattgtttggatctataataacaaccttacactcacatatttaggcataagttgttgctcgggtgtaggccggtcaacagcggcgaaggcaaacacgatgactgtgggatggagtttgggttgcccatggacgtgcaacgcatggtgcacatcatgtttgataggttttatgagttcctggggctttcctgttgatttcgagccaaaatgccccatcgtgctcccagtgtgatgcatgtttattctccctcatcaaattgttatcgagttcacgcttctagaaatctaattttctttttcagaatttacttatgcaataacatgaacccttttc

SEQ ID NO: 26537 - DNA, 1224 bp, Zea Mays
aaaccatggcctccccacggcaactaaccatcatggcctcaccctcactccctcacggtcgacgccaaacgctagaggtagctgcctagcaccaacaaccaatcgtctcctccagggcctggtcgcccgcgctcgcgccagtgctgcagcaggctgaccctttgccagcttggtcgactccttcatccttcggcgtggctcacagcagcccagcaggcggtggccacagcaggctagccccggccaccctgcacagcgtgcccagccccggccgcatgctctcagcagaccagcgcagcgcccagcaccagcagccggccgcccgacgcccatcctcagcaaaccagcagccggaggctgctttacatgcctttgggaacatctgtggtgttggtagacaagaagatcagatgaaactggatagcgaagccgaggaaaacttgaagcgcttggtctatacgactgcagcaaacagtccaaaattaaccccttcagctcttctactatcagttctgcaacaagacccagacgttaggatagctggctacagagtaataacaggactggtcatccgggaatggtgcttaagggaggtttgcttaaattcagagataatcagatttgttacggatccaacaatggagacaacaaaacttggcatggaaacccggtatggctgctgtgtggcaatcaacaaggccctatcatcatcccatcttctgcatgaagcaagtctttctgaactcgttgggaagttgaatgatgcggtgaaacggggcccttacctttctgataggaagcgtgtggaggcacggccggtggttgatactgcagagaggttttaaggtgccctcgagtattcacccaaagtaaacgatcactctcacagcgtagctaggaggtaactgagcgtgccctgcgtctcatacggttggcttatgggtaacagacatatatatgatgtacctggacgatggggaggacaatgtgtagttgaattcactgagactggcacaatacctaaacttacaaagcaaagatgttgtttcttctattttgctttgtggatgtcttatgcagcccctacctgcgaaagaaaatcatctgttgcaggaccgtgccaaattttgatgaaattgcagatgcagccggcactaatttttcatgtattgaatgctcaatcgaatcaggtaatttctcagtattatatctaaacctaaactg

SEQ ID NO: 26538 - DNA, 978 bp, Zea Mays
atggtgctgtgggtcttcggctacggctccctcatctggaaccccggcttcgacttcgacgacaaaatcctcggcttcatcaagggctacaaccgcacctttaatctcgcttgcattgaccacagaggcacaccggagcatccggcgaggacctgcacgcttgaaaccgacgacgaggtgaggaaggtgctcaacagaacaaaggagaccaagatcactgaaagattatgttcccctgaatataaatcactgagagtttattgttcctggcgatgcagggtgcgtgaactcttctactacctcaagggtgagcaggtggactatggcgaggagcacagcaaggcttgtggccacaacaggtttgggagaatatatcacacagggcactatcctgtttgttacgagcacaacccagtgcattttgtggggcactctgttggcacacaggttgtgagggtgctgcatcagatgcttgccgacaagctaattgcacttgatatgggtgcattaattgctggtgccaaatatcatggagagtttgaggacagacccaaggctgttctcaaagaagttacatattctgatgggcagaccattcttttcattgatgagattcacaaattgcaaatgccatggctgcaaaaagcaaagttgctattgcgggagctgaaaactgtgaaggcagatttatcttttgcaaaggaacgctatgctcagcttgaagaagagaataaaatgttgcgtgagagttatgacatgggtgataatccagaagctaatgatcaggttatgttcctcaagtttgagcctcgacaatgcatgcttattctggcatcccgatttcttactgctacatttcgccctcttgcagtcaggttacgagcgcctttgctgcctaaggtgcatacaaacgtgaccaaaggaatcaccttgtgtgctctcagtgggcttgagagtagcatcatccttcaaacatga

SEQ ID NO: 26539 - DNA, 5603 bp, Zea Mays
ccgactcccaactcccgaccggctcgcgagctatctcggggacacaaccgactgcctcgcgcctcttcctcatccgtcgtcaccggttgcttcccaccgccgccttgcgcctccatgctctcagcaatgatgggaatagaaggcattgcagccacagtcaccgaggaccctgaaccctcaattcctccaggatttggaccttttgctgcctcggcatcatggggaatccaaaacgatgttaaacctgctgatgatcattctagttctgttttagcattacagagcatcgacgacgatgtggaaattttggaatatctatccagttcagtggatcaccagagtgacacaggttgctgtatttctgggagcaatacctgtaggaaatcactgcgtaatagacctccaatagattatagccgctttgatcagattgcagatgaagattctgatgctgaagtagcagacaagggtgtaaatgcagtgaaacacagacaacaattccctaaaggagtacttcgaggatgtccagaatgtgccaattgtcaaaaggttattgcaagatggaatccatctggtgcacgtaggcctgttcttgatgaggctcctgtttactatcctaccgaggaggaatttcaggacacattaaaatacattgagattatccgcccaacagcagaaccatatggaatatgccgtattgttccaccagcttcatggaagcctccatgccttcttaaagagaaaaacatttgggagtgctcaaaattttctactcgggtacagaaggttgacaagctccaaaatcgtaaatcgcccaagaagagcagaagaggtggaatgatgaagaagcgtagaaagatttcggagactgaagaaaacaatcaccatcaaattggaatgcagcaaaaccaagagagatttggatttgaaccaggaccagagttcacactacagatgtttcagaagtatgcagatgacttcagtgatcagtattttatgaaagataaatgcagagattcaccaccatcagtggaagatattgaaggcgagtattggcgcatagttgaaagaccgacagaggagatagaggtaatatatggtgccgatttggagactggaacttttggcagtgggtttccaaagttatgtcctgaaatgaaatctgatgtggaggataaatatgcacaatctgggtggaatctaaataacctgcctagactacaaggttcggttctttcttttgaaggcggtgacatttctggtgttttagtgccttggctttatgtcggcatgtgtttttcatctttctgctggcatgttgaagatcatcatttgtactcactgaactacatgcattggggtgctccaaagatgtggtatggagttccagggaaggatgctgtgaatttggaggctgcaatgaggaaacatcttcctgagttatttgaggagcaacctgatttgcttcacaacttagttactcagttctcaccatcattgcttaaatctgaaggagtaccagtctaccgatgtgttcagcatgagggagagtttgtcctgacgttcccacgggcataccatgctggttttaattgtggcttcaattgtgcagaagctgttaatgtggcacccattgattggttgccggttggacaaaatgctgttgatctttatcgtgaacaagctcggaaaataactatctcccatgataagctgttgcttggggctgcaagagaagcaataagagctcagtgggacatcctatttctcaagaggaattcttctgttaacttgaggtggaaaagcatatgtggacctgatagcacaatatgcaagtcactgaaggcacgaattgaaatggagttggtacaaagacaaaatatatcctctccatgtcaatctaggaaaatggatagtgagtttgattctactgatagggaatgtgcattgtgttactatgatctgcatctttcagcttcaggctgtccatgctccccagagaaatatgcttgcctggtacatgcaaagcagctttgttcatgcgattgggacaaaaggtttttcctatttcgttatgatgttaatgagttgaatatcttagctgatgctttagggggaaagctaagtgccattcacagatggggtgtctctgatcttggattaagtttgagctcctgtgtcaaacgggaaaaggtccaagattccaagactgttcgcagattaactgatggcccaagacggtcctacatgtcacaggcatcaacagtatcattgattccttcttctgttagcactgaacagaaaaagaatgaagataagacactggatttaggttgcccaggtatgaatttaccaaaaataagtccggaggcaaataatctgcgtccttcgacagaacagataaaatcagaaaatctctcacagctaaaggaaccatgtgtgaagaatgaattatcttgtccgaccagcaatggtaccagccaagaacataaaggagggattggaggccacaaacttgcagcagcaagcatgatggttctttctggtcaatcatttcctgcaaatgctggtgaatcagtgagaaatgcgcatgtcttggcagtatttaaagagggtagagactgtacatcttcacttacacttagggagtatcataacaggccagtgtcaatgattgataatggagctaacatgaagctggatctggaaaacatagacaattctcatatgttgatgtcatcaccagacttcaatgcaactgtatgtcattcttacaaggatcaaacattcttaacactggaaactaatacctctgtgatgactgagaaagatagcagtcaggcccgtaatgcaagccagcagtttgtcagtactgctttaagaacacaaaatgtgtctcaggaaccattgtgtaccgcgattgctccaaagcaactcatagatcctcaagttcagaaaaaatcatatggtgtttttggttctggcagtgcccatcttgggcatctgactgttggtaatcagcaactaaatgagagatggcatcaaagacaatctgattctttatccagtgtggaagttagagctaggggtcattcagctatgatagtgcagcctgctctggaaaatcacagcagaaatggagttgcacagaagggtcctcgcatagctaatgttgtacatagattcaagtgctctgttgaacctatagaaattggtgctgtgttatctgggaagttgtggtcctcaagtcaagcaatcttcccaaaagggtttaagagcagagtaaaatacttcagtgttgtagatccagtacaaatgacatactacatatctgaaatattggacgctggacagcagggaccactttttatggtgactgtagaaaactgtcctggtgaaattttcataaacatctctcctaccaagtgctggaacatggttcgtgaaaggctcaatatggaaataaggaggcagctcaatatgggaagagctaaccttcctacactacagcctccaggatcagttgatggccatgaaatgtttgggttgttaacaccagcaatagttcaggcaattgaggcccgggacagagattatatctgtacagagtactggcgatcaaggccccatgcaacaattgagaatcgagacaatcagaatatgtcacctcaggatccaccccttgttgcactgagggggctcttccagcgggctaattgtgatgaactgcgagcactacgcagtttgctgatgagcaatagaattctgggcgacaattctaggcagcaggcttgccaaatccttgatgaggagattgcgaagcaatggcactgaccagcgtaaatacaggatgttgtactaaccaattgtttggcatgattttgttttgacgggataaatcagttttaaggcttgcttcttccgttgcccttgtgcccattcttttcattcttgtgaccatacccaattctttattgcaagtggtgtcaacaagcatgaggctacagctgcatcacctgcaaggaagtcaaaaggacttattttaagtaaagctttaaaggcgcagaaagacgtcaaagatgcaagtgctcagatggccataggcaacctgtagtctgaagttattgggcttcaccgtgatcttgaagaaaaagaaataaagctaaatacttttgccaaagatctgattgaagaccacactaagttctagaaatcctctaaagagaaagacaacaaaatttcgaagctagaagttgacaactcgtagagcatgaaacacattgcagagcttgaggcctagataaaagagcaagttgtagcacacaaaggcaaaatggccaaattgaaagagaaggtcaaagatactagtgtaatttttgaggttgaaaaggtgaagcataaaatttctgataatgagagaaccacattatagaaaattgttgatgaactttgggagtctagcgaagaatgcttctactccactgcccagtgttgtaaaaaatttaaaaaataccttcgtctccataggagcattttcaagtgaaaaagaatttgtgcgcggcgacgcctctagtgcggtgaagtggataggagaagtggaggccttcgatgaagtattatccacccgtggtgattattgtgcgtgtataggggcacacgttgcaactttgctgcttgacaaggctagatgcgagcatgtaaaagttgccagctagccagagtttaaatattatgttgatgacaataagattcctttagctgaagcaaccgagcttgggagaaagttttataccgatgtctggcttggtggagggaagaagttagtagatgaagttgctagagaaaatgtaagaaatgtttctttttatcgtttatttttctgtttcgggacttagaattttagtgtttacacaaagactcacaagcttacaaaaaaggcggaagcaataaaggaacctttaagattaaaggaactcgaagatgccctttcgccagaacccaaagagtacaatccagatgaagattcactactgcaggattggctagcacatctggacatgttgtataaaacagtagacaaagttgttgatgatgttttcaataatgttcccgaaagagttaccttttcgaaatagtatatgattattataagggggcttcggcataaaggtcttctctcatggcaaagacatacagtgtgaagatgtaacccgaaggtgataagaatggtcgccgaagctatagccaaagagcttcgacttaatatggtgacgaagaccaaatatgatgctgaccgaaaggggaaaagactatttagtccttaatgattcatgttatgattataaatagatgccagggacataaatgtacttttacctggaatgtgtcccgtgcctataaatagataaacagtagcaccgtactgttcacgctgaattatagtcactctctcgcgtcttcagcttcgagcaagccgaaggtatcaatgtaatatgaattatgttgatattcatacatgttttatgggatgcaaatatgaatgaattaacaagatacaattactatcttcatccttttgcatttctgttcacatattaaatgaa

SEQ ID NO: 26540 - DNA, 577 bp, Zea Mays
ccgtattgttgaaggggagacaaaggtatctaagttggggaaacttcagtgtaaaagtgagggtagctccaaacaagatcttaaagcagaagacctaaggcagatgtttcttgccatgactgaagaggttcgtgtgatcattgtcaaactggcagataggttgcataacatgcgcactctcacacatatgcctcagcacaagcagtatgccatcgccatggagacactacaggtctttgcccccctagcaaaactccttgggatgtaccgtataaagctcttgtctttgtagtctgagctggaatatctatccttcatgtacgttaaccccactggttttgctgaactaagaaaaagagttgaagacttgtacaaggcccatgaacaagaattggaagaggcaaatagaattttaaggcaaaagattgctgatgatcagtttctcgatcttgttagtgttgaaacaaaagtgcgctcagtttacaaagagctctacagcatttacaaaactacactcaaatccaagagttcaataaatgaggtgaatcaggttgctcagctgaggatcatcataaaa

SEQ ID NO: 26541 - DNA, 5424 bp, Zea Mays
agaaggttgcttcgcagcagactgctgaaggccggtggtcaggcggccggacgcagggtggggcgtgggggacagggagggtctccggccaggcaaattcggctcagggtggcagccaaacaagcccctgatgccggagcagtctagatccggcgccccgatggagtggacgacggtgcagcacctggatctccgccactccggcggccgccgcggtgcctcggcccgccctatgcagccgcacgccgctgccttccgctcctcccaggccatcgtcgctgtggccatcggcacccacgtcgtcgagttcgatgctctgtcgggaagcaagatagcttctattgaccttggtgcccgtgttgttcgtatggcatatagccctacaactagtcatgttgtcattgctattcttgaggatgctacaatcagatcctgtgatttcgccacggagcagacacttgtgctgcattcgcctgagaaaaaaacagatcatgtttcaatagatactgaagtccatcttgcattgacacctcttgagcctattgtattttttggtttccacaaaagaatgagtgtaacagggactgttgatggagggagaccgccaacaaaaataaagactgatcttaaaaaacccattgttaacctggcttgccatccccgcctccctgtcttgtatgtagcttatgctgaaggcttgatacgcgcctacaatatccagacatatgctgtacactataccttacaacttgctgttgacagtacaattaagctaattggagctggtgcttttgggtttcacccgaccctagagtggatatttgttggtgatagaggtggtactctcctggcatgggatgtatcaactgagaggccaagtatgattggcattacacaggctggttcccatcctatcacatctgtatcctggcttcctacactgcggctgcttgttactatttcaaaggatggagcactccaagtgtggaagacacgagttataataaaccctaacagacaaccaatggaaactcatttctttgagcgtgcagctgttgaaacaatggatatcacaaaaatactaactcttcaaggtggagaagcagtgtacccattaccccgaattaaaaatttggcagtgcatcccaaattcaatttggctgcagtaatttttgcggatatgtctgggacagaagctgcaaagaacaaagctgcatacacaagagaagggaggagacaactttttgctcttcttcagggagctaggggatcaactgctgctgttttaaaggagaaactattagccttgggatcatctggaatattagcagagcatcaacttcaggcacaactacaagagcagcacttgaagggccagagccagctgactatttcagatgttgcaaggaaggcattccttcacagtcatttcatggaagggcatgctcaaagcggtccaatccctcgcctacctcttgttacaatttcagattctagcaaccttttgcgagatgttcctgtttgtcagccattccatctagagctgaatttcttcaacaaggaaacccgtgttgttcagtatccagttagagctttctatttggatggatttaacctgatggcccataacttatcatctggggctgacaatctctataagaagctttactcaacgattccttcgaatgtggaatgccatcccacgaatatgtcatacagcccaaaacagcatttatttcttgtcgtgtttgaattaagtggtacaaatggagtggtacatgaagttgttctttactgggagcagactgatctacagacagtgaacagcaaaggaagttccataagaggtcgagatgctgcttttttgggcccagatgataatcaatatgctattctggaggaagatagaactggtctgaatctctttagtctcaaagctgtagctacaaaggaagctcttgaaaataatgctgctgtgcttgaagaaaacacttttgctgataatgctgctagtgctacctcaacggaacgtcaaggtcctctacagtttacttttgaatcagaggttgatcgcatattttcttctcctctagaatcaaccttgttgtatgttatttctggaaagcatattggacttgcgaagcttctgcagggatataggctgtctgcagacaacgggctatccattacaacaaaaactgatgggaagaagtttattaagttgaaaccaaatgagactgttcttcaggcccactggcaaacaaccctaagaggtcctgtggtaggaatattgacaaatcagagggtgctaattgcttctgctgatcttgatatactatcaagcagctcaacaaagtttgatcgtggtctcccatcatatcggtcaatgttgtgggttggaccagcacttatcttctcaagcgcaactgcaataagtatgcttgggtgggacaacaaagtccgatcaatcctctccactagcttccctcgctcagtattacttggtgcattgaatgaccgcctactgcttgtaaatccgacggatataaacccaagacagaaaaagggagtggaaataagggcctgtttagttgggcttcttgaacctcttctcattggatttgctaccatgcagcaacacttcgagcaaaaacttgatctttcagaagtcctgtaccaaataacctcgaggtttgatagtttacggatcactccaaggtcattggacatattaactaaaggacctcctgtttgtggagaccttgctgtatcattatctcaagcaggacctcagtttacccaaatcatgcgctgcaattatgcaatcaaagctctccggttctctactgcgctgtcaattttgaaagatgagttcctgcgctccagagattatcctcaatgccctcccacttctcatctgttccagcgtttccgagaattgggatatgcatgtataaagtatggtcagtttgacagtgcaaaagaaacttttgaggttattacagatcacgagagcatgctggatctatttatttgtcacctgaacccaagtgcattgcgacgccttgcacaaaagttagaggaatctgctacagattctgagctgaggcgataccttgagagaatattaagagttcgttcgactggatggacacagggtgtattcgccaattttgctgctgaaagtatggttcctaaaggccctgaatgggcaggaggaaactgggagatcaaaacacctaccaacattaagaatatacctcagtgggagcttgcaggagaagtcatgccttatatgaagacaactgatgctggtatcccatctgttgttgcagatcatattggtgtgtacctgggtgtgatgaaaggaaggggtaatgttgtggaagtaagtgaaaagagtttggttaaagctatagctgcagctagcagtgagaacacacagccggtgtcttctgcatcagcagagaaaagtaaggcaattcctcgtggtgattcggttggtgatactttggcaaggcaactgggagtccagattgcatcttctgatgaacaggcaaaagctgccgaggacttcaagaagactttatatggtgttgttgatgatggaagtagtgatgaagacgagtcaacctcaaagactaaaaagatacatataaggatacgtgataaaccggctgcacctactgtagatgtcaacaaattgaaagaagccactaaacagctaggcttgggtcctccgctgagtaggacaaggtcattatcagggacacctcaagacttcaatcaggctcctacacaaccaggaggtccagccgcagctgtttccccagcaatgccaaattctgcgattgatttatttggaacaaatactttagtgcagccgcaagcaccctctagttccacaggtcctgttattgcaggcatgggagtgacggctgggccgatccctgaggacttcttccagaacactattccatcgcatcaacttgcggctcaactacctcctcctggaatagtcctgtcacggatggctcaacccgctcctggcattgaacaaggccgaccagtacctaatcaaatgatggctaatgttggtcttccagatgatggggtgccaccacaagcaccaccgcagcagtcccagtttcctccgcagcagtcccagtttcctcagcaaccaggcattcctatggattctattggcctgcctgatggtggtgtccccccacagagtcagccacttccttcacaaggccagtttcttccttcacaggcacagggctttcaacttggtattcctgctccatcacaaccaattgatctcagcgctctcgagggtcctggagcggcgaagcaagctgctcgccctccagcacctactgctgtgcggcctggccaggtaccacgcggggcccctgctgcagaatgctacaagatggctcttgctcatcttgagcagaatcagcttaccgatgcactatcttgtttggacgaagcattcttagcccttgcaaaggaccagtcacgtgaagccgacatcaaagcgcaggccaccatttgtgctcagtacaagatcgcagttgctctgctgcaggaaattgctcgtctgcaaagggttcaaggagctggtgctctcagtgcgaaggaggaaatggccaggctatctcggcaccttgcttccctgcccatccaggccaagcacaggatcaactgcatcaggaccgccatcaagcggaacatggaggtccagaactacgcctacgccaagcagatgctggacctcctctactccaaggcgcccccgacgaagcaggacgagctcaagagcctgatcgacatgtgcgtccagaggggcctgacgaacaaatccatcgacccgttcgaggacccctcgcagttctgctccgtgaccctcagccggctgtcgaccatcggccacgacgtgtgcgacctctgcggcgccaagttctcggcgctctccgcacccggttgcgtcatctgtggcatggggagcatcaagagatccgacgccctcgctggtgggcctggacccgtgccgtcacctttcggctgaaggtcgagtctgctcctttcgtcctccatcggtcctgatattgtatctatagtgttcagtttgcgttcattacattcgattcgttgcagcttgtattgtatgtagcctttttgacgtgtagcacgcttggtgttgagagcaatgtacacctgtactgttgggttggttgtgattatacacgcggttttttttggagctagcaatgtaaggtgcatgtgcatatctgagacgcgaacgtcgacgtgaaacgttctagtctccatagttggtaaatacagttactgcagaaactcgcatctatacgataataacagtgatagagagacctaagggattaattgaatgga

SEQ ID NO: 26542 - DNA, 2043 bp, Zea Mays
ccagcccacggtatgtgcaggtatttgattctcagtagcagcggcatctccatccagaccccggtcggctagccccaacgccgccgccgccgccgccgcccgccgctcggggattgcctgctttcctctgccgaccacatctacaccgcacaactggtccttccaagtgagcttcaatcccctgcgtgtagatggagagggttctcaaggatgacgccgtcgaggagaagggcgaccgcgccagaatggcatcgtttgttggggccatggcaatctcggatttggcgaagaccacattgggtccaaaaggaatggacaagatcctgcaatcaactggtagagggcgtaatgttactgttacaaatgatggggctaccattttgaagtcacttcacattgacaatcctgctgcaaaggtccttgttgacatctcaaaagttcaagatgatgaagttggtgatgggacaacttctgttgttgttctagctggagaacttttgaaggaggctgagaagttaattaacatgaaaattcatccgatgactattattgcaggttacagaatggctctcgagtgtgccagaaatgctttgctacaaaataccatggacaacaaagaaaatacagataagttcagagctgatctcatgaatattgctatgactactcttagttcaaaaatactttcccaagacaaggagtactttgctgaacttgcggttgatgctgtcttgaggcttaagggtagcaccaacttggaatctattcaaattctgaagaaacctggaggatctctcaaggattcatttttggacgaaggattcattcttgacaagaaaattggcatcgggcagccaaagcggattgagaatgccaaaattttggttgcaaacactgctatggacacagataaagttaagatatatggagcacaggtccgggtggattcaatgtctaaggttgcagacattgaagctgctgagaagcagaaaatgagagagaaagtccaaaagatcatagctcacggaatcaactgtttcatcaacaggcagttaatctataacttccctgaggaactctttgctgacgctggcatacttgcaattgagcatgctgactttgagggcattgaacgtctggctcttgttactggtggttaattcatttctctggggtcgcgatggggcaggcttgcaccattgtcttaaggggggctagtgagcatgtgcttgatgaggcagagaggtccttgcatgatgccttgtgtgtgctgtcccagacagtaaatgatacccgtgtcttgtttggaggcggttggcctgagatgctgatggctaaagaagtggatgaacttgcaaggaagacccctgggaagagatctcatgctatcgatgctttctcccacgctctgcaagccatcccaacaatcatagctgacaatgctggtttggacagcgctgagttgatctctcagctccgagctgagcaccacaaagagaactgcactgctggaatcgatgtcatcactggcaccgttggggacatgcaaaggctggggattcaagagtcgttcaaggtgaagcaggccatactcctgtctgcgacggaggccgcggagatgatcctcagggtcgatgagatcataagctgtgccccacgcagaagagaggataggatgtgattagacacgctgtttctcggtgtagtggggatgcttgttaccctagttttgatggtggttctggggcgttcaagttggtcacatttcaagtgtttttggctcctaagaacctagtaattgttatttcgttgaaacaaccaaccgtaggcttttttttttctagattctcatgatgtaccatttggtagcgaagttcttcctctgttcttttttatgtgtcgagttttagtttaaaactagacaacaaatattcgataatggaggtagtacattgtttacgatatgcttgtgccatgtgcctctacatgttctcctattccttttgacgtaggaatgactagcttgtctttgtttatgtgacg

SEQ ID NO: 26543 - DNA, 176 bp, Zea Mays
ggacaatgttgaatcccgacacgtcagctgcattgtcctccgcataaagtacatgttgttggacacaacctcgtggcatatgtcaatgaacattgccttgcacatgcaaaacctgttacagagaaatgaaacttaaagtgaggaaccctaaaaacatatgacagaagcaacaatat

SEQ ID NO: 26544 - DNA, 7702 bp, Zea Mays
gctcgccccacgcgtcccgctatttattccgccggctcgtcgccagcgccgctccctctgtcgcggccgagtggagctcgtcagatccgcgcgccgcacgccgatctgcgccacctccggaattttgctctctttttatggcactgtgcttttgagaaggcctttaattgtgctgtctgggccacggaacggcaatgtcgcagcttggattagctgcaactgcctcgaaggccttgccactactccctaatcgccagagaagtccagctgggactacatttccatcatctgcattgccgaggccctcaaaccgaaggaaaagccatactcgttcacttcgtgatggtggaaatgaggtatcagatgccaaaaagcacagccagtcagttcgtcaaggtcttgctggcattatcgacatcccaagtgacgcagtttcggaagtcgatatttcacatggacctaaggatcctagggggccaacagattcctatcaaatgaatgggattatcaatgaaacacataatggaagacatgcctcagggtccatggttgttgaattttgtgcagcactaggtggcaaaacaccaattcacagtatattagtggccaacaatggaatggcggcaacaaagttcatgaggagtgtccgtacatgggctaatgatacttttggatctgagaaggcaattcatctcatagctatggcaactccggaagacatgaggataaatgcagaacacatcagacttgctgatcaattcgtagaggtgcctggtggaacaaacaataataactatgccaacgttcaactcatagtggagatagcagaaagagtaggtgtttctgctgtttggcctggttggggtcatgcttctgagaatcctgagctgccggatgcattgaccgcaaaaggaatcgtttttcttgggccaccagcaacatcaatgaatgcattgggagataaggttggttcagctctcattgctcaagcagccggggtcccaactcttgcttggagtggatcgcatgttgaagttccattagagtgctgcttagacgcgatacctgaggagatgtatagaaaagcttgtgttactaccacagaggaggcagttgcaagttgtcaagtggttggttatcctgccatgattaaggcatcctggggaggtggtggtaaaggaataagaaaggttcataatgatgatgaggttagagcgctgtttaagcaagtacaaggtgaagtccctggctccccaatatttatcatgaggcttgcatcccagagtcggcatcttgaagttcagttgctttgtgatcaatatggcaatgtagcagcacttcacagtcgtgattgcagtgtacaacggcgacaccagaagattattgaagaaggcccagttactgttgctcctcgtgaaacagttaaagcacttgagcaggcagcaaggaggcttgctaaggctgtgggttatgttggtgcggctactgttgagtatctttacagcatggagactggagaatactattttctggagcttaatccccgactacaggttgagcatccagtcactgagtggatagctgaagtaaatctgcctgcagctcaagttgcagttggaatgggcatacctctttggcagattccagaaatcagacgtttttatggaatggactatggaggagggtatgacatttggaggaaaacagcagctcttgctgcaccatttaattttgatgaagtagattctctatggccaaagggccattgtgtagcagttagaattactagtgaggacccagatgatggtttcaaacctactggcgggaaagtgaaggagataagttttaaaagcaagcctaatgtttgggcctacttctcagtaaagtctggtggaggcattcatgaatttgctgattctcagtttggacatgtttttgcatatggactctctagaccagcagctataacaaacatgtctcttgcattaaaagagattcagattcgtggagaaattcattcaaatgttgattacacagttgacctcttaaacgcttcagacttcagagaaaacaagatccacactggttggctggatacaagaatagctatgcgtgttcaagctgagaggcccccatggtatatctcagtggttggaggtgctttatataaaacagtaaccaccaatgcagccactgtttctgaatatgttagttatctcaccaaaggccagattccaccaaagcatatatcccttgtcaattcaacagttaatttgaatatagaagggagcaaatacacaattgaaactgtcaggactgggcatggtaggtacaagttgcgaatgaatgattcaacagttgaggcgaatgtacaatctttatgtgatggtggcctcttaatgcagttggatggaaacagccatgtgatttatgcagaagaagaagctggcggtacacggcttcagattaatggaaagacatgcttgttgcagaatgaccatgatccatcaaagttattagctgagactccctgcaaacttcttcgctttttggttgctgatggtgctcatgttggtgcggatgtgccatatgcggaagttgaggttatgaagatgtgcatgcctctcttgtcacctgcttctggtgtcattcattgtatgatgtctgagggccaggcgttgcaggctggtgatcttatagcaaggctggatcttgatgacccttctgctgtgaaaagagctgaaccatttgatggaatgtttccactaatggacctccctgttgctgcctctagtcaagtacacaaaagatatgctgcaagtttgaatgctgctcgaatggtccttgcaggatatgagcacaatatcaatgaagtcgttcaagatttggtatgctgcctggacaatcctgagcttccttttctacagtgggatgaactaatgtctgttctagcaacgaggcttccaagaaatctcaagagtgagttagaggataaatacaaggaatacaagttgaatttttaccatgggaaaaacaaggacttcccatccaagttgctaagagacatcgtcgaggaaaatcttgcatatggttcagagaaggaaaaggctacaaatgagcgacttgttgagcctcttatgaacctactgaagtcatatgagggtgggagagaaagccatgcacattttgttgtcaagtctctttttgaggagtatcttaccgtggaagaacttttcagtgatggcattcagtctgacgtgattgaaaccttgcgtcatcagcacagtaaagacctgcagaaggttgtagacatcgtgctgtctcaccagggtgtgaggaacaaagctaagcttgtaacagcacttatggaaaagctggtttatccaaatcctggtgcgtacagggatctgttggttcgcttttcgtccctcaatcataaaagatattataagttggcccttaaagcaagtgaacttcttgaacaaaccaaactaagtgaactctgttccagcattgcaagaagcctttcagatctggggatgcataagggagaaatgactattaaggatagcatggaagatttagtctctgccccattgcctgttgaagatgctcttatttctttgtttgattacagtgatccaactgttcagcagaaagtgattgtgacatacatatcacgattgtaccagcctcatcttgtgaaggatagcatccaaatgaaattcaaagaatctggtgctattgttttttgggaattttctgaagggcatgttgatactagaaatggacaaggggctattcttggtgggaagagatggggtgccatggtcgttctcagatcacttgaatctgcatcaacagccattatggctgcattaaaagattctgtacagtacaacaactctgaggtcaacacaatgcacattgtgttattgaatgctgaaactgaaagtaatataagtgggacaagtgatgaccaagctcaacataggatggaaaagcttaccaagatactgaaggatagtagtgttgcaagtgatctccaagctgctggtttgaaggttataagttgcattgttcaaagagatgcaggtcgcatgccaatgcgccacacattcctctggtttgatgaaaagaactgttatgaagaagagcatattctccggcatgtggagcctcccctctctgcacttcttgaattgggtaagttgaaagtgaaaggatacaacgaaatgaagtatactccatcacgtgatcgtcaatggcatatctacacactaagaaatactgaaaaccccaaaatgttgcatagggtatttttccgaactattgtcaggcaacccaatgcaggcaacaagtttacgtcggcacaggtcagcgacactggattaggatgtcctgaagaatctctgtcatttacatcgaatagcatcttaagatcactgatgactgctatagaagaattagagcttcatgcgattaggacaggtcattctcacatgtttttgtgcatactgaaagaacaaaagcttcttgatctcgtcccattttcagggagtacaattgttgacgttggccaagatgaagctactgcttgttcacttttaagatcaatggctttgaagatacatgaacttgttggtgcaaggatgcatcatctttctgtatgccagtgggaggtgaaactcaagttggactgtgatggacctgcaagtggtacctggagagtcgtaactacaaatgtcactagtcacacctgcaccattgatatctaccgagaagtggaagatacagaatcgcagaagttactataccattcagctacttcgtcagctggtccaatgcatggtgttgcactgaataatccttatcaacctttgagtgtgattgatctaaagcgctgctctgctaggaacaacagaacaacatattgctacgattttccgctggcatttgaaactgcactgcagaagtcatggcaatccaactgttctagtgttcctgaaggcagtgaaaatagtaaatcctacgtgaaatcaactgagctggtgtttgctgaaaaacatgggtcctggggcactcctataattcccatggaacgtcctgctgggctcaatgacattggtatggtcgcttggatcttggaaatgtcaacacctgaatttcccaatggcaggcagattattgttgtagcaaatgatattactttcagagctggatcattcggcccaagggaagatgcattttttgaagctgtcaccaacctggcttgcgaaaggaagcttccccttatatacttggcagcaaactctggtgctaggattggcatagctgatgaagtgaaatcttgcttccgtgttgggtggtctgatgaacgcagccctgaacgagggtttcagtacatctatctgactgaagaagactatgctcgtattagctcttctgttatagcacataagctgcagctagataatggtgaaattaggtggattattgactctgttgtgggcaaggaggatgggcttggtgttgagaacatacatggaagtgctgctattgccagtgcttattctagggcatatgaggagacatttacacttacatttgtgactgggcggactgtaggaataggagcctatcttgctcgacttggtatacggtgcatacagcgccttgaccagcctattattttaacagggttttctgccctgaacaagctccttgggcgagaagtgtacagctcccacatgcagctgggtggtcctaagatcatggcgaccaatggtgttgtccacttgaccgtttcagatgatcttgaaggtgtttccaatatattgaggtggctcagctatgttcctgcaaacattggtggacctcttcctattaccaaacctttggaccctccagatagacctgtcgcatacatccctgagaacacatgcgatccgcgtgcagccatccgtggtgtagatgacagccaagggaaatggttgggtggtatgtttgacaaagacagctttgtggagacatttgaaggatgggcaaaaacagtggttactggcagagcaaagcttggaggaattcctgtgggtgttatagctgtggagacacagaccatgatgcagctcatccctgctgatccaggtcaacttgattcccatgagcgatctgttcctcgggctggacaagtgtggttcccagattctgcaaccaagacagctcaggcattattagacttcaaccgtgaaggattgcctctgttcatcctggctaactggagaggcttttctgggggacagagagatctctttgaaggtattcttcaggctgggtcagcaattgttgagaaccttaggacatataatcagcctgcgtttgtctacattcctatggctggagagcttcgtggaggagcttgggttgtgatcgatagcaaaataaatccagaccgcattgagtgttatgctgagaggactgccaaaggtaatgtgctcgaacctcaagggttaattgaaattaagttcaggtcagaggaactccaagactgtatgggcaggcttgacccagagttgataaatctgaaagcaaaacttcaagatgcaaagcatggaaatggaagtctaccagacatagaatcgcttcagaagagtatagaagcgcgtacaaaacagttgttacctttatatacccagattgcagtacgctttgctgaattgcatgatacttccctgagaatggcagctaaaggcgtgattaagaaagttgtagactgggaagaatcacgctctttcttctataaaaggctacggaggaggatctctgaagatcttcttgcaaaagaaataagacgaataattggtgacaacttcacgcaccaatcggcgatggagcttatcaatgaatggtacctggcttctcaggccacaacaggaagcactgctggatgggatgatgatgatgcttttgttgcctggaaggacagtcctgaaaactacaagggatatatccaagagctaagggctcaaaaagtatctcagtcgctctctgatcttgctgactccagttcagatctacaagcattctcgcagggtctttctacactattagataagatggatccttctcagagagtgaagtttgttcaggaagtcaagaaggttcttggatgatgatatgataccaacacatccaacacaatatgcgcatgctacatgttatttttcaagtacatacatagaaggatattgcttggccttgattgatcatgtctgatctaagtcgatcattattttcttgaaacttcctttcggacgtggtgctatggttgatgaatttggatgtgtgcgttctgccaggtgtaagcccaaaggtttatacagaccgagttaaggttaggaagagcacgagtgaacttgttctggttttgcagtggttaaggcagaaagttgtttcactgtagttctgagatgtattaccagcggcgctgtaattttagggtgtataatgcggatgctagtaaacaattgagtggttcattaaattttgaactcgaataatatgtttctgtaggcacatgtgacgtaccactacatgaaataaatgtcgctgaactagggcaccagagttttggtaggactaaggttttgtttggttatgggataaggtgagcatctccagcgttcccaaacttgaatttccc

SEQ ID NO: 26545 - DNA, 5971 bp, Zea Mays
ccccaccttcttcctcacttgccattcttcgctgacctctaaacctaaccgcccatgggcaaaggggcccctcctgccgttgccacagccacctccgtccctgaggcgccggtcttccaccccacagacgaggagttcgccgaccccctcgcctacgtcgcccgtatccgccccctcgccgagccctacggcatctgccgcatcgtcccgccgtcctcatggtccccgccttacgccctcgacttcaaggctctctccttccccaccaagaggcagcccatccaccgcctcctcgcccgccccgcccccgctgaccccgacaccttcctcctcgactatcgccgtttcctcggggcttcctccgcacatcgccgtggccgcaggaagggccttcccaagtcgccctctctctcggatggtcgcccgctcgacctctgccgcctgttccatgctgtcaagcgcttcggcggttactacggtgcctgtgaggggaagcgctggggcgacgtcgtccgcctcgttgatgataaggcgccaatgcacatatcagagtgcgccaagcacgtgcttgcgcagctatattacgagcatctctatggctatgagaagttcgccaacccacagcatgggaacaagggaaggaagcagccacggcccggatctgatgatcgaccatcggtttctcgttcacaggacgaagagagcaacatatctgttactggggagatggttgaggaggttacaggccggaaaaggagaaatttctcacgcaaggaattaggcagagggacatctcatggtcgttatggccgtgttgttaacatcactggaaataatgtggcatctgctgttgcccagaagcggacgaggaggaactctgatgctgtggttaccacagtcgatgaggtgtctgctggtgtccggaagcggaaaaggagaaagtctgatgccgcgtctaccgtgtttaatgatgaagtggatcaagtttgtgagcagtgtagtagtgggttacatggggatgtcatgctcctatgcgatcgctgtgataaaggctggcatttgtactgtttgtcgccgccgctcgagcgagtgcctccagggaattggtattgctcagattgcctcaactccgatagagattgttttgggtttatccaaaggaggaagtcctgcttgcttgagactttccggcggtttgacgacagggtgagaaagagatggtttgggcagaggaatcccagccgtattcaaattgagaagcagttctgggagattgtggaggggaaggcaggggaacttgaggttatgtatgggagtgacttggacacttcaatttatgggagcgggtttcctcgtcttggtgatacagtgccatcatctatggacctagagacgtggcagaaatactgttcaagcccgtggaatttgaacaattttccgaatctgcctggctcagttcttaggacagtcaaggataaaattcctggtgtcatggtcccatggctctacatagggatgctgttttcgtcattttgttggcatgttgaggaccattgtttctattcaataaattatttgcattggggtgagccaaaatgttgggtatggggtgcctggagcaaaagcaaatgcctttgagcaggttatgcgccaggccttacctgatctgtttgatgcacaaccggatctgctttttcaccttgtcacaatgctgaatccatctattttacaagcaaatagcgttccagtatatagcgtgatgcaggaacctggaaacttcatcatcaccttccccaggtcattccatggtggcttcaatttaggtttgaactgtgccgaggctgtaaattttgcccctgctgattggttacctcatggtggaattggggctaatctatatcgtttataccgcaaagcgcctgtcttgtcacatgaggagcttctgtatgtggttgcaaagaatggtgtggatgctgagtcacttacccatttgaagggagaaataaaaaggctttttataaatgagagaagacgtcgagtagagctttggattaatgggactgtcaaatctagcctaatgttgccaaggattaatccaaactttatcggaagtgaagaggatcctacatgcattatttgtcgacagtatctgtatctttcagcagtctcctgtaactgtaggctgtcttcttatgtttgccttgagcactggaagcacctttgtgaatgcagtccgaagaagcattgcttactttatcgacacacccttgcagagttgggggatttagtgtgcgaggtctctttggttagcccccaaagggacaatgttatgcagaatccacacttgctcaatgatgtttatgtgccgtctaaaaaggtcaaagatcactatatattatatagacagcttgcagaagattgggtttcaaactctgaacatattctccagatgccatttgtggaaaggtcttatgccactgctttggaagaagctgaacaatttctttggggtgatcatgccatggattctgtccggaacataacagtaagactaacaaaggctatgaagtgggccttgggtgttagaaaatgtctctccaaaattcaggactttctgaaagatggctgctctgaaaaagtaaattatgtggaaatagaagaactagttgctacgaaatgtgccccgtgctgtgagcctagtcttacaaaattgcaggcgtatgcagaggaagcgaaattgctgattaatgaagtaaacaatgcactatcatctttcttaacagtagacaaattggaaacattatactcaagggtttcagaattcccagttaagctaacagaatcatcgactttgttttgggagttatcttctgcaaagtcctggttgaagaaagcaagtgattgccttgaacagaataaactgggcattatcgacatagatgtcctcaataaactaaaatcagagataatacaacttcgagttctacttccagagattgatcttatctcaaagctgtggaaagatgtggaatcatggcaaacccgttgtcaattatatctccaagacttccctgatctaaaggagctggagggttttctccttgctgcggatggtgccaactttagcattccagagctgaacattcttaagcaacattactcaaattgttgctcttgggtgagtcgtgctaagaacatactcagaaaactttatgctacgagtgactatcacaatgctgttgaggagttgacaggcattctgaaggaagcagaattactaggagtaaaagttgatgaattgcctattgtggagaaagaactaaagaggtccttatgtaggaagcaagcatctgaggcacttgcaacagtaatgccaatggaggtggttgaagaaattttaaaagaagcttcgatactacatattgaagaggagcaaccatttgatgatctgtctcggatgctcaaagaggccacttcctgggaagagaaggctagacttattcttgaacgatcagcttctctctctgagtttgaagaccatatgaggtgttcagagggaataagagttatccttccgtctaaactgcatatgaaagcagaggttgatattgctaaattgtggatagacaaatgtcaggcctatttgagaccaggctgcaataaacttgcatttggagactttcttaaagttgatgatatcaaggatttaatcaatcagcctgcaaatttgaaagtcattcttgacacttcagaacttaattctgttctcaacaatattgaaaaatgggaacacagttcactaagtctactcaataattttagagccttacttcatttgaatagtattggctctacagttgacacacttcaaagaaaattggaggagctgcaaggtaaaatgaacacagaaatagaagttggattatctcttggttttgagttcaaggttctttgggaactgaaggattcttcgttgatgctaagatggatattgaatgcactgtctctgtgctgtatgattcctttattgcaggatgttgatagattaattgaagaagcagtccaccttcctgcttccttagcagattgttctttggttacattgttgatgagggcattgtcttgtctaagaaaatcacttattttgcttcctggttctggaacatctgcaaaatccaaattggaagatgttgaaaatattctagcagaattcaaggaggttgatgttccttatcctatcatgactgccaagctggaggatgctgtaaacaatcataattcatggatagagcaatgcaataccttcttcatgctgtctgatggccagtcgtgggctatgctgcaaaatctcagggacaatgggcagtctgttgcatttgattgccctgagatggataaagttgttgatgaggttaaaaacgttgaagagtggctcaatcagtgccactgtactctacttctagatggaaataatagttctttgctctccatacttgtaaagataagaggattattggatgatgtttgcacgttatatgctgaggattgtatgaagttaagattatgtgctgtatgctcatgtgacatcggagataggctggcatctagatgtgtgacttgtcaagactggtaccatggctcctgcgtggaaaacctgtctgctactacacaaacgacaattgaatggatgtgttcattttgttcacttttacagagtgaggaccaattgaagaaccaactatctgtaaagatgtctaaaggaaactgccctgcacttgccgcacttgatgaactcatctcttctgcaaagggtttatacactgggattgaggaaattaatttgctaaaagaaattgttgataaggctcgtaacttgaatgcctacttgatgcaaattctggatgattcagactgttatcatggagaagatcttactgtcatattcaaatctcttttagttgctctcaaggcgacatcagcttctggcttgtatgatgacaatgtcagttgcagaattgagtctgttttgagcagatatttgtggaagaaacaaatacataaactattgtatggtggtaaaaagtcatcgattcaagaagtactgtgccttgatgaagagggttcacatttagagatatgtgatcaagatttcttcaagttggagattagtaaaataaaggaaaccagcctgcagtggctggctaaagcagaggaggttgcatgtgattctggtgagcttgcactggatcttgtgtatggacttatagctgaaggggaaaatctctctgtagactttgagaaggaactaaagttactgagggatcgcagtgtcctctactgcatctgctgtaagcccgacgataacagggccatgattgcatgcgaccagtgtgatgagtggtaccattttgattgcatcaacctgcttggaccccctccagaaagcttcttctgccctgcttgccatccaaacaatggtgaagaatctgtatcacttgcacgctcagaggatgatgaggatagatcaagcactggagccggagctcacacgccgccggacagagtggtggagcgagacttaataaagcttcttagctgccatagcggtagctcatggagcgagagcagaagggctcctcatcgaacagctagaaggcgtagtagtttcgtcggattgttatgatgtgcaggaaccttcttagcaccgtgaattgattctttttagttaggttagaagcaggaacgatccatcatctgctgttgtaatttgtagctgttgacaggaggtagatgtagcaaggcagagctgtaagaacccattattattgatcttgtagcagtctgaggttttggaaattgtatcatatactaccgccgttcttgaatatttgtcgcctattgtttcaaaaaacgacaaataaaaaaattaaaaaagaatggagagtatttttatgctgctgctatgcacggc

SEQ ID NO: 26546 - DNA, 1598 bp, Zea Mays
cggcgatctccccgccgacgtgggcgaacggctccacggcgatcggatggccacgagcggccgtcgcctaccctcccacagtcccactcccacactagtccttttcccctgacgtggcagcggcaagtgcacccaaacgtttcgatatcccagagtggtgtggccgccgccggcggcttctttctccccttccattccgctccccgtgacgtcaccgaccaggcaagcactccgctccaccagagccgcctcgcctgtctgtccgacccacacacctaccggagcgcgcgtcccgaggtcggcggagcagggtcgggaggagggtatggcggtggtgggcgtcctcgcgctgcagggatcctacaacgagcacatggccgcgctgaggaggatcggggtgaagggggtggaggtgcgcaagccagagcagctcctcggcatcgactcgctcatcatccccggtggcgagagcaccaccatggccaagctcgccaactaccacaatctgttccctgcacttcgagagttcgtcggaggtggaaagcctgtctggggaacctgtgctgggctcatctttcttgcaaacaaagcagtagggcaaaaaacaggggggcaggaacttgttggaggattagattgtacagtccaccgaaacttttttgggagtcagactgtttctcttgcagcttcaaagctttgagacagagctttccgtgccaaagctttcggagaaggaaggagggaatgatacatgccgcggtgtatttatacgggcacctgctatattggaagtaggtccagatgttgaaatattggcggattgccctgttcctgttgacagacccagcattacaatatcatttggggagggtactgaggtttgtatgttgctttttttttactagaatactgcaattgtcttcaaatggccaaactgagttctgatatatttctagtaaactagatttttagcatgagcgctcattatttcttctcgttttaacagttccttttagttctttaatgagcagtgagccagtgaatatggccatttcttggaaagcaggaagaagagtattcaaaagatcgggtaattgttgcagtgcggcaagggaacatcctcgcaactgctttccacccagaattgacatcagactccagatggcatcgtttcttcttggacatggataaagaatccccagcaaaggcgttttctgcgctctccctgtcgtcatcgtcaagagacactgaaggcctgccaaagaataagccgtttgatctgcccatttttgagtaacgctaaagacaagacaaaccaaaagattgaaggaacgaagaaactgaccgtatttattatcgatcatcatttagccggttacaaaaacagccagctgagaatctgtcatactcagccgaaaaaagtgttgtctggtagctaacttgtacggataaaaaataatcacgctgtgtgctgtacgcaattctcatcagataaagcgaaacattgttttcctgggaattatagttttgctgaaggtgaccagttgaacacttgaacatggtaatactttccccctctatgtgcaacttcgttcaag

SEQ ID NO: 26547 - DNA, 4237 bp, Zea Mays
cagatgttcgctagagctgaggaccaccggagcagagggcagggcagcaatggagcagagtgtgagagggggcagaggcggaggcttaggcatggtaagtcaatttcctcctgcaacagtgaaaatgaagttgccattttctataaagccttggactggatctgaggataacattggaaagcttttgatggtgtggaaattcttaattactttcactgatgttctgggtctttgtccagttacacttgatgagtttgttcagtctcttcatgattatgattcaaggcttttgggagaactgcatgttgctctgttgaaatccattatcaaggatattgaggatgttgctagaactccatcaattgcactaggggtgaatccaggaggtggtcatccacaaattgttgaaggggcatattcctggggattcgatatacgtagctggcaacgtcatcttaatcttcttacatggcctgagatattaagacagtttgctttatctgctggttctggaccccaattaaagaaaaggactgtggaagattctcactatcattatgataatgagggtcatgatggtgagaatgttatattggcacttcgaaatggtacagcagcagtgaatgctgttgctaagatgaaggaaagaggttacaccaatcgccgtagatcccgccaccgtctgactcctggaactgtgaaatttgccgctttccatgtgctctcgcttgaaggaagtaatggtctcacaatattggatgtagcagaaaaaattcagaaatctggattgagagacctcacaacaagcaagacacctgaggcatccatagctgctgctttgtctagggatgcaaaactttttgagagaactgctccttcaacatattgtttgaagtcgccttatagaaaagatccagctgattctgaggccgtgttgtcagcagcgcgtgaaaaaattagggcctttcagaatgtgctttctgactctgaagctgaaaaggaggcagatgaagctgagagggatgatgattctgactgtgatgatgctgatgatgaccctgatggtgatgatgtgaatattgaggtggaagaagacaaggatcctcttcttgccgtcaaggcacaagacgaagtaccgagtacaactacagttattggcataaagaccaagttagatagtgtaggtaatgcattgaactcatcaagtagttttactaaatcagcaaaaggtgctcctctcccttatttaggcaggtccagtgcagcagatacttctaatgattcacctcttggaggcccatcagctaatcatgaagtaacccctggcgattctgaaaatactcaaattgatgaaagcaatcaaattgagccttgggtatgtgcactagcagaaggagactactgcgatcttagtgttgaagaacgccttaacgcactggttgctcttgttggtgttgccactgaagggaactctattcgtggtgtacttgaggaacgtttggaattagcaaatgccttaaagaagcaaatgtgggcagaagtgcaacttgacaagaggcgtttcaaggaagaatttgctagcagagtacaatataactctggcatgagttttaagcctgatatatatcaagaaaacaacatgacagagattacttcaactcgagcctgtgatgcttacaaagaaaacgatggacatgttgggacaatcaacaattgtgagatgcttgatcagcatagtcagggtaatgctggtggtataacttatgatagaaatgtcgtaggccaggaaatccatgcaaccccagatacttcgtatgttcagcagtatgcttatgctgataaaacacgatctcagttgaaatcgtacattggtcaccgggcagagcagctctatgtttacagatccctgcccctaggtcaggatcggaggcgaaacaggtattggcagtttacaacttcagcatcaccaaatgaccctggctcaggaagaatcttttttgaatcggaagatggatgttggagagttatcgactcagaggattcctttgattctttagtggctgcccttgatacacgtggcacccgggaagcacagctgcgttcaatgttgcaaatgatcgagacaacctttaaggaagctattaaaaggagaagtgcaagtatagaattatctgctacagtgtatccaaagaatggagctactgacatgataagggcaaattatcatagagaggttggaagctcaagcagtactccttttaatgatacatctgatagtgtaacagcatattctgattcttttaaagtagagcttgggcgtaatgattttgagaaggcagctatatcaaaaagggcagatatatttttaaaatggatgtggagggaatgctacaatcaggaagagacatgtgccatgagatacggcaagaaaagatgctctgaattgttgcattcttgtaattgctgctatcagatttacctagccgaagaaagacactgttcttcttgccataagactttcaaatccatttacaatttttctgatcatacaacacaatgcgaagagaaatggagaactgacccttactggaagatgcaaatcgctgattattctgttccaataggaatggtattactcaagcttcagttagttttgattgaggcatatataccatcagaagcacttcaaccattttggactgatgtgtatcggaaatcttggagtgtgaagctttatgctaccaaatctattgctgagacattccagcttttgactgttctggaaggtgcaataataccagatcgcctctcttctgattttgaaacaacaagcgaatgtctaaactcacaggttatcgcaccccaaaatcctgtgttaccagctggatttgcttctgtccttccatgggttcctgacactacttctgctgttatgctccgagtgttagaccttgactcagctattttgtatgtgcaaaatcaaaagatggagagggatgatggaggttttatgaaatttccatcaaggtatacagttgttaagagcaaacaagaaacaattccactcgaaccaactggtatggatttgtatgatggaaggtggcttcctggtagtggccgtaggggacgtggccgtggaagtagaggaggtagcaggggaggcaggggccgaagtcgaggtggaaggatcccaagaggtgttagcagctcatcaaggatcgagttcaaggatggcattgctgcttctggtagagcgccaaggaagaatgcacgtcgaggtcgaggtcgaggtcgaggtcgtgggcgtcgaactgtcagacctcggcagccatctgtgggcagaggcagatcaattccaaaggaaaatttgatgggaagctttagcatgcttaccagctcaaaggctgccgacattgaggagtctccacgaagctctggcgcagatgagtggggcttggagaccagaatgacatacactgagcgtgacgagaacagttctggatcacgctatgaagataacgaggaaaacggccagcccatggacgaggattatgaagagcaggttccagattactcaatagactattctagtgggtcgaggcaccatgaaatgatgtccatgatggatcacgagactgacgaggaagatgaagatgctgaaggtgatgagaatgtggaagaagatgatgcagaccacgcagttgacgatgccgatgttgagatggacgaaggtgatgatgaaattggtgatgacggagaggatggcggcgttggcggggagatgactccggatgaggatccagatgctacttcatattcatctgactacagcgaataagaaagcagaaataagtgaccttatcctagagatcctccctcagcgtccctttgtgaaccaaaaggaaaagctaaggagcgatagatgtgcatactgtttttttaggcaccgcaggttctaatagatttcctgacgtatgcctactcattcgatgagtggttgtatcttgctaggtatgtgcatgtcactgtagaattccccgagctatacagtgtctaaggagagatgatatcatatcgcaatttgctaatttggttcccatgcgtcatcccgatcctaatctgatccttaaatagagcccattgtccccttaagtagaagtgatcttttatcatgagttttaccatctcttaaaagtaaatatgaaattggagtctgctttctaaccgagaacatggc

SEQ ID NO: 26548 - DNA, 2724 bp, Zea Mays
ggccacgctactccgccgcgacctccgccccgccgccgccgcgtctccgccgccccagtccgccggctccgcgatagaacatcaagtacgtaaaaagtgctcacctctactggagagtgctctgctgcctggtggaagtgattcgactctgcatgaatggaaggctgttccagatatttggaggacagcagcagaaaaatatgctgacctcgtagctgtggtagatccttaccatgaaccgccaacggaatggacgtatacacagcttgagcaagaaatattggatttttctcaaggtctaagggccattggtgttgctccggatgaaaagctagcactttttgctgataactcatgtcgttggctagttgcagatcaaggaatcatggcaaccggtgctataaatgttgttaggggaacaagatcatctgatgaagaattgtttcaaatatacactcattcagaaagcattgcacttgttgtggacagtcctcaattctttaaccggcttgcagagtctttcatgtcaaggattaatacaagattcattgttcttctttggggtgacaaatcatgcatagatagccaagctattaaggatataccactttatggatacaaggatatcatcgaacttggtcgagaaagccgcaatgcactgtttctttccgacgagcaaggtcagcaagatgtctttgaatctattagtcctgaagatgtggccacactaatatatactagtggaacaagtggcacaccaaaaggcgtaatgcttacccaccgaaatctcttgcatcagataaataatctgtgggagattgtaccagcagaacctggtgataggttcctaagcatgcttccaacatggcatgcatatgagcgtgcttgtgagtacttcatcttctcgtatggtatccagcaagtttacactactgttaagtacctgaaggaagatttgcagcgttaccagcctcaatatattatatcagtaccactggtctacgaaactctgtacatttcaattcataggcagatttcatccagttctgctgctcgaaaaattattgctctttcacttatcaagataagtttcctatatatggaggcaaagaagatctatgagggaacagttttatcaaacaatcttgtcaaaccatcagtcatcgcctatatgatgaagtggctgtgggcaagattggttgctgcatttctttggcctttacataatctggcgaagattctagtatacaagaaaattcattcagcaatcgggatttcaaaggctggtattagtggcggtggaagtcttccgatgcatgttgataagttttttgaggccattggcattaaagtacaaaacggctatggccttactgagacttctcctgttgttgctgctagacgaccattctgtaatgttcttgggacagttggtcacccaataaagcatactgaaatcaagatttttgacattgagactggtgaggtccttccagatggttcaaaggggattgtgaaaattaaaggaccacaagtaatgaagggatactataagaacccatcggctacaaatgaagcttttgatcaagagggttggttcagcactggagatgtaggttggatagtacctcatcatgccatggggccaagtcgccagtgtggagggatgattgttcttgaagggcgtgcaaaggatacaatagtcctatctacaggtgaaaatgttgaacctgctgagatcgaggaagcagccagcaggagtaccttgattaatcagatagttgtgatcgggcaggatcaacggcgtcttggtgccataattgttcccaacaatgatgaagttctggcagaagcaaaaaggaagtccatccttggtgaggatggcgagctagcgaaagataaggtcatgaacatgctatatgatgaattgagaacctggacagcgcactgctccttccgtgtcgggccaattctggttgtcgacgaaccattcacgattgacaatggtctgatgacacccaccatgaaaataaggagggacaaagtgacagacaagtacaggagggagatcgaagccttgttcaagtgacacgcggagcgcgtgcgcacccatcagagttcccttttccgagtacaagacggcaaccgtacggcgtacatacagacacctgcaagctgcaatgcgtccatgtaccatgtatacgtacgtacttgcgtacggtcggaagatgactgggttggaactggaagagatgatatggcggagcggccggtgggagaacaccatgagacttgttactagactcgaatgttcgtaggttgcatgagcaaaatgacatgtgttccacaattgcatcattcaataagcgattcactgagccagataaggtcttgttcggttagttctcaatccatatatatggattgagtgagtttaaatcccaaacaagtcaaacttcttcttaatttttttcaatctcatccaatccatatgtaatgacaataaccgaacaaggcatgaatcaataaaattctcccaaaccaccgcaggtaccatgcaattggtaaaaatatcatgcttctatcttatagatatctgaaaccaactttacagttttcttaataccataagaatatttgtctgatagaaacatggaaaaaatacagacagctatgtacaactcttgttacattgaaatcatcgagacgttcgataagaggagg

SEQ ID NO: 26549 - DNA, 1967 bp, Zea Mays
cgggcatcccattatgttatgcagcagcattgtcatgttcctatccgacatgtcaggaagaagccctttgtacaagaaggcatatgtgtttttcagttctcccgtacataaagaattagttgctcaaataaaaaaggattcaagtgtactacctcgtattgccgcacttagtgagatgaatttggagtactttgctattgattcccagggtttcataactgaccatgagagggcattggaagaactttttagtgaaaatgcagaaggatctcacaagtataatgcttgtctgaacacaatggctactcgtatatccacagtatttgcatcaatgagggaattccctcgtgtacactaccgtattgccaagacgattgatgcttctacaatgacaacactacgagacttagtccccacaaagcttgctgccagtgtatggaattgtcttgcgaaatataaaacgacaatacctgaatttcctcaaacagaaacttgtgagctacttatagtagaccgttcaatagatcagattgcaccaattattcatgaatggacttatgatgctatgtgtcatgatctgctttgtatggatggcaacaagtatgttcatgaggttccaactaaaaatgggtcggcaactgaaaaaaaggaggtcctgttggaggatcatgaccctgtctggcttgagcttaggcatgcacatatagcagatgcaagtgagaggctacatgataagatgaccaacttcatttcaaagaacaaagctgcacaattgcatcaagcacgaaccgatggagaattatcgacaagagatttacaaaaaatggttcaggctcttccacagtacagtgatcaaattgataagctttccctgcatgttgagattgcaggaaaactcaataacataataagggaacaatgtcttcgggatgttggacagctagagcaagatcttgtgtttggcgatgctggaaccaaagaactaatcaactttttgagaacacaattggttgtaagtcgtgaaaataaattacgcttgctgatgatttatgcagcacttaacccagagaagtttgaaagcgacaagggtgcaaaattaatgcagttggcaggattatctgctgatgacatgattgctgtaaataatatgcgttgcttatgtgggcctgataccaaaaagtcttcagtagggggttttacactgaaatttgatgttcacaagaagaaacacacaaatcgaaaagagcgaacaggggaagaatcaacatgggcactctctcgattttaccctattttggagcaattgattgaaaatcttagcaaaggtgagctgccaaaagatgaatataactgtatgaatgaccctagtcctactgttcatggactgccaaccagtagctctgcccgaacaagccccgctcactcaatgcgatccagacgaacaggtggcacatgggcaagacctcgtggctctgatgatggatattcaagtgattctgtgttgaagcatgcctccagtgacttcaggaaacttggtcagcgtatatttgtttttgtaataggcggtgctactcgatcagagttacgtgctgcacacaagctttcatccaagctgaagcgagacatcatccttggttcatctagccttgatgatcctccccagttcatcacaaaattaaagttgatgtcagtagaagaattgacacttgatgaccttcagctgtaaatggtgtccgcccacacggagtgtaaccttttattttctctgttctgtcagctcttatttgtgggggcctgtcatattcattcggtgaaatgcattcttaataccacttttactggtgaatgtaagaaaaaaactgttatgcaattaatcttttcatgcaattattgtgcaaccaaaataccagaagtcatgagaagttctcaaaattttattgatgaattttatttactcaatcgatcta

SEQ ID NO: 26550 - DNA, 2753 bp, Zea Mays
cgcggcttgatttcacttggccctctagcgttgtttggtcaatcctctctctcccttccccatctccccgtaccccaaaccctaggacgcagcgccgccgccgtagcacccccacacgcagcaagatgaggccgcgcggcaggggcgacgacgtcgaagacgacgaggatgagtacgaggacatcacgccccctcgaagaacgccagagcctgaggccgaccccgtccgctcgccctcgccctcgcccgctcctgcccccgccccaccacatcccgcgcgtgcccctctcagcagtctcgttgtcaggccgccgccgcagcaacaggagaacggcggcggatcctccccgccctcatcctccgcccgctcgctttctcccagcaccggcggacaccgaggccgcggggcctcgcccccgcggcgacggcgggacttctcaccgccgcctccccgtggttgggtgaggcgccggtcgccgctgccgccaccgccggagaggcggcgtcctgggagcccgccgccccagcgccgacgcttcagcccaccgccccggtcccacctaccgcggcatccgcgcttccacgatgagcaggaagaggctgggacaatgacgttgggagaagaatgtaactagctgttctagaggcttatttgcaagtgaattgctgggcatattcacatcttcatgatttgaagcctcaaggatgttcatatagcatcgatattggagctgtctcctgtgcaatgtgagacattccaactactacttggtatacttgtaagctgaagttgcttttacagtcgagaaacagaaccaaggtgattggtgtggaacaccactttgtagcattcacagtaacatagcattcctggtgttttaccttttcccagttcaggttggaagttggaactcttcaagtaggtcccagtggggattagcttcgtggcacttggtgctttcttaatcttgtgcagtcatgtggagggagaagtattcggtcttgaagcgacctccttgattctaatatttgagatgccatcaagaatctgttgcagtggtctatatgtcattgacctgtcaaatgtttgtttgagttaacttgcaaatggaattgtgggatcctacattggctaaaggaattaagattttcttagcaacatcaactccactctttggacacgtagctactaattacaccgtgaactaccagaaggccgctattcagttgagctgcagtggcaatggtatttccttctcagaaatgtggaccttgcaattataacttcgttcagcatatgaagagtagctcttctgaaagtagttctcatgaagtggttgcctgtttcagttccatgtgactggtgatatggaatgcatgcaggcccttcgccaccacgcagagcagaagccagcaaatttgatgatgatgttagtccacgttacactcatggatatcaagggggtggtagaggaggtgcaaggttccgagagggtcctccaccatatggaagaggtagatcatatgggagaggttatggtgctccacatggaaaggatttgattaatattgatggagaatatgttcaccgaaatgacccaaatctgtcgccaagagaaggtgattggatatgccagaaccctaattgtggaaatctcaattttgctcggcgaactcactgtaacaactgcaacaagttccgctattcagcacgtgaagcatatgaacctaggcgcagccctcccttcaggagttaccccagccctccacgagggcctccaaggatggttggtccacctggtgatcgagcccctgcaagagagatggccaggtacagatccccacctcatggttggggagcaagtgatcccagggcatatgcaggtcgatcccctccagaacgtgcaggacggtttacagatccatcaactaagggaagaatgggcttccgtggtgagcgtgacccaagggaccgtgtgaaatatgagtggtctgccactgatgactacgttcagagggagcgcccatatgatggttatcttgacaggagtcggcgtcgctcaggatctcctcgtggtaactggggaaatgatctgcgtgacagaagccgctctcctgcacggaacaggcctatgaagagttccttcaccggaagaggtcgacctgacgactatgctgctgatccatatggcagccgagggagacccaatggtatggaggccggccgtgggcgtgggcatgcttacagagcaggcagtggtccgtaccctggtgagactcgaggtgaccaacgcgctgctccacgcgctaggaacgaggatggctattagatcttcatgaagctgagtgacgtcattttgtctttgttggtcaggaaaggagaaccttagtcaagctggagcttgagaatatctgcagcttgtaatattaaagatcgtgcacacatcctgttcctgcatgttgtggagttatggttggcttctctcatgctcagtggtgggatctattaaagggtcatgggtggacacatatacacccaataatttctgcaaaaaaaattagtactcatcaagtagcaaataacgttctattgccgtgattctaagcgtctgtttagaagtatccagtttttaagaaactggtttatgtaaattgaggtggtttatagaaattggattcccatttcttaaaaaccaagaagctggccacttctaactaaaaaataaaattgcttccaaataggaccaaaatat

SEQ ID NO: 26551 - DNA, 4211 bp, Zea Mays
ttcgtttcggtgcctccgcggtggaggtggagcggagccagcctcttgccgtgccgcgcgcggccgtggccgaccgagcgagagagtggcaaggcaagcggggatttgcgggaaggaaggaaaaccccgcgcgagactcacgtcgcgcctccggcctcccccctcccccctcccccagcgcgcctttcggattctgttgcgccctcgccaggggcctcggcgaacaagcggtgcgcgcgagcggcgggaaccctaggcggcggtgatggcgagcaggggagccgtggcgccggcggtggaccctagcagcccgagctcgagggcgtggggcggggaggacgagacgcctggggcggggaaggtgaagctgatgtgcagctacgggggccggattgcgccgaggcccggggacggggcgctgcggtacgtgggcggccagacgcggctcatctccgtaccgcgcgccgcctccttcggggagctcctgcggaaggtggaggcggtggacgaggcctccgcctcctctggcggggtgctactcaggtaccagctccctggggaggacctcgattcgctgatctccgtctcaggcccggaggactacgacaacatgatggaggagtacgagaagctggccgctgccgcgcccgacggctccgccaagctgcgggtcttcctcttcccggcctccgggagcgatgcggccggctctggctccgggtcccacctcgtcgccgcggtggacgagtctgggcagcggtacatcgacaccatcaactgcgtctccgcggaggctatggccgtggccatgcgtccgaaggacagtgtcgccagtgccggttcctccgcacacaactccgaggcatccgagtacagcggcctagtggaagagccatcaacgttaccgcctcatcaggttgctcctgcttatgcaacaccgcatcagccgcctcaagtaaccacttatgtgcagcagcagcctcaagtcacccattatgtacaacaccagcatcctcagtctgctgcttatgtgcagcaggtgccgcagtcgtacatagagccacagcaggtacaatacatcaacacccaacaatttggtgggcatggggtgccgcaatctgtcaattacgtgcctgtgcatatgaaccaattcatgcccagcattcctgtgacgggttctttggccaccactgctgctcaaggcagtacgttcaggcctgcttccgcaggtgcagaaccagttctggagaccacacagttcacaaggccagtgcaagctcaggttgatcatagttaccgggtggtgcaaactccgctatcacagcttcctcctttgtcttctgtgcatcagcaggcaaatgatgcgcagaggcagaggtttggtgttcaacaagcgatgataagtgcagtaagcatgccagtggtgaccagttcaggcacaattcctgtggtggttagctcggccactgttccatcattgagatatgatgattgcacaatgtgccaaaaagcattgccacatgctcattcagataatattatccgggagcagggaaattctcgtgcaacaggcaaccttgaggcagctccaatgttttatagcccccatcaagacagtggatccaacaaatctagtctaggtgcaagttcaggaactcctacaaactatgtggcggaaccaagagctgggaacacagcagtgatgacacaatttaattcgactcttcctgccagaaaacctgcagttcaggcaactgcatctccggatacaggtgtgccggttcaacccaccgtgattcctttaccagtgtccagtgcacctgctccagatggagtatttgtcggtcattctcctcaggctggggctgaagatcctgtcaggtaccagcagcaactattctcttatagcatgcagccagcacaagttctagtgaatggcccacaaggcattgatgccagtgcatacaaggattcaaatcatccagcagcggaaccgctgagagaatatgcacacaatcttcttcatgactatgccagagctatcgatgttcatacgcaagcagttcatttgggtcctattgcaccaccagaatctactgtgcatgggaagccttctacttatggtatcattgatcatgccaaagttggaaagctacctttaaatattgatggtagttctatctacaaatctcaagctggagggtatcatatagggattacaaatgcctttgctgctcctgcattcaaccaagaggaaaacatttccaggcacagtgagaagccacgttatgcttttgatattggtacacaaaatgtccatcctgacataatccagcaaccacccaatctggctgtccagagcaaccttatagctcccattgaaccacctggttctaatgaaaaggttactgtgctaccatctaactctggtgctcaggttccttctggatcacctgtacagcgtcctaaagaaatggccaatcacttggtttcaattccccccaatggcagtaacaaatttccattgcagtctactgttggtattgatcgtgttgaaggtacacaggaaccggcttatgcagattcacttttctcaaatcaggatccttggaaagcagtgggcaatgcatctttagtgcctccaagaccaaacaagctaactaaggagtctgttgtttctggaggtcaatatattgatggccatatgcctgatatgaacatgcatgctgccataccctcagaagaagactcatgttttaaggatatgcacacagttaaattgaacaaaggacctggagaagatagtatcaagcgacaattacaagctgttgctgaaggggtagccgcatcagttcttcagccaccctttcctgaaaaaacagtggtgttctctggggatcacatcgattcgcatggagcagaagttgatgtcaagttccaggatgaagggaacaatcagtcagacaaaataagtcaaggggttcaagttttagatgacaacgataaccttcagataataaagaacagtgaccttgaagaattgcgtgaacttggttctggaacctttggtactgtttaccatggaaagtggagaggttcagatgttgctataaagagaatcaacgatcgatgctttgctgggaaggcttctgagcaagagcgtatgaggactgatttctggaacgaggcagacaagcttgcatctttgcaccatccaaacgtagtagccttctatggtgttgttgtagatggacctggtggatctgttgcaacggtaacagaatacatggctaatggctcactccgacaagcattacaaagacatgaaaagatctttgatcggcgtaggcgtctactaattgcaatggatgttgcatttggaatggaatatctccatgggaagaatatagtgcattttgacttgaagagtgacaatctgcttgtcaacctaagggatcctcaacggcctatatgcaaggttggtgatttgggattatcaaaggtcaaatgccagacactaatctctggcggagtaagaggaacacttccttggatggcccctgagttgttgaatggcagcagcagccttgtctcggaaaaggtgaagagccttacgccgagctgcactatggggccattataggtggaatcgtgaataacacgctgcgacctccggtgcccgagtcctgtgatccccagtggaggtcactgatggagcggtgctggtcagccgaaccgtcagagaggccgagcttcaccgaggtcggcaagagcctgcgcgccatggcttctcctaccaaggcacaacaatcgaaatagatgctttagccttgcctctcgcgtccttctgttcagcagattgtttcagtcttcaaaccgaggaggtgccaccatggctggcctgccttttgtacatgaataagttgaagaaaaatacgagaatgtggcatgcttatagagtcggtggatgcttgatgcttcctgtcttgcttttgacatggatcgtggatatatatggtagtacagcgtagtgtaagagtggcccctcgttctcacgtccattaggagttcaggacgaggtgagagcatctttagcagcgctcaaattagggcctcacttttgatctgaagacttattttggcgggcctagcttttgacatgtgctctaacaaagttctccaatctatcgcaacagacaatgggcctgttt

SEQ ID NO: 26552 - DNA, 176 bp, Zea Mays
tctccttttcccttgggctggctgccctctcctcccatggtagcccctctccacggcttcctcctccctctagatcccccccgcgcagcaaggatcgagaagaggaggagcacattgagttgaaggggaagagaggatcaaggagatgttcttccccatctcttcttgcagaattt
